(19) United States
(12) Patent Application Publication
(10) Pub. No.: US 2024/0401031 A1
(43) Pub. Date: Dec. 5, 2024

(54) Platform Using iPSC-Derived Cardiomyocytes Carrying Gene Variants as Models of Cardiac Disease and Drug-Response

(71) Applicant: SRI INTERNATIONAL, Menlo Park, CA (US)

(72) Inventors: Paul OMAILLE, San Diego, CA (US); Danuta SASTRE, West Sacramento, CA (US); Wei ZHOU, Fremont, CA (US); Leena SHEWADE, Mountain View, CA (US); Joy CALAOAGAN, San Jose, CA (US)

(21) Appl. No.: 18/708,428

(22) PCT Filed: Nov. 9, 2022
(86) PCT No.: PCT/US22/79521

§ 371 Date: May 8, 2024

Related U.S. Application Data
(60) Provisional application No. 63/277,272, filed on Nov. 9, 2021.

(51) Int. Cl. C12N 15/10; C12M 1/32; G01N 33/50

(52) U.S. Cl. CPC C12N 15/1082; C12M 23/12; G01N 33/5044

(57) ABSTRACT

This disclosure is in the field of cardiac diseases. For example, the disclosure provides a new platform comprising iPSC and cardiomyocytes carrying one or more gene mutations, and models to study the effect of those gene mutations on cardiomyocytes, and on drug toxicity. This platform is identified herein as PREDICT PLATFORM.

### FIELD

[0001] This disclosure is in the field of cardiac diseases. For example, the disclosure provides a new platform comprising iPSC and cardiomyocytes carrying one or more gene mutations, and models to study the effect of those gene mutations on cardiomyocytes, and on drug toxicity. This platform is identified herein as PREDICT PLATFORM.

### CROSS-REFERENCE TO RELATED APPLICATIONS

[0002] This application claims the benefit of priority of U.S. Provisional Application No. 63/277,272, filed on Nov. 9, 2021, the contents of which are incorporated herein by reference in their entirety.

### REFERENCE TO SEQUENCE LISTING SUBMITTED ELECTRONICALLY

[0003] The instant application contains a Sequence Listing which has been submitted electronically in ASCII format and is hereby incorporated by reference in its entirety. Said ASCII copy, Nov. 8, 2022, is SRI 210040 202210-20_SL.xls and is 5,495 kilobytes in size.

### BACKGROUND

[0004] Recent advances in sequencing technologies and genome wide association studies (GWAS) have identified a spectrum of genetic variants as determinants for an individual's response to drug treatments. However, translating these computational findings into a clinical application remains a major hurdle for personalizing medicine. Testing for cardiotoxicity is one of the key components of the drug development process.

[0005] Cardiotoxicity is the lead cause for approved drug withdrawals from the market and FDA mandates cardiotoxicity assessment in preclinical testing adding significantly to drug development costs. For example, several therapeutic drugs have been withdrawn from the market due to unwanted side-effects on the hERG channel that leads to potentially lethal cardiac arrhythmias. Several hERG channel mutations have been identified in the clinical setting but the lack of suitable model systems has prevented the in-depth studies of their role in adverse drug response. KCNH2 gene (hERG) encodes the potassium voltage-gated channel subfamily H member 2, the rapid delayed rectifier potassium channel implicated in cardiotoxicity events (i.e., Long QT 2 syndrome). Human variation in KCNH2 has been directly linked to Long-QT syndrome and might account for some interindividual differences in cardiotoxicity responses to drugs. Current hERG assays use monogenic (i.e., from one individual) cell lines-a one size fits all approach that ignores the contribution of interindividual responses to drugs. Thus, there is a need for hERG testing that introduces genetic diversity for better prediction of a drug's effects on a diverse human population.

[0006] Comprehensive testing of the impact of population-wide genetic diversity on adverse drug effects has not been reported to date. There is a need for genotype-phenotype maps that link pharmacologically relevant gene variants to adverse drug reaction phenotypes. These maps could provide an essential framework for prospective preclinical assessment of drug toxicity and, when coupled with companion diagnostics, empower physicians with actionable intelligence to prescribe the most effective medicines while averting adverse drug reactions.

### SUMMARY

[0007] In one embodiment, the disclosure provides a platform that includes a panel of cell lines containing genetic diversity of established clinical relevance (and variants of unknown significance) for studying these cell lines' functionalities with different drugs. Specifically, the cardiotoxicity assays using the disclosed cell lines and platform can detect adverse drug effects that arise from interindividual genetic differences.

[0008] The cell lines, related methods, and assays provided by the disclosure include cardiomyocytes derived from genome-edited human induced pluripotent stem cells (iPSC) that carry specific genetic variation of KCNH2 (hERG) allele for testing potential cardiotoxicity (and other functional effects) for various compounds. Specifically, the methods test whether the cardiomyocytes with specific KCNH2 alleles exhibit different or disease mimicking functionality compared to common (wildtype) alleles, and whether any of the compounds tested have the effect of cardiotoxicity or other functionality modification.

[0009] In addition to KCNH2, multiple genes have been shown to be related to drug induced cardiotoxicity, such as KCNQ1, SCNA5, KCNE1, and KCNE2. The disclosed cell lines, methods, and assays here can also be applied to these genes. The disclosure provides a method for characterizing all polymorphisms in a gene of interest and their potential relationship with cardiac diseases and drug-induced cardiotoxicity. The disclosed experimental data establishes proof of concept here with the KCNH2 alleles because of its high clinical relevance and presence of polymorphisms.

[0010] The following embodiments of the disclosure are just exemplary:
[0011] 1. A prime editing guide RNA (pegRNA) designed for prime editing of a target gene that is hypothesized as having an association with arrhythmia and/or drug-induced toxicity to cardiomyocytes, preferably wherein the cardiomyocytes are derived from induced pluripotent stem cells (iPSC), and preferably wherein the pegRNA is barcoded.
[0012] 2. The pegRNA of embodiment 1, comprising a spacer sequence and a DNA synthesis template, wherein the spacer sequence comprises a region of complementarity to a target strand of a double stranded target gene DNA sequence to be edited and the DNA synthesis template comprises a region of complementarity to the non-target strand of the double-stranded target gene DNA sequence and one or more nucleotide edits compared to the target strand double-stranded target gene DNA sequence.
[0013] 3. The pegRNA of any one of embodiments 1 and 2, comprising a guide RNA (gRNA) core, and an extension arm comprising a DNA synthesis template and a primer binding site (PBS),
[0014] wherein the gRNA core associates with a nucleic acid programmable DNA binding protein (napDNAbp), which is fused to a domain comprising polymerase (preferably, RNA-dependent DNA polymerase) activity,
[0015] wherein the primer binding site comprises a region of complementarity to a non-target strand of the double-stranded target gene DNA sequence.
[0016] 4. The pegRNA of any one of embodiments 1 to 3, wherein the DNA synthesis template is designed to edit the target gene in at least one site.
[0017] 5. The pegRNA of embodiment 4, wherein the DNA synthesis template introduces random edits into the target gene.
[0018] 6. The pegRNA of embodiment 4, wherein the DNA synthesis template introduces pre-selected edits into the target gene.
[0019] 7. The pegRNA of any one of embodiments 1 to 7, wherein the target gene is selected from genes that encode potassium channels or potassium-channel related genes, sodium channels or sodium channels related genes, calcium channels and calcium channel related genes, and cardiomyocyte structural genes.
[0020] 8. The pegRNA of embodiment 7, wherein the target gene is selected from potassium channel/related genes selected from human ether-a-go-go related gene (hERG)/KCNH2, Hyperpolarization-activated cyclic nucleotide-gated (HCN) channels; transient outward potassium current channel; Slowly activating delayed rectifier potassium current channels; Rapidly activating delayed rectifier potassium current channels; Inwardly rectifying potassium (Kir) channels; Inwardly rectifying potassium channels; G protein-coupled, inwardly rectifying potassium channels; ATP-sensitive potassium channels; sodium channel/related genes selected from SCN5A, ACN1B, SCN2B, SCN3B, SCN4B, GPD1L, RANGRF, SCN10A; calcium channel/related genes selected from CACNA1C, CACNB2, CACNA2D1, RYR2, CASQ2, TRDN, CALM1-3; and other genes selected from KCNQ1, SCNA5, KCNE1, KCNE2, KvLQT1, Nav1.5, ankyrin-B, MinK, MiRP1, Kir2.1, Cav1.2, caveolin-3, Nav.beta.4 genes, SNTA1, SLMAP, PKP2, ANK2, CAV3, SLC4A3, TRPM4, DPP6, IRX3, GNAI2, ADORA1, GNAS, KCNQ1, SCNA5, KCNE1, KCNE2, KvLQT1, Nav1.5, ankyrin-B, MinK, MiRP1, Kir2.1, Cav1.2, caveolin-3, Nav.beta.4 ATP-binding cassette (ABC) transporters involved in drug transport (e.g., ABCB1, ABCB4, ABCCI, ABCC2, SLC10A2, SLC28A3, SLC22A7, SLC22A17), Carbonyl reductases in drug metabolism (e.g., CBR3), Hyaluronan synthase 3 involved in oxidative stress response (e.g., HAS3), Hereditary hemochromatosis protein in iron metabolism (e.g., HFE), Retinoic acid receptor gamma and DNA topoisomerases in topoisomerase-induced DNA damage (e.g., RARG, TOP2B), CUGBP Elav-like family member 4 in splicing of sarcomere genes (e.g., CELF4), DNA polymerase gamma in mitochondrial replication (e.g., DPOG2), and chaperones involved in ion channel trafficking (e.g., Hsp70 and Hsp90).
[0021] 9. The pegRNA of any one of embodiments 1 to 8, wherein the prime editing introduces one or more genetic variations into the gene, where the genetic variations have been previously identified as benign, likely benign, pathogenic, or likely pathogenic to cardiac function.
[0022] 10. The pegRNA of any one of embodiments 1 to 6, wherein the drug has not been previously identified as a drug capable of inducing cardiomyocyte toxicity.
[0023] 11. The pegRNA of any one of embodiments 1 to 6, wherein the drug is selected from a list of blackbox labeled drugs (currently marketed drugs that contain a label to indicate that Long QT patients should avoid using this drug; including Table 2), ii) drugs withdrawn from the US market due to cardiotoxicity events, iii) drugs that failed clinical trials due to cardiotoxicity events-(some may be marketed in other countries; iv) drugs associated with cardiotoxicity for particular SNPs as documented in the literature (e.g., ClinVar; antiarrhythmics, class i and iii; cisapride, amiodarone, dofetilide, clarithromycin, hydroxyzine, quinidine and disopyramide), and v) TdP associated drugs (including Table 3).
[0024] 12. The pegRNA of any one of embodiments 1 to 11, wherein the pegRNA is designed to introduce a mutation into the human KCNH2 gene, wherein the mutation is selected from a SNP, preferably wherein the SNP is selected from the SNPs identified in Table 1 and/or SEQ ID Nos. 2-1054.
[0025] 13. The pegRNA of embodiment 12, wherein the SNP causes a V476I mutation in the KCNH2 protein as in SEQ ID NO. 105.
[0026] 14. The pegRNA of any one of embodiments 1 through 13, wherein the pegRNA is encoded by the DNA sequence of any one of SEQ ID Nos. 1100 to 1113.
[0027] 15. A gRNA designed for the regulation of expression of a target gene by CRISPR interference, wherein the target gene is being tested for their role in cardiomyocyte function, proliferation, viability, survival, morphology, the expression of markers and receptors, and “heart beats” in vitro (which can model arrhythmias), preferably wherein the target gene is selected from: potassium channel/related genes selected from human ether-a-go-go related gene (hERG), Hyperpolarization-activated cyclic nucleotide-gated (HCN) channels; transient outward potassium current channel; Slowly activating delayed rectifier potassium current channels; Rapidly activating delayed rectifier potassium current channels; Inwardly rectifying potassium (Kir) channels; Inwardly rectifying potassium channels; G protein-coupled, inwardly rectifying potassium channels; ATP-sensitive potassium channels; sodium channel/related genes selected from SCN5A, ACN1B, SCN2B, SCN3B, SCN4B, GPD1L, RANGRF, SCN10A; calcium channel/related genes selected from CACNA1C, CACNB2, CACNA2D1, RYR2, CASQ2, TRDN, CALM1-3; and other genes selected from KCNQ1, SCNA5, KCNE1, KCNE2, KvLQT1, Nav1.5, ankyrin-B, MinK, MiRP1, Kir2.1, Cav1.2, caveolin-3, Nav.beta.4 genes, SNTAI, SLMAP, PKP2, ANK2, CAV3, SLC4A3, TRPM4, DPP6, IRX3, GNAI2, ADORAI, GNAS, KCNQ1, SCNA5, KCNE1, KCNE2, KvLQT1, Nav1.5, ankyrin-B, MinK, MiRP1, Kir2.1, Cav1.2, caveolin-3, Nav.beta.4 ATP-binding cassette (ABC) transporters involved in drug transport (e.g., ABCB1, ABCB4, ABCCI, ABCC2, SLC10A2, SLC28A3, SLC22A7, SLC22A17), Carbonyl reductases in drug metabolism (e.g., CBR3), Hyaluronan synthase 3 involved in oxidative stress response (e.g., HAS3), Hereditary hemochromatosis protein in iron metabolism (e.g., HFE), Retinoic acid receptor gamma and DNA topoisomerases in topoisomerase-induced DNA damage (e.g., RARG, TOP2B), CUGBP Elav-like family member 4 in splicing of sarcomere genes (e.g., CELF4), DNA polymerase gamma in mitochondrial replication (e.g., DPOG2), and chaperones involved in ion channel trafficking (e.g., Hsp70 and Hsp90).
[0028] 16. The gRNA of embodiment 15, wherein the gRNA target sequence is selected from those of SEQ ID NO. 1116 to 1155 and described in Table 4.
[0029] 17. A composition comprising a pegRNA nucleic acid according to any one of embodiments 1 to 14, and, optionally, a prime editor comprising nucleic acid programmable DNA binding protein (napDNAbp), which is fused to or bound to a domain comprising polymerase (preferably, RNA-dependent DNA polymerase) activity, a sgRNA, an iPSC, and a cardiomyocyte.
[0030] 18. A composition comprising a library of two or more pegRNA nucleic acids according to any one of embodiments 1 to 11, wherein all of the pegRNA nucleic acids are designed for prime editing of one or more (cardiomyocyte) genes at one or more multiple sites, and, optionally, a prime editor comprising nucleic acid programmable DNA binding protein (napDNAbp), which is fused to or bound to a domain comprising polymerase (preferably, RNA-dependent DNA polymerase) activity, a sgRNA, an iPSC, and a cardiomyocyte.
[0031] 19. The composition of embodiment 12, wherein each of the pegRNA nucleic acids are designed for prime editing of a single (cardiomyocyte) gene.
[0032] 20. The composition of any one of embodiments 12 and 13, further comprising one or more negative controls each comprising a pegRNA that does not introduce any edits into one or more genes.
[0033] 21. A composition comprising the gRNA of embodiment 15 and, optionally, a nuclease.
[0034] 22. A cell modified by CRISPR interference with a DNA polynucleotide coding for the gRNA of embodiment 15.
[0035] 23. A cell genetically engineered to carry one or more specific mutations in one or more target genes, wherein the target genes are being tested for their role in cardiomyocyte function, proliferation, viability, survival, morphology, the expression of markers and receptors, and “heart beats” in vitro (which can model arrhythmias), preferably wherein the cell is a iPSC or a cardiomyocyte derived from a iPSC.
[0036] 24. The cell of embodiment 23, wherein the cell is genetically engineered using CRISPR, base editing, or prime editing, preferably prime editing, more preferably with a pegRNA of any one of embodiments 1 through 14.
[0037] 25. The cell of any one of embodiments 23 and 24, wherein the target gene is selected from KCNH2/hERG, KCNQ1, SCNA5, KCNE1, KCNE2, KvLQT1, Nav1.5, ankyrin-B, MinK, MiRP1, Kir2.1, Cav1.2, caveolin-3, and Nav.beta.4 genes; genes encoding other channels, a sodium channel/related gene selected from SCN5A, ACN1B, SCN2B, SCN3B, SCN4B, GPD1L, RANGRF, SCN10A; a potassium channel/related gene selected from human ether-a-go-go related gene (hERG), Hyperpolarization-activated cyclic nucleotide-gated (HCN) channels; transient outward potassium current channel; Slowly activating delayed rectifier potassium current channels; Rapidly activating delayed rectifier potassium current channels; Inwardly rectifying potassium (Kir) channels; Inwardly rectifying potassium channels; G protein-coupled, inwardly rectifying potassium channels; ATP-sensitive potassium channels; a calcium channel/related gene selected from CACNA1C, CACNB2, CACNA2D1, RYR2, CASQ2, TRDN, CALM1-3; other genes selected from SNTA1, SLMAP, PKP2, ANK2, CAV3, SLC4A3, TRPM4, DPP6, IRX3, GNAI2, ADORAI, GNAS, KCNQ1, SCNA5, KCNE1, KCNE2, KvLQT1, Nav1.5, ankyrin-B, MinK, MiRP1, Kir2.1, Cav1.2, caveolin-3, Nav.beta.4 ATP-binding cassette (ABC) transporters involved in drug transport (e.g., ABCB1, ABCB4, ABCCI, ABCC2, SLC10A2, SLC28A3, SLC22A7, SLC22A17), Carbonyl reductases in drug metabolism (e.g., CBR3), Hyaluronan synthase 3 involved in oxidative stress response (e.g., HAS3), Hereditary hemochromatosis protein in iron metabolism (e.g., HFE), Retinoic acid receptor gamma and DNA topoisomerases in topoisomerase-induced DNA damage (e.g., RARG, TOP2B), CUGBP Elav-like family member 4 in splicing of sarcomere genes (e.g., CELF4), DNA polymerase gamma in mitochondrial replication (e.g., DPOG2), and chaperones involved in ion channel trafficking (e.g., Hsp70 and Hsp90)
[0038] 26. The cell of embodiment 25, wherein the mutation replicates one or more SNPs listed in Table 1 of SEQ ID NO.2 to 1054, preferably SEQ ID NO.105.
[0039] 27. The cell of any one of embodiments 23 to 26, wherein the cell carries a V476I mutation in the KCNH2 gene.
[0040] 28. The cell of any one of embodiments 23 to 27, wherein the mutation was known to be or is being tested as associated with heart disease.
[0041] 29. The cell of embodiment 28, wherein the heart disease is an arrhythmia, hypertrophic cardiomyopathy, sudden unexplained death, obesity-related cardiac disease, primary dilated cardiomyopathy, primary familial hypertrophic cardiomyopathy, or seizure, preferably an arrhythmia selected from Long QT syndrome (including Congenital long QT syndrome, Long QT syndrome 2, and bradycardia-induced Long QT syndrome), Brugada syndrome, Short QT syndrome 1, Sudden Infant Death Syndrome, Acquired long QT syndrome, ventricular tachycardia, Wolff-Parkinson-White pattern arrhythmia, Arrhythmogenic right ventricular cardiomyopathy, Atrial fibrillation, Catecholaminergic polymorphic ventricular tachycardia type 1, Prolonged QT interval, Paroxysmal familial ventricular fibrillation 1, Sudden cardiac arrest/death, and Torsades de pointes.
[0042] 30. The cell of any one of embodiments 23 to 29, wherein the cell expresses an mRNA having a sequence comprising SEQ ID NO.2-1054 from Table 1, preferably SEQ ID NO. 105.
[0043] 31. A composition comprising a library of two or more iPS cells and/or cardiomyocytes wherein each iPS cell/cardiomyocyte has been modified to comprise one or more pegRNA molecules according to any one of embodiments 1 to 11 or is a cell of any one of embodiments 23 to 30.
[0044] 32. The composition of embodiment 31 further comprising iPS cells and/or cardiomyocytes that have not been exposed to a pegRNA and/or iPS cells that have been exposed to one or more pegRNAs that do not edit one or more of the genes.
[0045] 33. A method of identifying a target gene or gene mutation as associated with or cause for cardiotoxicity, comprising:
   [0046] (i) obtaining one or more iPSC-derived cardiomyocytes carrying one or more (e.g., library) of wild-type and target gene editing mutations in one or more (cardiomyocyte) genes; or obtaining one or more iPSC-derived cardiomyocytes wherein expression of one or more target genes has been altered; and
   [0047] (ii) identifying the target gene or gene mutation and/or altered gene expression level as associated with or a cause for cardiotoxicity if
   [0048] the mutation and/or gene expression level has a negative effect on cardiomyocytes' function, proliferation, viability, survival, morphology, the expression of certain markers and receptors, or “heart beats” in vitro (which can model arrhythmias) relative to wild-type (e.g., isogenic) cells.
[0049] 34. A method of identifying a target gene mutation as a mutation associated with drug-induced cardiotoxicity, comprising:
   [0050] (i) obtaining one or more iPSC-derived cardiomyocytes carrying one or more (e.g., library) wild-type and target gene editing mutations in one or more (cardiomyocyte) genes; or obtaining one or more iPSC-derived cardiomyocytes wherein expression of one or more genes has been altered; and
   [0051] (ii) exposing the cardiomyocytes to a drug;
   [0052] (ii) identifying the target gene or gene mutation as associated with drug-induced cardiotoxicity if exposure of the cardiomyocytes carrying the mutation and/or the altered gene expression level to the drug has a negative effect on cardiomyocytes' function, proliferation, viability, survival, morphology, the expression of certain markers and receptors, or “heart beats” in vitro (which can model arrhythmias) relative to wild-type (e.g., isogenic) cells exposed and to cells not exposed to the drug.
[0053] 35. A method of assessing whether a drug is cardiotoxic to a wild-type subject comprising:
   [0054] (i) obtaining one or more iPSC-derived wild-type cardiomyocytes;
   [0055] (ii) exposing the cardiomyocytes to a drug; and
   [0056] (ii) identifying the drug as cardiotoxic to a wild-type subject if exposure of the wild-type cardiomyocytes to the drug has a negative effect on cardiomyocytes' function, proliferation, viability, survival, morphology, the expression of certain markers and receptors, or “heart beats” in vitro (which can model arrhythmias) relative to wild-type (e.g., isogenic) cardiomyocytes not exposed to the drug.
[0057] 36. A method for identifying a drug as causing cardiotoxicity in a subject due to the presence of a target gene mutation and/or due to the altered expression of a gene comprising:
   [0058] (i) obtaining one or more iPSC-derived cardiomyocytes carrying one or more (e.g. library) of wild-type and target gene editing mutations in a target gene; or obtaining one or more iPSC-derived cardiomyocytes wherein expression of one or more target genes has been altered; and
   [0059] (ii) exposing the cardiomyocytes to the drug;
   [0060] (iii) identifying the drug as causing cardiotoxicity due to the presence of the target gene mutation and/or due to the altered target gene expression when the cardiomyocytes carrying the mutation or altered target gene expression exhibit signs of cardiotoxicity in response to exposure to the drug in a cardiotoxicity assay but the wild-type cardiomyocytes do not; wherein signs of cardiotoxicity comprise a negative effect on cardiomyocytes' function, proliferation, viability, survival, morphology, the expression of certain markers and receptors, or “heart beats” in vitro (which can model arrhythmias) relative to wild-type (e.g., isogenic) cells not exposed to the drug; wherein sequencing of the gene or portion of the gene to determine the identity of the mutation takes place before or after the cardiotoxicity assay.
[0061] 37. The method of any one of embodiments 33 through 36, wherein the mutation is introduced in the target gene by gene editing (including CRISPR, base editing, prime editing).
[0062] 38. The method of embodiment 37, wherein the mutation is introduced in the target gene by prime editing, preferably prime editing with any one of the pegRNAs of any one of embodiments 1 through 14 and/or the target gene expression is altered by CRISPR interference, preferably using a gRNA of any one of embodiments 15 and 16.
[0063] 39. The method of any one of embodiments 33 to 38, wherein at least one of the target genes that is edited or has its expression altered is selected from the KONH2 hERG, KCNQ1, SCNA5, KONE1, KONE2, KvLQT1, Nav1.5, ankyrin-B, MinK, MiRP1, Kir 2.1, Cav1.2, caveolin-3, and Nav.beta.4 genes; genes encoding other channels, a sodium channel/related gene selected from SCN5A, ACN1B, SCN2B, SCN3B, SCN4B, GPD1L, RANGRF, SCN10A; a potassium channel/related gene selected from human ether-a-go-go related gene (hERG), Hyperpolarization-activated cyclic nucleotide-gated (HCN) channels; transient outward potassium current channel; Slowly activating delayed rectifier potassium current channels; Rapidly activating delayed rectifier potassium current channels; Inwardly rectifying potassium (Kir) channels; Inwardly rectifying potassium channels; G protein-coupled, inwardly rectifying potassium channels; ATP-sensitive potassium channels; a calcium channel/related gene selected from CACNA1C, CACNB2, CACNA2D1, RYR2, CASQ2, TRDN, CALM1-3; other genes selected from SNTAI, SLMAP, PKP2, ANK2, CAV3, SLC4A3, TRPM4, DPP6, IRX3, GNAI2, ADORAI, GNAS, KCNQ1, SCNA5, KCNE1, KCNE2, KvLQT1, Nav1.5, ankyrin-B, MinK, MiRP1, Kir2.1, Cav1.2, caveolin-3, Nav.beta.4 ATP-binding cassette (ABC) transporters involved in drug transport (e.g., ABCB1, ABCB4, ABCCI, ABCC2, SLC10A2, SLC28A3, SLC22A7, SLC22A17), Carbonyl reductases in drug metabolism (e.g., CBR3), Hyaluronan synthase 3 involved in oxidative stress response (e.g., HAS3), Hereditary hemochromatosis protein in iron metabolism (e.g., HFE), Retinoic acid receptor gamma and DNA topoisomerases in topoisomerase-induced DNA damage (e.g., RARG, TOP2B), CUGBP Elav-like family member 4 in splicing of sarcomere genes (e.g., CELF4), DNA polymerase gamma in mitochondrial replication (e.g., DPOG2), and chaperones involved in ion channel trafficking (e.g., Hsp70 and Hsp90).
[0064] 40. The method of embodiment 39, wherein the target gene is the KONH2 hERG gene.
[0065] 41. The method of embodiment 40, wherein the mutation is selected from those that may result from the SNPs of Table 1 and SEQ ID NO.: 2-1054, preferably V476I, preferably SEQ ID NO: 105.
[0066] 42. A method for identifying a subject in need of treatment with a drug as being sensitive to said drug-induced cardiotoxicity comprising testing a DNA sample from the subject (e.g., collected from a tissue comprising cardiomyocytes and/or from cardiomyocytes derived from iPSC isolated from the subject) for the presence of one or more target gene mutations or altered expression levels that have been identified as associated with said drug-induced cardiotoxicity by the method of any one of embodiments 33 to 41 and, optionally, choosing a different drug for treating the subject than the drug that induces cardiotoxicity.
[0067] 43. The method of embodiment 42, wherein the subject is identified as suffering from, or being susceptible to, an arrhythmia, hypertrophic cardiomyopathy, sudden unexplained death, obesity-related cardiac disease, primary dilated cardiomyopathy, primary familial hypertrophic cardiomyopathy, or seizure, preferably an arrhythmia selected from Long QT syndrome (including Congenital long QT syndrome, Long QT syndrome 2, and bradycardia-induced Long QT syndrome), Brugada syndrome, Short QT syndrome 1, Sudden Infant Death Syndrome, Acquired long QT syndrome, ventricular tachycardia, Wolff-Parkinson-White pattern arrhythmia, Arrhythmogenic right ventricular cardiomyopathy, Atrial fibrillation, Catecholaminergic polymorphic ventricular tachycardia type 1, Prolonged QT interval, Paroxysmal familial ventricular fibrillation 1, Sudden cardiac arrest/death, and Torsades de pointes, when the subject carries one or more of the gene mutations.
[0068] 44. The cells of any one of embodiments 22 to 30, or of the method of any one of embodiments 33 to 41, wherein the iPSC are prepared from any somatic cell including skin-derived fibroblasts, and peripheral blood mononuclear cells, and reprogrammed by any integrative (i.e. lentiviral) or episomal (i.e. plasmid, Sendai virus) vectors containing any combination of transcriptional factors, including OCT4, SOX2, KLF4 and MYC, or transcriptional factors delivered via RNA (mRNA or miRNA) or combinations of small molecules and growth factors, or direct modulation of gene expression via RNAi or CRISPRi/a.
[0069] 45. The method of any one of embodiments 33 to 41, wherein the cardiomyocytes are derived from iPSC by in vitro differentiation using combinations of small molecules, and/or growth factors, including modulation of Wnt pathway followed by glucose starvation for selection of highly purified cardiomyocyte populations, and combinations with nucleic acids (including RNA, miRNA, siRNA).
[0070] 46. The method of any one of embodiments 33 to 41, wherein signs of cardiotoxicity comprise changes in cardiomyocyte function, cell viability, survival, morphology, the expression of certain markers and receptors, heart beats in vitro and, and where these signs are measured, preferably, with models arrhythmias, a patch clamp technique, an external recording method, a voltage-sensitive dye, or an intracellular ion-sensitive dye.
[0071] 47. A method of prime editing an iPS cell or an iPSC-derived cardiomyocyte cell comprising contacting the cell's double stranded target DNA with a pegRNA designed to edit a target gene (e.g., cardiomyocyte), preferably a pegRNA according to any one of embodiments 1 through 14, and with a prime editor, and optionally a sgRNA, preferably wherein the prime editor comprises a nucleic acid programmable DNA binding protein (napDNAbp), which is fused to a domain comprising polymerase (preferably, RNA-dependent DNA polymerase) activity, wherein the contacting prime edits the cells by installing one or more nucleotide edits in the double stranded target DNA, thereby editing the double stranded target DNA.
[0072] 48. The method of embodiment 47, wherein the pegRNA and/or a nucleic acid encoding the napDNAbp fused to a domain comprising RNA-dependent DNA polymerase activity, are introduced into the iPSC or IPSC-derived cardiomyocytes by transfection, viral transduction (lentiviral, AAV, etc.), nanoparticles, or nucleofection.
[0073] 49. The method of any one of embodiments 47 and 48, wherein the napDNAbp is selected from the group consisting of Cas9, Cas12e, Cas12d, Cas12a, Cas12b1, Cas13a, Cas12c, Cas12b2, Cas13a, Cas12c, Cas12d, Cas12e, Cas12h, Cas12i, Cas12g, Cas12f (Cas14), Cas12f1, Cas12j (Casǐ), and Argonaute and, optionally, has a nickase activity.
[0074] 50. The method of any one of embodiments 47 to 49, wherein the napDNAbp is a nuclease active Cas9 domain, a nuclease inactive Cas9 domain, or a Cas9 nickase domain or variant thereof.
[0075] 51. The method of any one of embodiments 47 to 50, wherein the RNA-dependent DNA polymerase is a reverse transcriptase, preferable selected from Moloney Murine Leukemia virus reverse transcriptase (MMLV-RT), optionally wherein the MMLV-RT comprises one or more amino acid substitutions selected from D200N, T306K, W313F, T330P, and L603W compared to a wild type MMLV-RT.
[0076] 52. The method of any one of embodiments 29 to 46, wherein the pegRNA and/or the gRNA are designed by PrimeDesign or another commercially or publicly available method known to one of ordinary skill in the art.
[0077] 53. A polynucleotide comprising a DNA sequence coding for the pegRNA of any one of embodiments 1 through 14 or coding the gRNA of any one of embodiments 15 and 16, preferably the sequence of SEQ Nos: 1116 to 1134, or a pegRNA coded by the same.
[0078] 54. A vector comprising the polynucleotide of embodiment 53, optionally wherein expression of the pegRNA or gRNA is under the control of a promoter.
[0079] 55. The method of any one of embodiments 33 to 52, wherein the iPSCs or iPSC-derived cardiomyocytes are cultured and/or tested in multi-well (e.g. 96 well) plates.
[0080] 56. The method of embodiment 55, wherein each well comprises 1 cell or its progeny.
[0081] 57. The method of any one of embodiments 55 or 56, wherein each cell comprises only one type of pegRNA, or nucleic acid encoding the pegRNA, preferably wherein the cells are sorted through the barcodes in each pegRNA and/or wherein the pegRNAs are sorted into each well prior to introduction into the cells.
[0082] 58. The method of any one of embodiments 33 to 41, 45, and 46, wherein the drug is a drug that is hypothesized to cause arrhythmia.
[0083] 59. The method of any one of embodiments 33 to 41, 45, 46, 55 to 58, wherein the drug is selected from a list of blackbox labeled drugs (currently marketed drugs that contain a label to indicate that Long QT patients should avoid using this drug; including Table 2), ii) drugs withdrawn from the US market due to cardiotoxicity events, iii) drugs that failed clinical trials due to cardiotoxicity events—(some may be marketed in other countries; iv) drugs associated with cardiotoxicity for particular SNPs as documented in the literature (e.g., ClinVar; antiarrhythmics, class i and iii; cisapride, amiodarone, dofetilide, clarithromycin, hydroxyzine, quinidine and disopyramide), and v) TdP associated drugs (including Table 3).
[0084] 60. A method of treating a subject for arrhythmia and/or preventing arrhythmia in the subject, wherein the subject is identified by the method of embodiment 42 or 43 as carrying a variant mutation, wherein the treatment comprises genome editing of the genome of at least some of the subject's cardiomyocytes to edit the variant mutation and/or alter the expression of the target gene.
[0085] 61. An array of cell culture wells or vessels each comprising at least one iPSC or iPSC-derived cardiomyocyte and at least one component of a gene editing system and/or gene expression altering system, wherein the gene editing system is designed to introduce one or more gene edits per iPSC/cardiomyocyte into at least one target gene and the gene expression altering system is designed to alter the expression of at least one target gene, wherein the target gene edit and/or altered expression level is hypothesized to cause cardiotoxicity or drug-induced cardiotoxicity when introduced into or present in the genome of a cardiomyocyte.
[0086] 62. The array of embodiment 61, wherein the array comprises a multi-well tissue culture plate.
[0087] 63. The array of embodiment 61, wherein each well or vessel carries only cells comprising a single gene edit or a single level of altered gene expression.
[0088] 64. The array of any one of embodiments 62 and 63, wherein the array further comprises one or more elements of an in vitro cardiotoxicity assay.
[0089] 65. The array of any one of embodiments 61 to 64, wherein the gene editing or gene expression altering system comprises one or more pegRNA according to any one of embodiments 1 to 14, one or more gRNA according to any one of embodiments 15 and 16, and/or any composition according to any one of embodiments 17 to 21.
[0090] 66. The method, pegRNA. gRNA, polynucleotide, vector, and cell of any one of embodiments 1-66, wherein the coding DNA sequence coding for the pegRNA comprises any one of SEQ ID NO. 1100 to 1113 and/or the coding sequence coding for the gRNA comprises any one of SEQ ID Nos 1116-1134 (or where the target is that of anyone one of SEQ ID Nos. 1055 to 1073), and the DNA coding sequence for the mRNA/SNP comprises any one of SEQ ID NO. 2 to 1054.

### BRIEF DESCRIPTION OF THE DRAWINGS

[0091] The patent or application file contains at least one drawing executed in color. Copies of this patent or patent application publication with color drawings will be provided by the U.S. Patent and Trademark Office upon request and payment of the necessary fee.

[0092] FIG. 1A: SNPs selected for prime editing into hiPSC. Structure of hERG channel and how V476I SNP changes its structure. FIG. 1B: Structure of hERG channel and modeling of V476I mutant.

[0093] FIG. 2: Sequencing of plasmids containing gRNA sequences for prime editing.

[0094] FIG. 3: Efficiency of plasmid DNA electroporation into hiPSC using GenePulser.

[0095] FIG. 4: Efficiency of cardiomyocyte differentiation using different Wnt activator concentrations and several starting cell densities in 6 well plates, and the effect of enrichment protocol on cardiomyocyte population purity.

[0096] FIG. 5: Expression of cardiac troponin T (cTnT) in iPSC-CM. Nuclei and cytoplasm are stained with whole cell stain CellMask Blue.

[0097] FIG. 6: Basal beating of iPSC-derived cardiomyocytes.

[0098] FIG. 7: Characterization of drug responses in wild-type and V476I mutant cardiomyocytes. hiPSC-CM were treated with a fluorescent calcium-sensing probe for 2h before addition of drugs. Cells were then incubated with drugs for 1.5-2h. A plate reader (SpectraMax) was used to measure fluctuations in fluorescence for 30 sec. Images were analyzed using PeakPro to generate peak frequency which is a proxy for beats per minute. Both wild-type and V476I mutant show expected responses to pro-arrhythmic drugs, demonstrating functional responsiveness of this cellular model.

[0099] FIG. 8: Optimization of CRISPR interference system for regulation of gene expression. SHSY5Y cells, which express high levels of KCNH2, were transduced with a lentivirus carrying Sp dCas9-KRAB-rTTA and selected with antibiotics. Selected populations were transduced with lentivirus carrying sgRNAs for different (positive control) genes, POLR2D or SF3B1, and subjected to another round of antibiotic selection to generate cell lines carrying the complete CRISPRi system. After selection, cells were treated with doxycycline for 72h to activate the expression of the Sp dCas9-KRAB construct, leading to gene repression. Relative gene expression was measured via qPCR using TaqMan probes. Grey bars indicate qPCR for SF3B1 and blue bars qPCR for POLR2D. Marked repression of relative gene expression was observed in wells treated with doxycycline, indicating an active CRISPRi system for the positive control genes

[0100] FIG. 9: Replicate arrhythmias with cardiotoxic drugs in the in vitro system.

[0101] FIG. 10: B3 clone shows disruption of normal rhythm.

[0102] FIG. 11: B3 clone hypersensitive to pro-arrhythmic compounds.

[0103] FIG. 12: B3 clone non-responsive to anti-arrhythmic compounds.

[0104] FIG. 13: Exemplary pegRNA library design.

### DETAILED DESCRIPTION

### Definitions

[0105] In order for the present disclosure to be more readily understood, certain terms are first defined below. Additional definitions for the following terms and other terms are set forth throughout the Specification.

[0106] As used in this Specification and the appended claims, the singular forms “a,” “an” and “the” include plural referents unless the context clearly dictates otherwise.

[0107] Unless specifically stated or obvious from context, as used herein, the term “or” is understood to be inclusive and covers both “or” and “and”.

[0108] The term “and/or” where used herein is to be taken as specific disclosure of each of the two specified features or components with or without the other. Thus, the term “and/or” as used in a phrase such as “A and/or B” herein is intended to include A and B; A or B; A (alone); and B (alone). Likewise, the term “and/or” as used in a phrase such as “A, B, and/or C” is intended to encompass each of the following aspects: A, B, and C; A, B, or C; A or C; A or B; B or C; A and C; A and B; B and C; A (alone); B (alone); and C (alone).

[0109] The terms “e.g.,” and “i.e.,” as used herein, are used merely by way of example, without limitation intended, and should not be construed as referring only those items explicitly enumerated in the specification.

[0110] The terms “or more,” “at least,” “more than,” and the like, e.g., “at least one” are understood to include but not be limited to at least 1, 2, 3, 4, 5, 6, 7, 8, 9, 10, 11, 12, 13, 14, 15, 16, 17, 18, 19 20, 21, 22, 23, 24, 25, 26, 27, 28, 29, 30, 31, 32, 33, 34, 35, 36, 37, 38, 39, 40, 41, 42, 43, 44, 45, 46, 47, 48, 49, 50, 51, 52, 53, 54, 55, 56, 57, 58, 59, 60, 61, 62, 63, 64, 65, 66, 67, 68, 69, 70, 71, 72, 73, 74, 75, 76, 77, 78, 79, 80, 81, 82, 83, 84, 85, 86, 87, 88, 89, 90, 91, 92, 93, 94, 95, 96, 97, 98, 99, 100, 101, 102, 103, 104, 105, 106, 107, 108, 109, 110, 111, 112, 113, 114, 115, 116, 117, 118, 119, 120, 121, 122, 123, 124, 125, 126, 127, 128, 129, 130, 131, 132, 133, 134, 135, 136, 137, 138, 139, 140, 141, 142, 143, 144, 145, 146, 147, 148, 149 or 150, 200, 300, 400, 500, 600, 700, 800, 900, 1000, 2000, 3000, 4000, 5000, or more than the stated value. Also included is any greater number or fraction in between.

[0111] Conversely, the term “no more than” includes each value less than the stated value. For example, “no more than 100 nucleotides” includes 100, 99, 98, 97, 96, 95, 94, 93, 92, 91, 90, 89, 88, 87, 86, 85, 84, 83, 82, 81, 80, 79, 78, 77, 76, 75, 74, 73, 72, 71, 70, 69, 68, 67, 66, 65, 64, 63, 62, 61, 60, 59, 58, 57, 56, 55, 54, 53, 52, 51, 50, 49, 48, 47, 46, 45, 44, 43, 42, 41, 40, 39, 38, 37, 36, 35, 34, 33, 32, 31, 30, 29, 28, 27, 26, 25, 24, 23, 22, 21, 20, 19, 18, 17, 16, 15, 14, 13, 12, 11, 10, 9, 8, 7, 6, 5, 4, 3, 2, 1, and 0 nucleotides. Also included is any lesser number or fraction in between.

[0112] The terms “plurality,” “at least two,” “two or more,” “at least second,” and the like, are understood to include but not limited to at least 2, 3, 4, 5, 6, 7, 8, 9, 10, 11, 12, 13, 14, 15, 16, 17, 18, 19 20, 21, 22, 23, 24, 25, 26, 27, 28, 29, 30, 31, 32, 33, 34, 35, 36, 37, 38, 39, 40, 41, 42, 43, 44, 45, 46, 47, 48, 49, 50, 51, 52, 53, 54, 55, 56, 57, 58, 59, 60, 61, 62, 63, 64, 65, 66, 67, 68, 69, 70, 71, 72, 73, 74, 75, 76, 77, 78, 79, 80, 81, 82, 83, 84, 85, 86, 87, 88, 89, 90, 91, 92, 93, 94, 95, 96, 97, 98, 99, 100, 101, 102, 103, 104, 105, 106, 107, 108, 109, 110, 111, 112, 113, 114, 115, 116, 117, 118, 119, 120, 121, 122, 123, 124, 125, 126, 127, 128, 129, 130, 131, 132, 133, 134, 135, 136, 137, 138, 139, 140, 141, 142, 143, 144, 145, 146, 147, 148, 149 or 150, 200, 300, 400, 500, 600, 700, 800, 900, 1000, 2000, 3000, 4000, 5000, or more. Also included is any greater number or fraction in between.

[0113] Throughout the specification the word “comprising,” or variations such as “comprises” or “comprising,” will be understood to imply the inclusion of a stated element, integer or step, or group of elements, integers or steps, but not the exclusion of any other element, integer or step, or group of elements, integers or steps. It is understood that wherever aspects are described herein with the language “comprising,” otherwise analogous aspects described in terms of “consisting of” and/or “consisting essentially of” are also provided. The term “consisting of” excludes any element, step, or ingredient not specified in the claim. In re Gray, 53 F.2d 520, 11 USPQ 255 (CCPA 1931); Ex parte Davis, 80 USPQ 448, 450 (Bd. App. 1948) (“consisting of” defined as “closing the claim to the inclusion of materials other than those recited except for impurities ordinarily associated therewith”). The term “consisting essentially of” limits the scope of a claim to the specified materials or steps “and those that do not materially affect the basic and novel characteristic(s)” of the claimed invention.

[0114] Unless specifically stated or evident from context, as used herein, the term “about” refers to a value or composition that is within an acceptable error range for the particular value or composition as determined by one of ordinary skill in the art, which will depend in part on how the value or composition is measured or determined, i.e., the limitations of the measurement system. For example, “about” or “approximately” may mean within one or more than one standard deviation per the practice in the art. “About” or “approximately” may mean a range of up to 10% (i.e., +10%). Thus, “about” may be understood to be within 10%, 9%, 8%, 7%, 6%, 5%, 4%, 3%, 2%, 1%, 0.5%, 0.1%, 0.05%, 0.01%, or 0.001% greater or less than the stated value. For example, about 5 mg may include any amount between 4.5 mg and 5.5 mg. Furthermore, particularly with respect to biological systems or processes, the terms may mean up to an order of magnitude or up to 5-fold of a value. When particular values or compositions are provided in the instant disclosure, unless otherwise stated, the meaning of “about” or “approximately” should be assumed to be within an acceptable error range for that particular value or composition.

[0115] As described herein, any concentration range, percentage range, ratio range or integer range is to be understood to be inclusive of the value of any integer within the recited range and, when appropriate, fractions thereof (such as one-tenth and one-hundredth of an integer), unless otherwise indicated.

[0116] Units, prefixes, and symbols used herein are provided using their Système International de Unites (SI) accepted form. Numeric ranges are inclusive of the numbers defining the range.

[0117] Unless defined otherwise, all technical and scientific terms used herein have the same meaning as commonly understood by one of ordinary skill in the art to which this disclosure is related. For example, Juo, “The Concise Dictionary of Biomedicine and Molecular Biology”, 2nd ed., (2001), CRC Press; “The Dictionary of Cell & Molecular Biology”, 5th ed., (2013), Academic Press; and “The Oxford Dictionary Of Biochemistry And Molecular Biology”, Cammack et al. eds., 2nd ed, (2006), Oxford University Press, provide those of skill in the art with a general dictionary for many of the terms used in this disclosure.

[0118] The terms “transduction” and “transduced” refer to the process whereby foreign DNA is introduced into a cell via viral vector (see Jones et al., “Genetics: principles and analysis,” Boston: Jones & Bartlett Publ. (1998)). In some embodiments, the vector is a retroviral vector, a DNA vector, a RNA vector, an adenoviral vector, a baculoviral vector, an Epstein Barr viral vector, a papovaviral vector, a vaccinia viral vector, a herpes simplex viral vector, an adenovirus associated vector, a lentiviral vector, or any combination thereof.

[0119] A “therapeutically effective amount,” “effective dose,” “effective amount,” or “therapeutically effective dosage” of a therapeutic agent, e.g., engineered CAR T cells, small molecules, “agents” described in the specification, is any amount that, when used alone or in combination with another therapeutic agent, protects a subject against the onset of a disease or promotes disease regression evidenced by a decrease in severity of disease symptoms, an increase in frequency and duration of disease symptom-free periods, or a prevention of impairment or disability due to the disease affliction. Such terms may be used interchangeably. The ability of a therapeutic agent to promote disease regression may be evaluated using a variety of methods known to the skilled practitioner, such as in human subjects during clinical trials, in animal model systems predictive of efficacy in humans, or by assaying the activity of the agent in in vitro assays. Therapeutically effective amounts and dosage regimens can be determined empirically by testing in known in vitro or in vivo (e.g., animal model) systems.

[0120] The term “combination” refers to either a fixed combination in one dosage unit form, or a combined administration where a compound of the present invention and a combination partner (e.g., another drug as explained below, also referred to as “therapeutic agent” or “agent”) may be administered independently at the same time or separately within time intervals, especially where these time intervals allow that the combination partners show a cooperative, e.g., synergistic effect. The single components may be packaged in a kit or separately. One or both of the components (e.g., powders or liquids) may be reconstituted or diluted to a desired dose prior to administration. The terms “co-administration” or “combined administration” or the like as utilized herein are meant to encompass administration of the selected combination partner to a single subject in need thereof (e.g., a patient), and are intended to include treatment regimens in which the agents are not necessarily administered by the same route of administration or at the same time.

[0121] The term “genetically engineered” or “engineered” refers to a method of modifying the genome of a cell, including, but not limited to, deleting a coding or non-coding region or a portion thereof or inserting a coding region or a portion thereof.

[0122] he terms “homologous,” “homology,” or “percent homology” as used herein refer to the degree of sequence identity between an amino acid or polynucleotide sequence and a corresponding reference sequence. “Homology” can refer to polymeric sequences, e.g., polypeptide or DNA sequences that are similar. Homology can mean, for example, nucleic acid sequences with at least about: 50%, 55%, 60%, 65%, 70%, 75%, 80%, 81%, 82%, 83%, 84%, 85%, 86%, 87%, 88%, 89%, 90%, 91%, 92%, 93%, 94%, 95%, 96%, 97%, 98%, 99%, or 100% identity. In other embodiments, a “homologous sequence” of nucleic acid sequences may exhibit 93%, 95%, or 98% sequence identity to the reference nucleic acid sequence. For example, a “region of homology to a genomic region” can be a region of DNA that has a similar sequence to a given genomic region in the genome. A region of homology can be of any length that is sufficient to promote binding of a spacer or protospacer sequence to the genomic region. For example, the region of homology can comprise at least 5, 10, 11, 12, 13, 14, 15, 16, 17, 18, 19, 20, 21, 22, 23, 24, 25, 30, 35, 40, 45, 50, 55, 60, 65, 70, 75, 80, 85, 90, 95, 100, 200, 300, 400, 500, 600, 700, 800, 900, 1000, 1100, 1200, 1300, 1400, 1500, 1600, 1700, 1800, 1900, 2000, 2100, 2200, 2300, 2400, 2500, 2600, 2700, 2800, 2900, 3000, 3100, or more bases in length such that the region of homology has sufficient homology to undergo binding with the corresponding genomic region. When a percentage of sequence homology or identity is specified, in the context of two nucleic acid sequences or two polypeptide sequences, the percentage of homology or identity generally refers to the alignment of two or more sequences across a portion of their length when compared and aligned for maximum correspondence. When a position in the compared sequence can be occupied by the same base or amino acid, then the molecules can be homologous at that position. Unless stated otherwise, sequence homology or identity is assessed over the specified length of the nucleic acid, polypeptide, or portion thereof. In some embodiments, the homology or identity is assessed over a functional portion or a specified portion of the length. Alignment of sequences for assessment of sequence homology can be conducted by algorithms known in the art, such as the Basic Local Alignment Search Tool (BLAST) algorithm, which is described in Altschul et al, J. Mol. Biol. 215:403-410, 1990. A publicly available, internet interface, for performing BLAST analyses is accessible through the National Center for Biotechnology Information. Additional known algorithms include those published in: Smith & Waterman, “Comparison of Biosequences”, Adv. Appl. Math. 2:482, 1981; Needleman & Wunsch, “A general method applicable to the search for similarities in the amino acid sequence of two proteins” J. Mol. Biol. 48:443, 1970; Pearson & Lipman “Improved tools for biological sequence comparison”, Proc. Natl. Acad. Sci. USA 85:2444, 1988; or by automated implementation of these or similar algorithms. Global alignment programs may also be used to align similar sequences of roughly equal size. Examples of global alignment programs include NEEDLE (available at www.ebi.ac.uk/Tools/psa/emboss_needle/) which is part of the EMBOSS package (Rice P et al., Trends Genet., 2000; 16:276-277), and the GGSEARCH program fasta.bioch.virginia.edu/fasta_www2/, which is part of the FASTA package (Pearson W and Lipman D, 1988, Proc. Natl. Acad. Sci. USA, 85:2444-2448). Both of these programs are based on the Needleman-Wunsch algorithm, which is used to find the optimum alignment (including gaps) of two sequences along their entire length. A detailed discussion of sequence analysis can also be found in Unit 19.3 of Ausubel et al (“Current Protocols in Molecular Biology” John Wiley & Sons Inc, 1994-1998, Chapter 15, 1998). A skilled person understands that amino acid (or nucleotide) positions may be determined in homologous sequences based on alignment.

[0123] A “patient” or a “subject” as used herein includes any human who is afflicted with a heart disease or disorder. The terms “subject” and “patient” are used interchangeably herein.

[0124] As used herein, the term “in vitro cell” refers to any cell which is cultured ex vivo. In particular, an in vitro cell may include a T cell. The term “in vivo” means within the patient.

[0125] The terms “peptide,” “polypeptide,” and “protein” are used interchangeably, and refer to a compound comprised of amino acid residues covalently linked by peptide bonds. A protein or peptide contains at least two amino acids, and no limitation is placed on the maximum number of amino acids that may comprise a protein's or peptide's sequence. Polypeptides include any peptide or protein comprising two or more amino acids joined to each other by peptide bonds. As used herein, the term refers to both short chains, which also commonly are referred to in the art as peptides, oligopeptides and oligomers, for example, and to longer chains, which generally are referred to in the art as proteins, of which there are many types. “Polypeptides” include, for example, biologically active fragments, substantially homologous polypeptides, oligopeptides, homodimers, heterodimers, variants of polypeptides, modified polypeptides, derivatives, analogs, fusion proteins, among others. The polypeptides include natural peptides, recombinant peptides, synthetic peptides, or a combination thereof.

[0126] The term “prime editor (PE)” or “prime editor” refers the compositions involved in the method of genome editing using target-primed reverse transcription (TPRT) describe herein, including, but not limited to the napDNAbps, reverse transcriptases, fusion proteins (e.g., comprising napDNAbps and reverse transcriptases), prime editor guide RNAs, and complexes comprising fusion proteins and prime editor guide RNAs, as well as accessory elements, such as second strand nicking components and 5′ endogenous DNA flap removal endonucleases for helping to drive the prime editing process towards the edited product formation.

[0127] Prime editing may also be described as “target-primed reverse transcription” (TPRT) because the target DNA molecule is used to prime the synthesis of a strand of DNA by a polymerase (e.g., reverse transcriptase). The use of the term “reverse transcription” in the name “target-primed reverse transcription” is not intended to limit prime editing to the use of reverse transcriptases, but rather TPRT or prime editors may comprise any polymerase (e.g., DNA-dependent DNA polymerase or RNA-dependent DNA polymerase). In various embodiments, prime editing operates by contacting a target DNA molecule (for which a change in the nucleotide sequence is desired to be introduced) with a nucleic acid programmable DNA binding protein (napDNAbp) complexed with a prime editor guide RNA

[0128] As used herein, the term “DNA synthesis template” refers to the region or portion of the extension arm of a PEgRNA that is utilized as a template strand by a polymerase of a prime editor to encode a 3′ single-strand DNA flap that contains the desired edit and which then, through the mechanism of prime editing, replaces the corresponding endogenous strand of DNA at the target site. The extension arm, including the DNA synthesis template, may be comprised of DNA or RNA. In the case of RNA, the polymerase of the prime editor can be an RNA-dependent DNA polymerase (e.g., a reverse transcriptase). In the case of DNA, the polymerase of the prime editor can be a DNA-dependent DNA polymerase. In some embodiments, the DNA synthesis template is a single-stranded portion of the PEgRNA that is 5′ of the PBS and comprises a region of complementarity to the PAM strand (i.e., the non-target strand or the edit strand), and comprises one or more nucleotide edits compared to the endogenous sequence of the double stranded target DNA. In some embodiments, the DNA synthesis template is complementary or substantially complementary to a sequence on the non-target strand that is downstream of a nick site, except for one or more non-complementary nucleotides at the intended nucleotide edit positions. In some embodiments, the DNA synthesis template is complementary or substantially complementary to a sequence on the non-target strand that is immediately downstream (i.e., directly downstream) of a nick site, except for one or more non-complementary nucleotides at the intended nucleotide edit positions. In some embodiments, one or more of the non-complementary nucleotides at the intended nucleotide edit positions are immediately downstream of a nick site. In some embodiments, the DNA synthesis template comprises one or more nucleotide edits relative to the double-stranded target DNA sequence. In some embodiments, the DNA synthesis template comprises one or more nucleotide edits relative to the non-target strand of the double-stranded target DNA sequence. For each PEgRNA described herein, a nick site is characteristic of the particular napDNAbp to which the gRNA core of the PEgRNA associates and is characteristic of the particular PAM required for recognition and function of the napDNAbp. For example, for a PERNA that comprises a gRNA core that associates with a SpCas9, the nick site in the phosphodiester bond between bases three (“−3” position relative to the position 1 of the PAM sequence) and four (“−4” position relative to position 1 of the PAM sequence). In some embodiments, the DNA synthesis template and the primer binding site are immediately adjacent to each other. The terms “nucleotide edit,” “nucleotide change,” “desired nucleotide change,” and “desired nucleotide edit” are used interchangeably to refer to a specific nucleotide edit, e.g., a specific deletion of one or more nucleotides, a specific insertion of one or more nucleotides, a specific substitution (or multiple substitutions) of one or more nucleotides, or a combination thereof, at a specific position in a DNA synthesis template of a PEgRNA to be incorporated in a target DNA sequence. In some embodiments, the DNA synthesis template comprises more than one nucleotide edit relative to the double-stranded target DNA sequence. In such embodiments, each nucleotide edit is a specific nucleotide edit at a specific position in the DNA synthesis template, each nucleotide edit is at a different specific position relative to any of the other nucleotide edits in the DNA synthesis template, and each nucleotide edit is independently selected from a specific deletion of one or more nucleotides, a specific insertion of one or more nucleotides, a specific substitution (or multiple substitutions) of one or more nucleotides, or a combination thereof. A nucleotide edit may refer to the edit on the DNA synthesis template as compared to the sequence on the target strand of the target gene, or a nucleotide edit may refer to the edit encoded by the DNA synthesis template on the newly synthesized single stranded DNA that replaces the endogenous target DNA sequence on the non-target strand.

[0129] In one embodiment, the “spacer” sequence is the sequence in the guide RNA or PEgRNA (having about 20 nts in length) which binds to the protospacer in the target DNA. In one embodiment, the “gRNA core” (or gRNA scaffold or backbone sequence) refers to the sequence within the gRNA that is responsible for napDNAbp binding (e.g., Cas9) and does not include the 20 bp spacer/targeting sequence that is used to guide Cas9 to target DNA. In some embodiments, the gRNA core or scaffold comprises a sequence that comprises one or more nucleotide alterations compared to a naturally occurring CRISPR-Cas guide RNA scaffold, for example, a Cas9 guide RNA scaffold. In some embodiments, the sequence of the gRNA core is designed to comprise minimal or no sequence homology to the endogenous sequence of the target nucleic acid at the target site, thereby reducing unintended edits. In some embodiments, the gRNA core comprises minimal sequence homology to the sequence of the target site, optionally wherein the gRNA core comprises no more than 1%, 5%, 10%, 15%, 20%, 25%, or 30% sequence homology to the sequence of the double stranded target DNA that flanks 5, 10, 15, 20, 25, 30, 35, 40, 45, or 50 nucleotides upstream or downstream of the position of the one or more nucleotide edits.

[0130] A DNA “barcode” is a unique sequence of nucleotides that may be incorporated into the pegRNA expression vector for identification of pegRNAs in complex mixtures, such as in the context of a pooled library of pegRNAs. Barcodes may be inserted into the pegRNA expression vector by restriction fragment cloning of small oligo nucleotides containing a unique 8-bp DNA sequence that differs from other sequences by at least 2 bases flanked by restriction sites compatible with the acceptor expression vector. Sequencing of expression cassette allows for the identification of pegRNA. Another method is to insert the U6-pegRNA expression cassette downstream from a Polymerase II promoter (such as CMV, EF1a, UBC) and upstream of a poly-A sequence. Flanking the U6-pegRNA expression cassette in this manner in lentiviral expression vectors leads to expression of the pegRNA from a Pol II promoter which allows identification of the respective pegRNA via RNA sequencing using standard poly A capture. In some embodiments, the pegRNA is its own barcode.

### Gene Editing Methods

[0131] The genome of the cells of the disclosure may be edited by any method known to one of skill in the art. In one embodiment, the cells are edited with Zinc finger nucleases. In one embodiment, the cells are edited with Transcription activator-like effector nucleases (TALENs). In one embodiment, the cells are edited with Homing Nucleases. In one embodiment, the cells are edited with clustered regularly interspersed short palindromic repeats (CRISPR)-Cas system. In one embodiment, the cells are edited with CRISPR-Cas9 system. In one embodiment, the cells are edited with base editing. In one embodiment, the cells are edited with Prime Editing. The components of each of these systems are well known in the art.

[0132] In some embodiments, the expression of one or more target genes is altered in the cells and the effect of the alteration in gene expression on the resulting cells (e.g., cardiotoxicity) is assessed. In some embodiments, the expression level is changed by CRISPR interference. CRISPR/Cas9-mediated transcriptional interference (CRISPRi) enables programmable gene knock-down, yielding loss-of-function phenotypes for nearly any gene. Genes can be analyzed with CRISPRi, and knock-down can be activated and relieved by conditional expression of the dCas9 fusion protein or the guide RNA. In some embodiments, the expression of one or more genes is completely blocked. In other embodiments, the expression of one or more genes is changed in various percentages. In some embodiments, the gene expression may be changed by a Cas9: gRNA complex, by a dCas9-SAM system, or a dCas9-KRAB system.

### Genetic Engineering of Progenitor Stem Cells

[0133] In some embodiments, the disclosure provides that certain gene mutations (e.g., SNPs) engineered into iPSC by gene editing may generate iPSC-derived cardiomyocytes that may be used as models of cardiac disease. In some embodiments, the mutations represent known SNPs of known and unknow clinical significance. In some embodiments, the mutations are not SNPs. In some embodiments, the mutations are introduced via Prime Editing (PE), which is described herein in more detail.

### KCNH2 Mutations

[0134] The disclosure provides that KONH2 encodes a voltage-gated transmembrane potassium channel called hERG (ether-a-go-go). hERG is expressed primarily on the surface of cardiac muscle cells, where it controls the efflux ok K+ ions during the rectifying phase of the action potential. Blockage of hERG causes a delay on the return of the membrane potential to its normal value, which leads to proarrhythmic events. V476I (rs199472908) is a mutation in the transmembrane domain of the hERG channel. Accordingly, in one embodiment, the disclosure provides genetically engineered iPSC, and cardiomyocytes derived therefrom, carrying the mutation V476I. In some embodiments, the mutation is introduced via genetic engineering with CRISPR or CRISPR-like systems. In some embodiments, the mutation is introduced via any other means of recombinantly changing one or more nucleic acid bases in a gene. In some embodiments, the genetic modification is introduced via prime-editing. In some embodiments, the disclosure provides prime-editing (pegRNAs) designed to introduce such mutations into the cells.

[0135] In some embodiments, the mutations are selected from a collection of more than 2,347 kcnh-2 SNPs from ClinVar. In some embodiments, the mutations are the SNPs described in SEQ ID Nos: 1-1054 and Table 1. Note that, due to the large number of resulting mRNA sequences, the exact sequences are only included in the Sequence Listing, which is part of the invention and disclosure. In the database, SNPs are categorized according to sequence location (e.g., promoter, exon, intron, UTRs, etc.) and type (e.g., missense mutation, nonsense mutation, insertion, deletion, etc.). ClinVar provides a list of attributes for each kcnh-2 SNP including the clinical severity (e.g., pathogenic, uncertain significance, not provided, etc.) and a ranking based on review status. Review status provides a reliability score, viz. how well supported a clinical attribution is based on number of submissions, review by an expert panel, etc. In one embodiment, the inventors curated a subset of 700 nonsense mutations (SNPs that encode changes to the protein coding sequence) for use according to the methods of the invention. In some embodiments, the results may subsequently be confirmed in biophysical models for machine learning prediction. In some embodiments, the results are confirmed according to the methods of the disclosure.

[0136] In some embodiments, the mutations are predicted to be clinically pathogenic. In some embodiments, the mutations are predicted to be likely clinically pathogenic. In some embodiments, there is conflicting clinical evidence about the specific mutation. In some embodiments, the mutation is clinically benign. In some embodiments, the mutations have not been clinically classified. See, for example, Table 1 and FIG. 13.

### Other Mutations

[0137] The disclosure also provides for genetic modifications of iPSCs and/or cardiomyocytes in other target genes. Accordingly, in some embodiments, the disclosure provides genetically engineered iPSC, and cardiomyocytes derived therefrom, as well as pegRNAs, for introducing and carrying mutations in any target gene. In some embodiments, the target gene is known to modify the activity, proliferation and growth of cardiomyocytes. In some embodiments, the target gene is not known to modify the activity, proliferation and growth of cardiomyocytes but may be identified as such with the methods of the disclosure. In some embodiments, the target genes may be chosen from KCNQ1, SCNA5, KCNE1, KCNE2, and genes encoding other channels, ATP-binding cassette (ABC) transporters involved in drug transport (e.g., ABCB1, ABCB4, ABCCI, ABCC2, SLC10A2, SLC28A3, SLC22A7, SLC22A17), Carbonyl reductases in drug metabolism (e.g., CBR3), Hyaluronan synthase 3 involved in oxidative stress response (e.g., HAS3), Hereditary hemochromatosis protein in iron metabolism (e.g., HFE), Retinoic acid receptor gamma and DNA topoisomerases in topoisomerase-induced DNA damage (e.g., RARG, TOP2B), CUGBP Elav-like family member 4 in splicing of sarcomere genes (e.g., CELF4), DNA polymerase gamma in mitochondrial replication (e.g., DPOG2), and Chaperones involved in ion channel trafficking (e.g., Hsp70 and Hsp90). In other embodiments, the target gene is selected from potassium channel/related genes selected from human ether-a-go-go related gene (hERG), Hyperpolarization-activated cyclic nucleotide-gated (HCN) channels; transient outward potassium current channel; Slowly activating delayed rectifier potassium current channels; Rapidly activating delayed rectifier potassium current channels; Inwardly rectifying potassium (Kir) channels; Inwardly rectifying potassium channels; G protein-coupled, inwardly rectifying potassium channels; ATP-sensitive potassium channels; sodium channel/related genes selected from SCN5A, ACN1B, SCN2B, SCN3B, SCN4B, GPD1L, RANGRF, SCN10A; calcium channel/related genes selected from CACNA1C, CACNB2, CACNA2D1, RYR2, CASQ2, TRDN, CALM1-3; and other genes selected from KCNQ1, SCNA5, KCNE1, KCNE2, KvLQT1, Nav1.5, ankyrin-B, MinK, MiRP1, Kir2.1, Cav1.2, caveolin-3, Nav.beta.4 genes, SNTA1, SLMAP, PKP2, ANK2, CAV3, SLC4A3, TRPM4, DPP6, IRX3, GNAI2, ADORAI, GNAS, KCNQ1, SCNA5, KCNE1, KCNE2, KvLQT1, Nav1.5, ankyrin-B, MinK, MiRP1, Kir2.1, Cav1.2, caveolin-3, Nav.beta.4 ATP-binding cassette (ABC) transporters involved in drug transport (e.g., ABCB1, ABCB4, ABCCI, ABCC2, SLC10A2, SLC28A3, SLC22A7, SLC22A17), Carbonyl reductases in drug metabolism (e.g., CBR3), Hyaluronan synthase 3 involved in oxidative stress response (e.g., HAS3), Hereditary hemochromatosis protein in iron metabolism (e.g., HFE), Retinoic acid receptor gamma and DNA topoisomerases in topoisomerase-induced DNA damage (e.g., RARG, TOP2B), CUGBP Elav-like family member 4 in splicing of sarcomere genes (e.g., CELF4), DNA polymerase gamma in mitochondrial replication (e.g., DPOG2), and chaperones involved in ion channel trafficking (e.g., Hsp70 and Hsp90).

### Computational Approaches to Predicting the Pathogenicity of SNPS.

[0138] In one embodiment, the mutations that may be analyzed by the methods of the disclosure may be identified in public databases. In one embodiment, the database is selected from ClinVar, dbSNP, gnomAD, SNPnexus, EMBI-EBI, SNPedia, and European Variant Archive. These and other databases provide a resource for identifying SNPs of interest to engineer into iPSC cell lines for drug testing on differentiated cardiomyocytes. The disclosure provides that interindividual differences in LQTS-associated genes (e.g., hERG, etc.) affect the control of the QT interval and hence form the biochemical basis for adverse cardiotoxicity responses to drugs.

[0139] Clinical presentation of cardiotoxicity for numerous gene alleles (e.g., hERG (AKA kcnh-2)) have been reported in the literature and organized into databases (e.g., ClinVar, dbSNP, etc.) The frequency of alleles in the human population, with a breakdown according to ethnicity, have been tabulated from large scale genomics studies and made available as an online resource (e.g., gnomAD). Consequently, in one embodiment, the target genes for the methods of the disclosure are selected based on these features of the databases.

[0140] In other embodiments, SNPs have been identified by sequencing studies but are as yet unclassified with regards to LQTS and/or drug induced cardiotoxicity. Accordingly, in one embodiment, these SNPs are referred to as variants of unknown significance (VUSs). In one embodiment, available protein structures in the RSC-PDB database may be used to derive inferences about the consequences of a given VUS, e.g., benign or pathogenic. As noted above, variation in kcnh-2 is extensive, with >1,300 SNPs identified, some of which are listed in Table 1. In some embodiments, these SNPs are tested with the cells and methods of the disclosure.

[0141] In one embodiment, the inventors have developed computational methods that use i) SNP data from online resources (i.e., ClinVar, dbSNP, gnomAD) in combination with ii) protein structures (pdbid 5val) and derived biophysical features (e.g., solvent exposed surface area, conservation, subunit interface, etc.) from physical and biochemical analysis to identify potentially clinically relevant SNPs. Using the above combination of data as a feature set for machine learning (ML) with inputs from domain expertise in biochemistry, the inventors have accurately predicted the effects of SNPs on QT interval and cardiotoxic response to drugs (data not shown).

[0142] Accordingly, in one embodiment, computational methods provide a means to down select the number of SNPs that may be experimentally tested using the cells and methods of the disclosure. In one embodiment, one may draw inferences from experimental data to accurately predict (>80% accuracy) cardiotoxic effects. These embodiments, and derivatives thereof, are generalizable to other LQTS-associated genes to guide selection of SNPs for genome editing of iPSCs for drug response studies.

[0143] In some embodiments, one may prioritize the most frequent variants as down selection criteria for identification of target SNIPs that may be tested with the methods of the disclosure, e.g., allele frequencies equal to or greater than 3.4×10⁻⁵ encompasses 99 nonsynonymous SNPs. In some embodiments, the variants are KCNH-2/hERG variants.

[0144] In one embodiment, allele frequency in the human population and ethnic groups therein may be used as a criterion for prioritizing SNPs for experimental characterization using the methods of the disclosure. In some embodiments, assessing allele frequency may be done with ALFA: Allele Frequency Aggregator. NCBI developed the Allele Frequency Aggregator (ALFA) pipeline to compute allele frequency for variants in dbGaP across approved unrestricted studies and to provide the data as open-access to the public through dbSNP. The goal of the ALFA project is to make frequency data from over IM subjects from the database of Genotypes and Phenotypes (dbGaP) available via open-access in future releases to facilitate discoveries and interpretations of common and rare variants with biological impacts or causing diseases.

[0145] In some embodiments, the target gene mutations are selected using PharmGKB. PharmGKB is a comprehensive resource that curates knowledge about the impact of genetic variation on drug responses for clinicians and researchers. In some embodiments, data entries in PharmGKB for kenh-2 may be downloaded and cross-checked with Clin Var entries for drug-gene interactions.

[0146] In some embodiments, the target gene mutations are selected from the Genome Aggregation Database (gnomAD). The gnomAD is a resource developed by an international coalition of investigators, with the goal of aggregating and harmonizing both exome and genome sequencing data from a wide variety of large-scale sequencing projects and making summary data available for the wider scientific community. The v2.1.1 data set (GRCh37/hg19) provided on this website spans 125,748 exome sequences and 15,708 whole-genome sequences from unrelated individuals sequenced as part of various disease-specific and population genetic studies. The v3.1.2 data set (GRCh38) spans 76,156 genomes, selected as in v2.

Genetic Modification of iPSC and Cardiomyocytes via Prime Editing

[0147] The iPSC and cardiomyocytes of the disclosure may be genetically modified through any gene editing method, including CRISPR, base editing, and prime editing. They can also be modified by CRISPR interference as a means to regulate the expression level of any gene. In one embodiment, the gene editing method is prime editing. Prime editing enables the insertion, deletion, and/or replacement of genomic DNA sequences without requiring error-prone double-strand DNA breaks. It was first described by Anzalone et al., “Search-and-replace genome editing without double-strand breaks or donor DNA,” Nature, 2019, Vol. 576, pp. 149-157, the contents of which are incorporated herein by reference. Since then, multiple variations of the original prime editing technique, some of which are known as PE1, PE2, PE3, PE4, PE5, continue to be developed. Prime editing generally involves a prime editor (PE) and a prime editing guide RNA (pegRNA). In general, prime editing uses an engineered Cas9 nickase-reverse transcriptase fusion protein (PE1, PE2) paired with an engineered prime editing guide RNA (pegRNA) that not only directs Cas9 to a target genomic site, but also which encodes the information for installing the desired edit in the target gene. The first version of prime editing is believed to proceed through multi-step editing process: 1) the Cas9 domain binds and nicks the target genomic DNA site, which is specified by the pegRNA's spacer sequence; 2) the reverse transcriptase domain uses the nicked genomic DNA as a primer to initiate the synthesis of an edited DNA strand using an engineered extension on the pegRNA as a template for reverse transcription—this generates a single-stranded 3′ flap containing the edited DNA sequence; 3) cellular DNA repair resolves the 3′ flap intermediate by the displacement of a 5′ flap species that occurs via invasion by the edited 3′ flap, excision of the 5′ flap containing the original DNA sequence, and ligation of the new 3′ flap to incorporate the edited DNA strand, forming a heteroduplex of one edited and one unedited strand; and 4) cellular DNA repair replaces the unedited strand within the heteroduplex using the edited strand as a template for repair, completing the editing process.

[0148] In some embodiments, the target genes are mutated by different base editing and prime editing methods. Newer prime editing versions include approaches that rely on the addition of other elements to the system to reduce errors. In PE2 a PE complex comprising a fusion protein comprising Cas9(H840A) and a variant MMLV RT is used. This enhances DNA-RNA affinity, enzyme processivity, and thermostability. In addition, PE3 is a modification of PE2, in which an additional nick on the opposite DNA strand is created. Despite the increased efficacy of PE2, the edit inserted by PE2 might still be removed due to DNA mismatch repair of the edited strand. To avoid this problem during DNA heteroduplex resolution, an additional single guide RNA (sgRNA) is introduced. This sgRNA is designed to match the edited sequence introduced by the pegRNA, but not the original allele. It directs the Cas9 nickase portion of the fusion protein to nick the unedited strand at a nearby site, opposite to the original nick. Nicking the non-edited strand causes the cell's natural repair system to copy the information in the edited strand to the complementary strand, permanently installing the edit. PE4 includes PE2 plus an MLH1 dominant negative protein (e.g., wild-type MLH1 with amino acids 754-756 truncated). Dominant negative MLH1 is able to essentially knock out endogenous MLH1 by inhibition, thereby reducing cellular DNA mismatch repair response and increasing prime editing efficiency.

[0149] In one embodiment, the prime editor comprises a fusion protein comprising (i) a nucleic acid programmable DNA binding protein (napDNAbp) and (ii) a DNA polymerase, wherein the napDNAbp is a Cas9 nickase (nCas9) and/or the DNA polymerase is a Reverse Transcriptase (RT). In some embodiments, Cas9 is replaced by another napDNAbp. In some embodiments, the napDNAbp is a nuclease active Cas9 domain, a nuclease inactive Cas9 domain, or a Cas9 nickase domain or variant thereof. In some embodiments, the napDNAbp is selected from Cas9, Cas12e, Cas12d, Cas12a, Cas12b1, Cas13a, Cas12c, ArgonauteCas12b2, Cas13a, Cas12c, Cas12d, Cas12e, Cas12h, Cas12i, Cas12g, Cas12f (Cas14), Cas12f1, Cas12j (Casǐ), and Argonaute and optionally has a nickase activity.

[0150] In some embodiments, the RT is replaced by another DNA polymerase. In some embodiments, the polymerase is a DNA-dependent DNA polymerase or an RNA-dependent DNA polymerase. In some embodiments, the polymerase is a reverse transcriptase. In some embodiments, the reverse transcriptase is a retroviral reverse transcriptase, optionally wherein the reverse transcriptase is a Moloney Murine Leukemia virus reverse transcriptase (MMLV-RT), optionally wherein the MMLV-RT comprises one or more amino acid substitutions compared to a wild type MMLV-RT. In some embodiment, the napDNAbp and the polymerase of the prime editor are joined to form a fusion protein, optionally wherein the napDNAbp and the polymerase are joined by a linker. In some embodiments, the DNA polymerase is provided in trans. In some embodiments, the prime editor and the pegRNA are encoded by one or more DNA vectors. In some embodiments, the one or more DNA vectors comprise AAV or lentivirus DNA vectors.

[0151] In addition to the prime editor, the prime editing requires a prime editing guide RNA (pegRNA) or a nucleic acid sequence encoding the pegRNA, wherein the pegRNA comprises a spacer sequence, a gRNA backbone, and an extension arm comprising a DNA synthesis template (RT template) and a primer binding site (PBS), wherein the spacer sequence comprises a region of complementarity to a target strand of a double stranded target DNA sequence, wherein the gRNA core associates with the napDNAbp, wherein the DNA synthesis template comprises a region of complementarity to the non-target strand of the double-stranded target DNA sequence and one or more nucleotide edits compared to the target strand double-stranded target DNA sequence, and wherein the primer binding site comprises a region of complementarity to a non-target strand of the double-stranded target DNA sequence. In one embodiment, a different pegRNA is designed specifically for each of the target gene mutations. In one embodiment, the pegRNA is the pegRNA coded by a DNA sequence comprising the sequence of any one of SEQ ID Nos: 1100-1113. In one embodiment, the polynucleotide is an RNA that comprises the RNA coded by the DNA of SEQ ID Nos: 1100-1113. Once a specific desired mutation has been identified, there are multiple publicly available computational methods that may be used to design a pegRNA sequence for a specific desired mutation in a specific gene. See, e.g., Hsu, J. Y., Grünewald, J., Szalay, R. et al. PrimeDesign software for rapid and simplified design of prime editing guide RNAs (e.g., Hsu, J.Y., Grünewald, J., Szalay, R. et al. PrimeDesign software for rapid and simplified design of prime editing guide RNAs. Nat Commun 12, 1034 (2021).) accessible providers of pegRNA sequences for desired mutations.

[0152] In some embodiments, the pegRNA are G-quadruplexes modified pegRNAs. In some embodiments, the pegRNA is a xrRNA motif-joined pegRNA. In some embodiments, the pegRNA is a tethered or split pegRNA.

[0153] In some embodiments, once a pegRNA has been designed, the first step of prime editing comprises contacting a target nucleotide molecule with a prime editor, which may include (i) delivering directly to a cell an effective amount of a prime editor fusion protein (e.g., PEI or PE2) complexed with a lipid delivery system; (ii) delivering to a cell a mRNA or delivery complex comprising an mRNA that encodes a prime editor fusion protein and/or a suitable pegRNA; and/or (iii) delivering to the cell a DNA vector that encodes a prime editor fusion protein and/or a suitable pegRNA on one or more DNA vectors. In some embodiments, the RT is provided in trans. In some embodiments, the nucleic acid delivery may occur through a virus vector, plasmid, or other nucleic acid delivery vector. In some embodiments, the vector is an adeno-associated (AAV) vector or a lentivirus vector.

[0154] In one embodiment, prime editing reproduces a known single nucleotide polymorphism, or SNP. If more than 1% of a population does not carry the same nucleotide at a specific position in the DNA sequence, then this variation may be classified as a SNP. If a SNP occurs within a gene, then the gene is described as having more than one allele. In these cases, SNPs may lead to variations in the amino acid sequence. SNPs, however, are not just associated with genes; they can also occur in noncoding regions of DNA.

[0155] In some embodiments, the one or more modifications to the nucleic acid molecule installed at the target site comprises one or more transitions, one or more transversions, one or more insertions, one or more deletions, one more inversions, or any combination thereof, and optionally are less than 15 bp. In one embodiment, the one or more transitions are selected from the group consisting of: (a) T to C; (b) A to G; (c) C to T; and (d) G to A. In one embodiment, the one or more transversions are selected from the group consisting of: (a) T to A; (b) T to G; (c) C to G; (d) C to A; (e) A to T; (f) A to C; (g) G to C; and (h) G to T. In one embodiment, the one or more modifications comprises changing (1) a G: C basepair to a T: A basepair, (2) a G: C basepair to an A: T basepair, (3) a G: C basepair to a C: G basepair, (4) a T: A basepair to a G: C basepair, (5) a T: A basepair to an A: T basepair, (6) a T: A basepair to a C: G basepair, (7) a C: G basepair to a G: C basepair, (8) a C: G basepair to a T: A basepair, (9) a C: G basepair to an A: T basepair, (10) an A: T basepair to a T: A basepair, (11) an A: T basepair to a G: C basepair, or (12) an A: T basepair to a C: G basepair. In one embodiment, the one or more modifications comprises an insertion or deletion of 1, 2, 3, 4, 5, 6, 7, 8, 9, 10, 11, 12, 13, 14, 15, 16, 17, 18, 19, 20, 21, 22, 23, 24, or 25 nucleotides, optionally wherein the one or more edits comprises an insertion or deletion of 1-15 nucleotides.

[0156] In still other embodiments, the method introduces a desired nucleotide change that is an insertion. In certain cases, the insertion is at least 1, at least 2, at least 3, at least 4, at least 5, at least 6, at least 7, at least 8, at least 9, at least 10, at least 11, at least 12, at least 13, at least 14, at least 15, at least 16, at least 17, at least 18, at least 19, at least 20, at least 30, at least 40, at least 50, at least 60, at least 70, at least 80, at least 90, at least 100, at least 200, at least 300, at least 400, or at least 500 nucleotides in length. In other embodiments, the method introduces a desired nucleotide change that is a deletion. In certain other cases, the deletion is at least 1, at least 2, at least 3, at least 4, at least 5, at least 6, at least 7, at least 8, at least 9, at least 10, at least 11, at least 12, at least 13, at least 14, at least 15, at least 16, at least 17, at least 18, at least 19, at least 20, at least 30, at least 40, at least 50, at least 60, at least 70, at least 80, at least 90, at least 100, at least 200, at least 300, at least 400, or at least 500 nucleotides in length.

[0157] In some embodiments, the mutation is the V476I SNP rs199472908 C>T, which results from the SNP GRCh38.p13 (version) chr 7: NC_000007.14: g.150952556C>T (KCNH2 RefSeqGene (LRG_288): NG_008916.1: g.30371G>A). I (protein alteration). In other embodiments, the mutation may be selected by those identified as described above. In some embodiments, the mutation is selected from the SNPs of Table 1, represented in mRNA SEQ ID Nos: 2-1054.

### Other Components of the Gene Editing System

[0158] In some embodiments, the disclosure provides vectors. In some embodiments, the disclosure provides vectors that may encode the components of a gene editing system. In some embodiments, the gene editing system is a prime editing (PE) system. In some embodiments, the vectors encode a component of a PE system (e.g., PE fusion proteins, or any of the components thereof (e.g., napDNAbp, linkers, or polymerases). In other embodiments, the vectors may encode the pegRNAs, and/or the accessory gRNA for second strand nicking. In some embodiments, the vectors are capable of driving expression of one or more coding sequences in a cell. In some embodiment, the cell is a pluripotent cell. In some embodiments, the cell is an iPSC. In some embodiments, the cell is a cardiomyocyte. In some embodiments, the cell is an iPSC-derived cardiomyocyte. In some embodiments, the cell may be a prokaryotic cell, such as, e.g., a bacterial cell when used to prepare the components of the editing system. In some embodiments, the cell may be another eukaryotic cell, such as, e.g., a yeast, plant, insect, or mammalian cell, preferably for expressing the components of the editing system. In some embodiments, the eukaryotic cell may be a mammalian cell. In some embodiments, the eukaryotic cell may be a rodent cell. In some embodiments, the eukaryotic cell may be a human cell.

[0159] Suitable promoters to drive expression in different types of cells are known in the art. In some embodiments, the promoter may be wild-type. In other embodiments, the promoter may be modified for more efficient or efficacious expression. In yet other embodiments, the promoter may be truncated yet retain its function. For example, the promoter may have a normal size or a reduced size that is suitable for proper packaging of the vector into a virus. In some embodiments, the promoters that may be used in the prime editor vectors may be constitutive, inducible, or tissue-specific. In some embodiments, the promoters may be a constitutive promoters. Non-limiting exemplary constitutive promoters include cytomegalovirus immediate early promoter (CMV), simian virus (SV40) promoter, adenovirus major late (MLP) promoter, Rous sarcoma virus (RSV) promoter, mouse mammary tumor virus (MMTV) promoter, phosphoglycerate kinase (PGK) promoter, elongation factor-alpha (EFla) promoter, ubiquitin promoters, actin promoters, tubulin promoters, immunoglobulin promoters, a functional fragment thereof, or a combination of any of the foregoing. In some embodiments, the promoter may be a CMV promoter. In some embodiments, the promoter may be a truncated CMV promoter. In other embodiments, the promoter may be an EFla promoter. In some embodiments, the promoter may be an inducible promoter. Non-limiting exemplary inducible promoters include those inducible by heat shock, light, chemicals, peptides, metals, steroids, antibiotics, or alcohol. In some embodiments, the inducible promoter may be one that has a low basal (non-induced) expression level.

[0160] In some embodiments, the nucleotide encoding the crRNA of the guide RNA and the nucleotide encoding the tracr RNA of the guide RNA may be provided on the same vector. In some embodiments, the nucleotide encoding the crRNA and the nucleotide encoding the tracr RNA may be driven by the same promoter. In some embodiments, the crRNA and tracr RNA may be transcribed into a single transcript. For example, the crRNA and tracr RNA may be processed from the single transcript to form a double-molecule guide RNA. Alternatively, the crRNA and tracr RNA may be transcribed into a single-molecule guide RNA. In some embodiments, the nucleotide sequence encoding the guide RNA may be located on the same vector comprising the nucleotide sequence encoding the PE fusion protein. In some embodiments, expression of the guide RNA and of the PE fusion protein may be driven by their corresponding promoters. In some embodiments, expression of the guide RNA may be driven by the same promoter that drives expression of the PE fusion protein. In some embodiments, the guide RNA and the PE fusion protein transcript may be contained within a single transcript. For example, the guide RNA may be within an untranslated region (UTR) of the Cas9 protein transcript. In some embodiments, the guide RNA may be within the 5′ UTR of the PE fusion protein transcript. In other embodiments, the guide RNA may be within the 3′ UTR of the PE fusion protein transcript.

### Delivery

[0161] Exemplary delivery strategies include vector-based strategies, (PE) ribonucleoprotein complex delivery, and delivery of prime editors by mRNA methods. In some embodiments, the method of delivery provided comprises nucleofection, microinjection, biolistics, virosomes, liposomes, immunoliposomes, polycation or lipid: nucleic acid conjugates, naked DNA, artificial virions, and agent-enhanced uptake of DNA. Exemplary methods of delivery of nucleic acids include lipofection, nucleofection, electoporation, stable genome integration (e.g., piggybac), microinjection, biolistics, virosomes, liposomes, immunoliposomes, polycation or lipid: nucleic acid conjugates, naked DNA, artificial virions, and agent-enhanced uptake of DNA. In one embodiment, the lipofection reagents are sold commercially (e.g., Transfectam™, Lipofectin™ and SF Cell Line 4D-Nucleofector X Kit™ (Lonza)). Cationic and neutral lipids that are suitable for efficient receptor-recognition lipofection of polynucleotides are known in the art. In one embodiment, delivery may be to iPSC or cardiomyocyte cells (e.g., in vitro or ex vivo administration). Delivery may be achieved through the use of RNP complexes. The preparation of lipid: nucleic acid complexes, including targeted liposomes such as immunolipid complexes, is well known to one of skill in the art. In other embodiments, the method of delivery and vector provided herein is an RNP complex. RNP delivery of fusion proteins markedly increases the DNA specificity of base editing. RNP delivery of fusion proteins leads to decoupling of on- and off-target DNA editing. Additional methods for the delivery of nucleic acids to cells are known to those skilled in the art. See, for example, WO2022150790, incorporated herein by reference.

[0162] In a specific embodiment, the disclosure provides methods of delivering the prime editor constructs into a cell to form a complete and functional prime editor within a cell. For example, in some embodiments, a cell is contacted with a composition described herein (e.g., compositions comprising nucleotide sequences encoding the Cas9-RT protein or the prime editor or AAV particles containing nucleic acid vectors comprising such nucleotide sequences). In some embodiments, the contacting results in the delivery of such nucleotide sequences into a cell, wherein the N-terminal portion of the Cas9-RT protein or the prime editor and the C-terminal portion of the Cas9-RT protein or the prime editor are expressed in the cell and are joined to form a complete Cas9-RT protein or a complete prime editor. Any rAAV particle, nucleic acid molecule or composition provided herein may be introduced into the cell in any suitable way, either stably or transiently. In some embodiments, the disclosed proteins may be transfected into the iPSC cell. In some embodiments, the disclosed proteins may be transfected into the cardiomyocyte cell. In some embodiments, the cell may be transduced or transfected with a nucleic acid molecule. For example, a cell may be transduced (e.g., with a virus encoding a split protein), or transfected (e.g., with a plasmid encoding a split protein) with a nucleic acid molecule that encodes a protein, or an rAAV particle containing a viral genome encoding one or more nucleic acid molecules. Such transduction may be a stable or transient transduction. In some embodiments, cells expressing a split protein or containing a split protein may be transduced or transfected with one or more guide RNA sequences, for example in delivery of Cas9-RT (e.g., nCas9) protein. In some embodiments, a plasmid expressing a Cas9-RT protein may be introduced into cells through electroporation, transient (e.g., lipofection) and stable genome integration (e.g., piggybac) and viral transduction or other methods known to those of skill in the art.

[0163] In some embodiments, human iPSC are transfected with two separate plasmids. In some embodiments, one plasmid encodes a Cas9-RT fusion protein and the other plasmid encodes the pegRNA. In some embodiments, the plasmids are transfected via electroporation. In some embodiments, the plasmids are transfected with a nucleogector. In some embodiments, this method is used to introduce the V476I variant into iPSCs.

### Pluripotent Stem Cells

[0164] The disclosure provides that cardiomyocytes derived from pluripotent stem cells genetically engineered to carry mutations in specific genes are useful and novel models for studying the cardiotoxicity of those mutations and for testing drugs for their cardiotoxicity. In some other embodiments, the cardiomyoctes may be derived from human embryonic stem cells, mesenchymal stem cells, multipotent cardiac stem cells, or cardiac mesenchymal stem cells. In some embodiments, these cells may be genetically engineered to carry one or more specific mutations in one or more target genes.

[0165] Accordingly, in one embodiment, the disclosure provides induced pluripotent stem cells (iPSC) genetically engineered to carry one or more specific mutations in one or more target genes. In some embodiments, the target genes are genes known to or suspected of having a role in cardiac function. In some embodiments, the genes are selected from KCNH2, KCNQ1, SCNA5, KCNE1, KCNE2 and genes encoding other channels, ATP-binding cassette (ABC) transporters involved in drug transport (e.g., ABCB1, ABCB4, ABCCI, ABCC2, SLC10A2, SLC28A3, SLC22A7, SLC22A17), Carbonyl reductases in drug metabolism (e.g., CBR3), Hyaluronan synthase 3 involved in oxidative stress response (e.g., HAS3), Hereditary hemochromatosis protein in iron metabolism (e.g., HFE), Retinoic acid receptor gamma and DNA topoisomerases in topoisomerase-induced DNA damage (e.g., RARG, TOP2B), CUGBP Elav-like family member 4 in splicing of sarcomere genes (e.g., CELF4), DNA polymerase gamma in mitochondrial replication (e.g., DPOG2), and Chaperones involved in ion channel trafficking (e.g., Hsp70 and Hsp90). In some embodiments, the target gene is selected from potassium channel/related genes selected from human ether-a-go-go related gene (hERG), Hyperpolarization-activated cyclic nucleotide-gated (HCN) channels; transient outward potassium current channel; Slowly activating delayed rectifier potassium current channels; Rapidly activating delayed rectifier potassium current channels; Inwardly rectifying potassium (Kir) channels; Inwardly rectifying potassium channels; G protein-coupled, inwardly rectifying potassium channels; ATP-sensitive potassium channels; sodium channel/related genes selected from SCN5A, ACN1B, SCN2B, SCN3B, SCN4B, GPD1L, RANGRF, SCN10A; calcium channel/related genes selected from CACNA1C, CACNB2, CACNA2DI, RYR2, CASQ2, TRDN, CALM1-3; and other genes selected from KCNQ1, SCNA5, KCNE1, KCNE2, KvLQT1, Nav1.5, ankyrin-B, MinK, MiRP1, Kir2.1, Cav1.2, caveolin-3, Nav.beta.4 genes, SNTAI, SLMAP, PKP2, ANK2, CAV3, SLC4A3, TRPM4, DPP6, IRX3, GNAI2, ADORAI, GNAS, KCNQ1, SCNA5, KCNE1, KCNE2, KvLQT1, Nav1.5, ankyrin-B, MinK, MiRP1, Kir2.1, Cav1.2, caveolin-3, Nav.beta.4 ATP-binding cassette (ABC) transporters involved in drug transport (e.g., ABCB1, ABCB4, ABCCI, ABCC2, SLC10A2, SLC28A3, SLC22A7, SLC22A17), Carbonyl reductases in drug metabolism (e.g., CBR3), Hyaluronan synthase 3 involved in oxidative stress response (e.g., HAS3), Hereditary hemochromatosis protein in iron metabolism (e.g., HFE), Retinoic acid receptor gamma and DNA topoisomerases in topoisomerase-induced DNA damage (e.g., RARG, TOP2B), CUGBP Elav-like family member 4 in splicing of sarcomere genes (e.g., CELF4), DNA polymerase gamma in mitochondrial replication (e.g., DPOG2), and chaperones involved in ion channel trafficking (e.g., Hsp70 and Hsp90).

[0166] In some embodiments, the target gene is KONH2, which encodes a voltage-gated transmembrane potassium channel called hERG. In some embodiments, the mutation is a SNP. In some embodiments, the SNP is in the KNH2 gene. In some embodiments, the SNP is selected from those in SEQ ID Nos: 2-1054, which are listed in Table 1, obtained from the ClinVar database. In some embodiments, the SNP is V476I in the KONH2 gene. In some embodiments, the SNP is introduced in the iPSC cell by prime editing, CRISPR, base editing, or any other method that may be used to mutate one or more bases in a target gene. In some embodiments, the SNP may be introduced directly into cardiomyocytes from any source.

[0167] In some embodiments, the cardiomyocytes are differentiated from stem cells. In some embodiments, the stem cells are induced pluripotent stem cells. In some embodiments, the stem cells are human embryonic stem cells, mesenchymal stem cells, multipotent cardiac stem cells, or cardiac mesenchymal stem cells. In some embodiments, the stem cells are obtained from commercial sources. In some embodiments, the iPSC are developed as described in the literature. See, e.g. Dowey, S., Huang, X., Chou, B K. et al. Generation of integration-free human induced pluripotent stem cells from postnatal blood mononuclear cells by plasmid vector expression. Nat Protoc 7, 2013-2021 (2012). doi.org/10.1038/nprot.2012.121. In some embodiments, the iPSC are generated as described in the Examples.

[0168] In some embodiments, the disclosure provides an iPSC cell. In some embodiments, the cell is carrying one or more of the mutations of the disclosure or is carrying a genetically engineering means for altering the expression of one or more genes. In some embodiments, the disclosure provides a composition (e.g., culture) comprising or consisting of said iPSC cells. In some embodiments, the composition comprises or consists of more than one iPSC cell, each cell carrying one or more mutations as described herein. In some embodiments, the composition comprises a library of cells of the disclosure.

### Cardiomyocytes

[0169] In some embodiments, the disclosure provides a cardiomyocyte carrying one or more of the mutations of the disclosure, or one or more genes whose gene expression level has been altered. In some embodiments, the cardiomyocyte is a primary cardiomyocyte. In some embodiments, the cardiomyocyte is differentiated from stem cells in vitro. In some embodiments, the cardiomyocyte is differentiated from iPSC, in vitro. In some embodiments, the cardiomyocytes are obtained through a method comprising steps of the method of Example 6. In some embodiments, the disclosure provides a panel of cardiomyocyte cells or cell lines containing genetic diversity of established clinical relevance and variants of unknown significance for studying the cell's functionalities with different drugs. In some embodiments, the cardiomyocytes may be derived from iPSC by in vitro differentiation using combinations of small molecules, and/or growth factors, such as described in Lian et al, Nature Protocols. 8, 162-175, 2013 and Sharma et al, Journal of visualized experiments JoVE. 2015, including modulation of Wnt pathway followed by glucose starvation for selection of highly purified cardiomyocyte populations, as described here Cyganek et al, JCI insight. 3, 2018, and combinations with nucleic acids (i.e., RNA, miRNA, siRNA).

[0170] In this application, a mutation, gene expression level, or drug is associated with cardiomyocyte cardiotoxicity (and hence clinical toxicity) if the mutation, gene expression level, or drug has a negative effect on one or more of cardiomyocyte function, proliferation, viability, survival, morphology, the expression of certain markers and receptors, “heart beats” in vitro (which can model arrhythmias) relative to wild-type (e.g., isogenic) cells, wherein a negative effect is a statistically significant effect. In some embodiments, a mutation, gene expression level, or drug is associated with cardiomyocyte cardiotoxicity (and hence clinical toxicity) if the mutation, gene expression level, or drug has a negative effect on one or more of cardiomyocyte function, proliferation, viability, survival, morphology, the expression of certain markers and receptors, “heart beats” in vitro (which can model arrhythmias) relative to wild-type (e.g., isogenic) cells, wherein there is a negative effect if there is a change of at least 5% relative to wild-type cells.

[0171] In this application, a “wild-type” subject is a healthy subject, without clinical evidence of cardiac disease. In this application, “iPSC-derived wild-type cardiomyocytes” are myocytes obtained from iPSC derived from a healthy subject, without clinical evidence of cardiac disease. In some embodiments, “standard iPSC-derived wild-type cardiomyocytes” are cardiomyocytes derived from an iPSC cell line that is generally considered a standard in the art. In some embodiments, it may be specified which gene must be wild-type. In those embodiments, the gene is a gene associated with cardiac disease. In some embodiments, the gene is selected from KCNH2/hERG, KCNQ1, SCNA5, KCNE1, KCNE2, KvLQT1, Nav1.5, ankyrin-B, MinK, MiRP1, Kir2.1, Cav1.2, caveolin-3, and Nav.beta.4 genes; genes encoding other channels, a sodium channel/related gene selected from SCN5A, ACN1B, SCN2B, SCN3B, SCN4B, GPD1L, RANGRF, SCN10A; a potassium channel/related gene selected from human ether-a-go-go related gene (hERG), Hyperpolarization-activated cyclic nucleotide-gated (HCN) channels; transient outward potassium current channel; Slowly activating delayed rectifier potassium current channels; Rapidly activating delayed rectifier potassium current channels; Inwardly rectifying potassium (Kir) channels; Inwardly rectifying potassium channels; G protein-coupled, inwardly rectifying potassium channels; ATP-sensitive potassium channels; a calcium channel/related gene selected from CACNA1C, CACNB2, CACNA2D1, RYR2, CASQ2, TRDN, CALM1-3; other genes selected from SNTA1, SLMAP, PKP2, ANK2, CAV3, SLC4A3, TRPM4, DPP6, IRX3, GNAI2, ADORAI, GNAS, KCNQ1, SCNA5, KCNE1, KCNE2, KvLQT1, Nav1.5, ankyrin-B, MinK, MiRP1, Kir2.1, Cav1.2, caveolin-3, Nav.beta.4 ATP-binding cassette (ABC) transporters involved in drug transport (e.g., ABCB1, ABCB4, ABCCI, ABCC2, SLC10A2, SLC28A3, SLC22A7, SLC22A17), Carbonyl reductases in drug metabolism (e.g., CBR3), Hyaluronan synthase 3 involved in oxidative stress response (e.g., HAS3), Hereditary hemochromatosis protein in iron metabolism (e.g., HFE), Retinoic acid receptor gamma and DNA topoisomerases in topoisomerase-induced DNA damage (e.g., RARG, TOP2B), CUGBP Elav-like family member 4 in splicing of sarcomere genes (e.g., CELF4), DNA polymerase gamma in mitochondrial replication (e.g., DPOG2), and chaperones involved in ion channel trafficking (e.g., Hsp70 and Hsp90).

### Exemplary Non-Limiting Methods of Using the Cells of the Disclosure

Method of Identifying a Gene or Gene Mutation as Associated with or Cause for Cardiac Disease

[0172] For the purpose of the following methods or models, the cells of the disclosure comprise any kind of stem cell, iPSC, cardiomyocytes derived from stem cells, and cardiomyocytes derived from any other source, wherein the cells have been genetically modified to carry any one of the mutations described in this disclosure, to fix any mutation previously unknown or previously known related to cardiac disease or disorder, or to have altered expression of one or more genes. For example, the following methods may be practiced with cardiomyocytes derived from iPSC or cardiomyocytes from any other source, so long as they have been genetically modified to introduce or correct a mutation in a gene, or to alter the expression of one or more genes, that is related to cardiac function, preferably, cardiomyocytes' function, proliferation, viability, survival, morphology, the expression of certain markers and receptors, “heart beats” in vitro (which can model arrhythmias) relative to wild-type (e.g., isogenic) cells.

[0173] In one embodiment, the disclosure provides a method whereby iPSC (or other stem cells) are genetically modified to carry one or more mutations in one or more genes. Cardiomyocytes are derived from these cells. The cardiomyocytes are tested for the effects of the mutation on their function, proliferation, viability, survival, morphology, the expression of certain markers and receptors, and “heart beats” in vitro (which can model arrhythmias) relative to wild-type (e.g., isogenic) cells. Gene mutations that are associated with negative effects on one or more of these cardiomyocyte properties are classified as mutations associated with or cause for cardiac disease.

[0174] In one embodiment, the disclosure provides a method whereby iPSC (or other stem cells) are genetically modified to alter the gene expression of one or more genes. Cardiomyocytes are derived from these cells. In some embodiments, the cardiomyocytes are the ones that are genetically modified to alter the gene expression of one or more genes. The cardiomyocytes are tested for the effects of change in gene expression/gene expression level on their function, proliferation, viability, survival, morphology, the expression of certain markers and receptors, and “heart beats” in vitro (which can model arrhythmias) relative to wild-type (e.g., isogenic) cells. Changes in gene expression levels that are associated with negative effects on one or more of these cardiomyocyte properties are classified as genes whose expression level is associated with or cause for cardiac disease.

[0175] In all embodiments of this application, the cardiomyocytes may be derived from iPSC or not. The cardiomyocytes may be from any source. The genetic alterations that are described for the iPSC may be also introduced directly into cardiomyocytes instead of the iPSC.

[0176] Throughout this application, any gene that is mutated may also or instead have its gene expression altered (e.g., CRISPR interference). Consequently, all embodiments directed to gene mutations can equally be practiced with genes whose expression level is changed by genetic engineering and are included in this application even when not explicitly disclosed. Accordingly, in one embodiment, the mutations and alterations in gene expression levels are as described in the previous sections, including mutations selected from any of the listed databases. In one embodiment, the databases list gene mutations identified in the population in any gene. In one embodiment, the gene is selected from HERG/KCNH2, SCN5A, KCNQ1, SCNA5, KCNE1, KCNE2, KvLQT1, Nav1.5, ankyrin-B, MinK, MiRP1, Kir2.1, Cav1.2, caveolin-3, Nav.beta.4 ATP-binding cassette (ABC) transporters involved in drug transport (e.g., ABCB1, ABCB4, ABCCI, ABCC2, SLC10A2, SLC28A3, SLC22A7, SLC22A17), Carbonyl reductases in drug metabolism (e.g., CBR3), Hyaluronan synthase 3 involved in oxidative stress response (e.g., HAS3), Hereditary hemochromatosis protein in iron metabolism (e.g., HFE), Retinoic acid receptor gamma and DNA topoisomerases in topoisomerase-induced DNA damage (e.g., RARG, TOP2B), CUGBP Elav-like family member 4 in splicing of sarcomere genes (e.g., CELF4), DNA polymerase gamma in mitochondrial replication (e.g., DPOG2), Chaperones involved in ion channel trafficking (e.g., Hsp70 and Hsp90). In some embodiments, a sodium channel/relate gene is selected from SCN5A, ACN1B, SCN2B, SCN3B, SCN4B, GPD1L, RANGRF, SCN10A; a potassim channel/related gene is selected from human ether-a-go-go related gene (hERG), Hyperpolarization-activated; a sodium channel/relate gene is selected from SCN5A, ACN1B, SCN2B, SCN3B, SCN4B, GPD1L, RANGRF, SCN10A; a potassim channel/related gene is selected from human ether-a-go-go related gene (hERG), Hyperpolarization-activated cyclic nucleotide-gated (HCN) channels; transient outward potassium current channel; slowly activating delayed rectifier potassium current channels; Rapidly activating delayed rectifier potassium current channels; Inwardly rectifying potassium (Kir) channels; Inwardly rectifying potassium channels; G protein-coupled, inwardly rectifying potassium channels; ATP-sensitive potassium channels; a calcium channel/related gene is selected from CACNA1C, CACNB2, CACNA2D1, RYR2, CASQ2, TRDN, CALM1-3; other genes are selected from SNTAI, SLMAP, PKP2, ANK2, CAV3, SLC4A3, TRPM4, DPP6, IRX3, GNAI2, ADORA1, GNAS cyclic nucleotide-gated (HCN) channels; transient outward potassium current channel; Slowly activating delayed rectifier potassium current channels; Rapidly activating delayed rectifier potassium current channels; Inwardly rectifying potassium (Kir) channels; Inwardly rectifying potassium channels; G protein-coupled, inwardly rectifying potassium channels; ATP-sensitive potassium channels; the calcium channel/related gene is selected from CACNA1C, CACNB2, CACNA2DI, RYR2, CASQ2, TRDN, CALM1-3; other genes are selected from SNTA1, SLMAP, PKP2, ANK2, CAV3, SLC4A3, TRPM4, DPP6, IRX3, GNAI2, ADORAI, GNAS.

[0177] In one embodiment, the mutations are/represent SNPs. In one embodiment, the SNPs are as described in the previous sections and in Table 1 and/or SEQ ID Nos. 2-1054. In one embodiment, the mutation results in a In one embodiment, the SNP is chosen for testing according to the methods of the disclosure based on its “clinical significance.” (See Table 1). In one embodiment, the SNP is chosen for testing according to the methods of the disclosure based on the “Condition(s)” the SNP has been associated with in the ClinVar database. (See Table 1 and updated versions of the database). Though no specific SNP is being at this time selected for testing other than the ones in the Examples, each individual SNP is considered relevant for testing according to the methods of the disclosure and can be independently claimed as an individual embodiment. The clinical significance and the conditions associated with are sufficient “blaze marks” directing one skilled in the art to any of these SNPs and any SNP can be picked from among the remaining SNPs in the table without the need for further guidance.

[0178] In one embodiment, a panel of cells carrying a panel of gene mutations prepared by the methods of the disclosure may be tested for the effect of the panel of mutations on cardiomyocytes. This panel may be a library of cells with known and unknown mutations. In one embodiment, the cells are not part of a library. The results may then be compared with databases of mutations in the gene to either confirm the negative effects of the mutation on cardiac function in patients or confirm that the mutations are not pathogenic. In some embodiments, the mutations have been previously identified as influencing cardiomyocytes. In other embodiments, the disclosure provides the first identification of the gene or gene mutation as being important for cardiomyocyte function, proliferation, viability, survival, morphology, the expression of certain markers and receptors, and “heart beats” in vitro (which can model arrhythmias) relative to wild-type (e.g., isogenic) cells. In some embodiments, the disclosure provides mutations that are associated with or the cause of cardiac disease. In some embodiments, the subject can be diagnosed as potentially having one of the diseases listed in Table 1 based on the associations listed in the table.

[0179] In some embodiments, the disease is an arrhythmia. In some embodiments, the arrhythmia is selected from Long QT syndrome (including Congenital long QT syndrome, Long QT syndrome 2, and bradycardia-induced Long QT syndrome), Brugada syndrome, Short QT syndrome 1, Sudden Infant Death Syndrome, Acquired long QT syndrome, ventricular tachycardia, Wolff-Parkinson-White pattern arrhythmia, Arrhythmogenic right ventricular cardiomyopathy, Atrial fibrillation, Catecholaminergic polymorphic ventricular tachycardia type 1, Prolonged QT interval, Paroxysmal familial ventricular fibrillation 1, Sudden cardiac arrest/death and Torsades de pointes. In some embodiments, the disease is hypertrophic cardiomyopathy, sudden unexplained death, obesity-related cardiac disease, primary dilated cardiomyopathy, primary familial hypertrophic cardiomyopathy, or Seizures.

[0180] In some embodiments, the effect of the gene mutation on cardiomyocytes is assessed by a cardiotoxicity assay, which may measure the effect of the mutation on cardiomyocyte cell viability, survival, morphology, the expression of certain markers and receptors, and/or “heart beats” in vitro (which can model arrhythmias). In some embodiments, the cardiotoxicity assay comprises using a patch clamp technique, an external recording method, a voltage-sensitive dye, or an intracellular ion-sensitive dye. These assays may be used in any of the methods of the disclosure.

Method of Diagnosing a Subject as being Susceptible to Cardiac Disease

[0181] In some embodiments, the disclosure provides a means for identifying a subject as someone susceptible to cardiac disease. In some embodiments, the subject is identified as someone susceptible to cardiac disease when the subject carries one or more of the mutations in their genome identified as affecting cardiomyocyte function, proliferation, viability, survival, morphology, the expression of certain markers and receptors, “heart beats” in vitro (which can model arrhythmias) relative to wild-type (e.g., isogenic) cells, preferably through the methods disclosed herein. In one embodiment, negative effects on any one or more of each of these cardiomyocyte properties is representative of cardiotoxicity. In some embodiments, the subject was already aware that they had a cardiac disease. In some embodiments, the subject was not aware that they carried a cardiac disease. In some embodiments, the subject was not previously aware that they carried the gene mutation. In some embodiments, the subject was not previously aware that it carried a gene mutation that was associated with susceptibility to cardiac disease. In some embodiments, the subject may be subsequently diagnosed as potentially having one of the diseases listed in Table 1 based on the associations listed in the table.

[0182] In some embodiments, the disease is an arrhythmia. In some embodiments, the arrhythmia is selected from Long QT syndrome (including Congenital long QT syndrome, Long QT syndrome 2, and bradycardia-induced Long QT syndrome), Brugada syndrome, Short QT syndrome 1, Sudden Infant Death Syndrome, Acquired long QT syndrome, ventricular tachycardia, Wolff-Parkinson-White pattern arrhythmia, Arrhythmogenic right ventricular cardiomyopathy, Atrial fibrillation, Catecholaminergic polymorphic ventricular tachycardia type 1, Prolonged QT interval, Paroxysmal familial ventricular fibrillation 1, Sudden cardiac arrest/death and Torsades de pointes. In some embodiments, the disease is hypertrophic cardiomyopathy, sudden unexplained death, obesity-related cardiac disease, primary dilated cardiomyopathy, primary familial hypertrophic cardiomyopathy, or Seizures.

[0183] In some embodiments, the subject's family members (e.g., progeny) are tested for the presence of one or more of the mutations identified as associated with cardiotoxicity or cardiac disease by the methods of the disclosure.

[0184] In some embodiments, the mutation is incorporated into commercial diagnostic tests. In some embodiments, the disclosure provides a kit for diagnosing an individual as carrying one or more of the mutations originally identified as cardiotoxic or associated with cardiac disease by the methods of the invention. In some embodiments, the kits are as described earlier in this application.

Method of Identifying a Gene Mutation as Associated with Drug-Induced Cardiac Disease

[0185] In one embodiment, the disclosure provides a method of identifying gene mutations that confer to cardiomyocytes carrying those mutations sensitivity to one or more drugs. In one embodiment, an iPSC-derived cardiomyocyte carrying one or more gene mutations as described above is exposed to a drug and the effect of the drug exposure on the cardiomyocyte function, proliferation, viability, survival, morphology, the expression of certain markers and receptors, and/or “heart beats” in vitro (which can model arrhythmias) is assessed. In one embodiment, if a drug has a negative effect on any one or more of these cardiomyocyte properties, the drug is said to be “cardiotoxic” or “associated with cardiotoxicity” in subjects carrying that mutation. In some embodiments, the cardiomyocytes are derived from iPSC with the methods of the disclosure.

[0186] In one embodiment, the presence of the cardiotoxic gene mutation in a subject is used to identify subjects that will present cardiac disease if exposed to the drug. In some embodiments, this method identifies subjects that should not be exposed to said drug.

[0187] In one embodiment, an individual drug is assessed at a time. In another embodiment, a library or panel of drugs may be assessed in multiple cardiomyocytes at the same time. In one embodiment, the cardiomyocytes are cultured in multi-well plates (e.g., 96 well plates) and a different drug is tested in each well or set of wells (e.g., 1 drug per each 3 wells to have triplicate results).

[0188] In one embodiment, the drug is a new drug. In another embodiment, the drug is not a new drug. In one embodiment, the assay is used as a model of drug-induced cardiotoxicity for regulatory purposes (e.g., FDA approval). In one embodiment, the drug is selected from those listed in Table 2 and Table 3 and other drugs of the same classes. In one embodiment, the drug is selected from sotalol, propranolol, and isoproterenol.

### Method to Assess Whether a Drug is Cardiotoxic

[0189] In one embodiment, the disclosure provides a method of identifying a drug as cardiotoxic to the “wild-type” population in general. In one embodiment, an iPSC-derived cardiomyocyte not carrying one or more gene mutations identified herein (i.e., cardiomyocytes from one or more representatives of wild-type individuals, wherein a nucleotide sequence is dominant or most frequently observed in the population) is exposed to a drug and the effect of the drug exposure on the cardiomyocyte function, proliferation, viability, survival, morphology, the expression of certain markers and receptors, and/or “heart beats” in vitro (which can model arrhythmias) is assessed. In one embodiment, if a drug has a negative effect on any one or more of these cardiomyocyte properties, the drug is said to be cardiotoxic or associated with cardiotoxicity. In some embodiments, the cardiomyocytes are derived from iPSC with the methods of the disclosure.

[0190] In one embodiment, an individual drug is assessed at a time. In another embodiment, a library or panel of drugs may be assessed in multiple cardiomyocytes at the same time. In one embodiment, the cardiomyocytes are cultured in multi-well plates (e.g., 96 well plates) and a different drug is tested in each well or set of wells (e.g., 1 drug per each 3 wells to have triplicate results).

[0191] In one embodiment, the drug is a new drug. In another embodiment, the drug is not a new drug. In one embodiment, the assay is used as a model of drug-induced cardiotoxicity for regulatory purposes (e.g., FDA approval). In one embodiment, the drug is selected from those listed in Table 2 and Table 3 and other drugs of the same classes.

Method of Treating a Subject with a Cardiovascular Disease

[0192] In one embodiment, a subject is identified as having a cardiovascular disease using the methods disclosed above. In one embodiment, the subject is further treated for the disease after experiencing symptoms of the disease. In one embodiment, the subject is treated prophylactically. In one embodiment, the subject is identified as being at risk for any one of the cardiovascular diseases associated with arrhythmia. In one embodiment, a cardiac defibrillator is implanted in the subject prophylactically or after experiencing arrhythmia.

[0193] In one embodiment, the subject is treated by correction of the mutation that is associated with or causes the disease, as discovered by the methods of the invention. In one embodiment, the correction of the mutation is done by CRISPR, base editing, or prime editing.

### Reverse Methods

[0194] In one embodiment, the methods just described are carried out not by introducing a mutation into a gene but by correcting a mutation in a gene and assessing the effect of the correction on cardiomyocyte function, proliferation, viability, survival, morphology, the expression of certain markers and receptors, and/or “heart beats” in vitro (which can model arrhythmias). In one embodiment, the mutation is known to be cardiotoxic, or suspected to be cardiotoxic and the effect of changing or correcting that mutation to a different base/sequence (e.g., wild-type sequence) on cardiotoxicity is assessed with the methods of the disclosure.

[0195] In some embodiments, the discovery that the change or correction of the mutation in the cardiomyocytes genome may improve the cardiomyocytes' function, proliferation, viability, survival, morphology, the expression of certain markers and receptors, and/or “heart beats” in vitro (which can model arrhythmias) may be used to treat cardiac disease or reduce drug cardiotoxicity in a subject, by altering or correcting the subject's cardiomyocytes through gene editing. In some embodiments, the gene editing comprises CRISPR, base editing, or prime editing. In some embodiments, the subject is a human.

### Other Methods

[0196] The nucleic acids and cells of the disclosure may be used in any other method whereby the relationship between a specific gene mutation and/or gene expression level and cardiotoxicity (as defined above) play a role. Such methods are all within the scope of the disclosure.

### Compositions

[0197] In one embodiment, the disclosure provides compositions comprising or consisting of one or more nucleic acids and/or proteins of the disclosure. In one embodiment, the disclosure provides compositions comprising one or more cells of the disclosure (i.e., iPSC and cardiomyocytes). In some embodiments, the compositions are pharmacological compositions. In some embodiments, the compositions comprise or consist of one or more components of a gene editing system described herein and are capable of being administered to a cell, tissue, or organism by any suitable means, such as by gene therapy, mRNA delivery, virus-like particle delivery, or ribonucleoprotein (RNP) delivery, and combinations thereof, as described above.

[0198] In one embodiment, the disclosure provides compositions for delivering the nucleic acids of the disclosure to a cell. In one embodiment, the compositions comprise or consist of a pegRNA of the disclosure. In one embodiment, the compositions comprise or consisting of a prime editor of the disclosure. In one embodiment, the compositions or consisting of comprise both. More compositions are described above in the methods of delivery of the gene editing system.

[0199] In one embodiment, the one or more modifications comprises a correction to a mutation associated with a disease in a disease-associated gene. In one embodiment, the one or more modifications comprises the introduction of a mutation associated with a disease in a disease-associated gene. In one embodiment, the mutation is a SNP of the disclosure. In one embodiment, the disease-associated gene is associated with cardiac disease. In one embodiment, the disease is selected from those diseases described elsewhere in the application. In one embodiment, the disease-associated gene is the HERG gene. In one embodiment, the disease-associated gene is selected from those listed elsewhere in the specification.

[0200] In some embodiments, the compositions are pharmaceutical compositions. In some embodiments, the pharmaceutical composition comprises any of the compositions disclosed herein. In some embodiments, the pharmaceutical composition comprises any of the compositions disclosed herein and a pharmaceutically acceptable carrier. In some embodiments, the compositions comprise or consists of one or more cells of the disclosure. In one embodiment, the composition comprises iPSC. In one embodiment, the composition comprises cardiomyocytes. In one embodiment, the composition comprises or consists of both iPSC and cardiomyocytes. In some embodiments, the composition comprises or consists of any one of these cells and one or more components of a gene editing system (nucleic acids/polynucleotides; proteins; combinations). In some embodiments, the pharmaceutical composition comprises or consists of any of the polynucleotides disclosed herein. In some embodiments, the pharmaceutical composition comprises or consists of any of the polynucleotides disclosed herein and a pharmaceutically acceptable carrier. Any reference to a composition of the disclosure as “comprising” something, is also a reference to the same composition as “consisting of” that something, and also a reference to the same composition as “consisting essentially of” that something, even if not explicitly disclosed or enumerated herein.

[0201] Some examples of materials which may serve as pharmaceutically-acceptable carriers include: (1) sugars, such as lactose, glucose and sucrose; (2) starches, such as corn starch and potato starch; (3) cellulose, and its derivatives, such as sodium carboxymethyl cellulose, methylcellulose, ethyl cellulose, microcrystalline cellulose and cellulose acetate; (4) powdered tragacanth; (5) malt; (6) gelatin; (7) lubricating agents, such as magnesium stearate, sodium lauryl sulfate and talc; (8) excipients, such as cocoa butter and suppository waxes; (9) oils, such as peanut oil, cottonseed oil, safflower oil, sesame oil, olive oil, corn oil and soybean oil; (10) glycols, such as propylene glycol; (11) polyols, such as glycerin, sorbitol, mannitol and polyethylene glycol (PEG); (12) esters, such as ethyl oleate and ethyl laurate; (13) agar; (14) buffering agents, such as magnesium hydroxide and aluminum hydroxide; (15) alginic acid; (16) pyrogen-free water; (17) isotonic saline; (18) Ringer's solution; (19) ethyl alcohol; (20) pH buffered solutions; (21) polyesters, polycarbonates and/or polyanhydrides; (22) bulking agents, such as polypeptides and amino acids (23) serum component, such as serum albumin, HDL and LDL; (22) C2-C12 alcohols, such as ethanol; and (23) other non-toxic compatible substances employed in pharmaceutical formulations. Wetting agents, coloring agents, release agents, coating agents, sweetening agents, flavoring agents, perfuming agents, preservative and antioxidants can also be present in the formulation. The terms such as “excipient”, “carrier”, “pharmaceutically acceptable carrier” or the like are used interchangeably herein.

### Kits

[0202] The compositions of the present disclosure may be assembled into kits. In some embodiments, the kit comprises the cells (iPSC and/or cardiomyocytes) of the disclosure. In some embodiments, the kits, instead of the cells or in addition to the cells, comprise nucleic acid vectors for the expression of a prime editor. In other embodiments, the kit further comprises appropriate guide nucleotide sequences (e.g., PERNAs and second-site gRNAs) or nucleic acid vectors for the expression of such guide nucleotide sequences, to target the Cas9 protein or prime editor to the desired target sequence. In some embodiments, the kit described herein may include one or more containers housing components for performing the methods described herein and optionally instructions for use. Any of the kit described herein may further comprise components needed for performing the assay methods. In some embodiments, each component of the kits, where applicable, may be provided in liquid form (e.g., in solution) or in solid form, (e.g., a dry powder). In certain embodiments, some of the components may be reconstitutable or otherwise processible (e.g., to an active form), for example, by the addition of a suitable solvent or other species (for example, water), which may or may not be provided with the kit. In some embodiments, the kits may optionally include instructions and/or promotion for use of the components provided. As used herein, “instructions” may define a component of instruction and/or promotion, and typically involve written instructions on or associated with packaging of the disclosure. Instructions also may include any oral or electronic instructions provided in any manner such that a user will clearly recognize that the instructions are to be associated with the kit, for example, audiovisual (e.g., videotape, DVD, etc.), Internet, and/or web-based communications, etc. The written instructions may be in a form prescribed by a governmental agency regulating the manufacture, use, or sale of pharmaceuticals or biological products, which can also reflect approval by the agency of manufacture, use or sale for animal administration. As used herein, “promoted” includes all methods of doing business including methods of education, hospital and other clinical instruction, scientific inquiry, drug discovery or development, academic research, pharmaceutical industry activity including pharmaceutical sales, and any advertising or other promotional activity including written, oral and electronic communication of any form, associated with the disclosure. In some embodiments, the kits may include other components depending on the specific application, as described herein. In some embodiments, the kits may contain any one or more of the components described herein in one or more containers. In some embodiments, the components may be prepared sterilely, packaged in a syringe and shipped refrigerated. Alternatively, it may be housed in a vial or other container for storage. A second container may have other components prepared sterilely. In some embodiments, the kits may include the active agents premixed and shipped in a vial, tube, or other container. The kits may have a variety of forms, such as a blister pouch, a shrink-wrapped pouch, a vacuum sealable pouch, a sealable thermoformed tray, or a similar pouch or tray form, with the accessories loosely packed within the pouch, one or more tubes, containers, a box or a bag. The kits may be sterilized after the accessories are added, thereby allowing the individual accessories in the container to be otherwise unwrapped. In some embodiments, the kits may be sterilized using any appropriate sterilization techniques, such as radiation sterilization, heat sterilization, or other sterilization methods known in the art. In some embodiments, the kits may also include other components, depending on the specific application, for example, containers, cell media, salts, buffers, reagents, syringes, needles, a fabric, such as gauze, for applying or removing a disinfecting agent, disposable gloves, a support for the agents prior to administration, etc. In some embodiments, the disclosure provides kits comprising a nucleic acid construct comprising a nucleotide sequence encoding the various components of the prime editing system utilized in the methods and compositions described herein (e.g., including, but not limited to, the napDNAbps, reverse transcriptases, polymerases, fusion proteins (e.g., comprising napDNAbps and reverse transcriptases (or more broadly, polymerases), extended guide RNAs, and complexes comprising fusion proteins and extended guide RNAs, as well as accessory elements, such as second strand nicking components (e.g., second strand nicking gRNA) and 5′ endogenous DNA flap removal endonucleases for helping to drive the prime editing process towards the edited product formation). In some embodiments, the nucleotide sequence(s) comprises a heterologous promoter (or more than a single promoter) that drives expression of the prime editing system components. Other embodiments of this disclosure provide kits comprising one or more nucleic acid constructs encoding the various components of the prime editing systems utilized in the methods and compositions described herein, e.g., the comprising a nucleotide sequence encoding the components of the gene editing (e.g., prime editing) system capable of modifying a target DNA sequence.

### Examples for Characterization of the Predict Platform

[0203] The PREDICT PLATFORM comprises a combination of iPSC and iPSC-derived cardiomyocytes genetically modified to carry cardiac disease-related gene mutations, which may be used for any model of applying such cells to study gene mutation effects on cardiomyocytes and drug-related cardiotoxicity. It also comprises a combination of iPSC and iPSC-derived cardiomyocytes modified to carry genetic engineering alterations in the expression of one or more genes, which may be used for any model of applying such cells to study gene expression effects on cardiomyocytes and drug-related cardiotoxicity.

### Example 1: Bioinformatic Selection of SNPS

[0204] Public databases were searched for variations in KCHN2 gene. SNPs were ranked based on Clin Var classification into known drug interaction, pathogenic and uncertain. SNPs were then ranked based on frequency. Highest frequency SNPs were selected for experimental validation.

### Predicting the Pathogenicity of KCNH-2 SNPs of Unknown Significance.

[0205] Biochemical logic, as used by a domain expert, may predict the pathogenicity of SNPs with reasonable accuracy for clear-cut cases. For example, a nonsynonymous mutation may introduce a helix-breaking substitution (i.e., Pro or Gly) in an alpha helix or insert a sterically bulky side chain (e.g., Trp) into the channel pore that would block the flow of ions—both SNPs would be predicted to disrupt channel function. Conversely, a SNP that occurs in a highly variable (low conservation) position that resides on the surface of the protein would likely be well tolerated and have negligible effects on function. However, many SNPs in which biophysical modeling and analysis suggest subtle effects are the most challenging cases to predict. The inventors developed a new method for discovering and characterizing mutations in various genes that may be associated with cardiac diseases. These methods serve to screen large libraries of mutants for mutations that lead to cardiomyocyte toxicity. They also serve for drug screening.

[0206] In this example, the inventors introduced a known SNP into iPSC via prime editing and studied its effect in iPSC-derived cardiomyocytes. They selected V476I—a SNP that may be associated with cardiac diseases. The V476I SNP appeared in the FAMILION® long QT syndrome genetic test as described by Kapplinger et al., Heart rhythm. 6:1297-1303, 2009. This Retrospective analysis of the first 2,500 cases (1,515 female patients, average age at testing 23 17 years, range 0 to 90 years) scanned for mutations in 5 of the LQTS-susceptibility genes also referenced in Duzkale et al, Clinical genetics. 84:453-463, 2013 and Ware et al., Human mutation. 33:1188-1191, 2012 and documented in ClinVar https://www.ncbi.nlm.nih.gov/clinvar/RCV000057908/. The inventors applied proprietary machine learning (ML) artificial intelligence to multiple data sets, and the review of the ML training data reveals no notable observations about the significance (disease relatedness) of this mutation. Specifically, V476I was found to have i) moderate centrality (network) scores, ii) low conservation (0.2) so this position should tolerate substitutions, iii) epistatic score (−4.58) of borderline significance, iv) no involvement in subunit interactions, pore, etc. The inventors' structural analysis reveals that V476I participates as a central “packing” residue for helix-loop-helix fold, contacts pathogenic residues (407 and 407) identified in ClinVar (FIG. 1B). Therefore, it is possible that the knock on effect of V476I may impact the kchn-2 subunit interface via residue interaction network effects. From prior computational work, V476I was predicted to be pathogenic mutation by SNP&Go5 and KvSNP6 algorithms.

### Example 2: Design and Cloning of Prime Editing Constructs

[0207] A list of SNP IDs including V476I were inputted into an online tool (pegIT https://pegit.giehmlab.dk/) for design of prime editing pegRNAs, consisting of 3 pairs of oligos for each pegRNA: spacer, extension, and scaffold oligos. DNA oligos were ordered from IDT and annealed in house. Only the scaffold oligo was ordered phosphorylated at 5′ end. Prime editing plasmids pCMV-PE2-P2A-GFP and pU6-pegRNA-GG-acceptor were gifts from David Liu (AddGene #132776, #132777, and/or #132775). Cloning of pegRNAs was performed as previously described (Anzalone et al., 2019). Briefly, pU6-pegRNA-GG-acceptor was digested with BsaI to generate an open backbone for cloning. Backbone fragment was purified from a 2% agarose gel. A ligation reaction was performed with the 3 oligos and digested pU6-pegRNA-GG-acceptor backbone, which was subsequently transformed into E. coli. Resulting plasmids sequences were confirmed using Sanger sequencing (primer 5′-GAGGGCCTATTTCCCATGATT-3′). The components of the pegRNA for introduction of the V476I mutation are the mRNAs coded by the following DNA sequences:

CTCCTCGTTGGCATTGAcGTGTTTTAGAGCTAGAAATAGCAAGTTAAAATAAGGCTAGT
CCGTTATCAACTTGAAAAAGTGGCACCGAGTCGGTGCGCACCACCTACaTCAATGCCAA
CGA
Spacer-pegRNA backbone-RT template-PBS
CTCCTCGTTGGCATTGAcGT-Spacer
GTTTTAGAGCTAGAAATAGCAAGTTAAAATAAGGCTAGTCCGTTATCAACTTGAAAAAG
TGGCACCGAGTCGGTGC-pegRNA backbone
GCACCACCTACa-RT Template
TCAATGCCAACGA-PBS

[0208] Other pegRNAs are those coded by the DNA sequences referred to in FIG. 1 are as follows (ard correspond to SEQ ID Nos 1100-1113 in order of appearance.:

rs1805123 VCV000200480 132777_K897M
TTCCGCAGGCGCACGGACAaGTTTTAGAGCTAGAAATAGCAAGTTAAAATAAGG
CTAGTCCGTTATCAACTTGAAAAAGTGGCACCGAGTCGGTGCTCCCCCGCCTCACCCaTG
TCCGTGCGCCTGCGGAAGGA
rs12720441 VCV000014433 132777_R784W
GCAGGATCTCGATGGAGCCCGTTTTAGAGCTAGAAATAGCAAGTTAAAATAAGG
CTAGTCCGTTATCAACTTGAAAAAGTGGCACCGAGTCGGTGCACTTCATCTCCtGGGGCT
CCATCGAGATC
rs36210421 VCV000628410 132777_R1047H
CTCACCTGTTGAGCTGGcGCGTTTTAGAGCTAGAAATAGCAAGTTAAAATAAGGC
TAGTCCGTTATCAACTTGAAAAAGTGGCACCGAGTCGGTGCGCCCTCCAGCaCCAGCTC
AACAGGT
rs138776684 VCV000067163 132777_P347S
TGGTGGGCGAAGCCAAGAAGGTTTTAGAGCTAGAAATAGCAAGTTAAAATAAGG
CTAGTCCGTTATCAACTTGAAAAAGTGGCACCGAGTCGGTGCTCAAGGGCGACtCCTTCT
TGGCTTCGCCCACCAGT
rs199472944 VCV000029777 132777_A614V
CATCAAGGACAAGTATGTGAGTTTTAGAGCTAGAAATAGCAAGTTAAAATAAGG
CTAGTCCGTTATCAACTTGAAAAAGTGGCACCGAGTCGGTGCGAAGTAGAGCaCCGTCA
CATACTTGTCCTTG
rs199472959 VCV000067320 132777_S631A
ATCTTCTCTGAGTTGGTGTTGTTTTAGAGCTAGAAATAGCAAGTTAAAATAAGGC
TAGTCCGTTATCAACTTGAAAAAGTGGCACCGAGTCGGTGCTCGGCAACGTCgCTCCCA
ACACCAACTCAGAGA
rs104894021 VCV000014437 132777_N588K
GTTTGCCTATCTGGTCGCCCGTTTTAGAGCTAGAAATAGCAAGTTAAAATAAGGC
TAGTCCGTTATCAACTTGAAAAAGTGGCACCGAGTCGGTGCGGCTGCACAAaCTGGGCG
ACCAGATAGGCA
rs199472918 VCV000067225 132777_L552S
CCAGTGCGCGATGAGCGCAAGTTTTAGAGCTAGAAATAGCAAGTTAAAATAAGG
CTAGTCCGTTATCAACTTGAAAAAGTGGCACCGAGTCGGTGCGTGCTGTTCTcGCTCATG
TGCACCTTTGCGCTCATCGCGCACTGGCTA
rs199473428 VCV000067261 132777_G584S
CCACACATGGACTCACGCATGTTTTAGAGCTAGAAATAGCAAGTTAAAATAAGG
CTAGTCCGTTATCAACTTGAAAAAGTGGCACCGAGTCGGTGCTGCAGCCAGCtGATGCG
TGAGTCCATGT
rs121912510 VCV000014432 132777_S818L
CTGAACCTGTATGCAAGGCCGTTTTAGAGCTAGAAATAGCAAGTTAAAATAAGG
CTAGTCCGTTATCAACTTGAAAAAGTGGCACCGAGTCGGTGCATCCCCGTTCaACTTGCC
AGGCCTTGCATACAGGT
rs199473538 VCV000067402 132777_R823W
CAAGTCGAACGGGGATGTGcGTTTTAGAGCTAGAAATAGCAAGTTAAAATAAGG
CTAGTCCGTTATCAACTTGAAAAAGTGGCACCGAGTCGGTGCGTGAGGGCCCaCACATC
CCCGTTCGACT
rs150817714 VCV000067512 132777_A190T
GTCCACCACCACGGCCCCCGGTTTTAGAGCTAGAAATAGCAAGTTAAAATAAGG
CTAGTCCGTTATCAACTTGAAAAAGTGGCACCGAGTCGGTGCGCGGCGCGGGCaCCCCG
GGGGCCGTGGTGGTGGACGT
rs199473669 VCV000067428 132777_G903R
CCCACAGACACGGAGCAGCCGTTTTAGAGCTAGAAATAGCAAGTTAAAATAAGG
CTAGTCCGTTATCAACTTGAAAAAGTGGCACCGAGTCGGTGCGACACCTCCCtTGGCTGC
TCCGTGTCTGT
rs199472908 VCV000067200 PE2_V476I
CTCCTCGTTGGCATTGAcGTGTTTTAGAGCTAGAAATAGCAAGTTAAAATAAGGC
TAGTCCGTTATCAACTTGAAAAAGTGGCACCGAGTCGGTGCGCACCACCTACaTCAATG
CCAACGA

[0209] Barcodes may be inserted into the pegRNA expression vector by restriction fragment cloning of small oligo nucleotides containing a unique 8-bp DNA sequence that differs from other sequences by at least 2 bases flanked by restriction sites compatible with the acceptor expression vector. Sequencing of expression cassette allows for the identification of pegRNA. Another method is to insert the U6-pegRNA expression cassette downstream from a Polymerase II promoter (such as CMV, EF1a, UBC) and upstream of a poly-A sequence. Flanking the U6-pegRNA expression cassette in this manner in lentiviral expression vectors leads to expression of the pegRNA from a Pol II promoter which allows identification of the respective pegRNA via RNA sequencing using standard poly A capture. In this Example, the pegRNA is its own barcode.

### Example 3: hiPSC Culture

[0210] Human induced pluripotent stem cells (hiPSC) were obtained from a commercial source and/or generated via reprogramming of PMBCs from a healthy donor using non-integrative methods (Dowey et al., 2012). hiPSC cultures were cultured in matrigel (Corning) coated plates using mTeSR plus (STEMCELL) and maintained in a humidified incubator set at 5% CO2 and ambient O₂ tension. Colonies were passaged using Accutase every 4-5 days. ROCK inhibitor (Y-27632) was added to hiPSC cultures for the first 24h post-passaging.

### Example 4: Transfections of HIPSC

[0211] For the V476I mutant, hiPSC transfection was performed on an Amaxa Nucleofector platform, using the P3 solution and program CB150. For the remaining mutants, DNA plasmid transfection was performed via electroporation using GenePulser xCell 0.2 mm cuvettes. Briefly, 100,000 cells were collected in 100 uL Ingenio electroporation solution (Mirus Bio) and 2 ug of total DNA was added (1.5 ug of plasmid #132776 plus 0.5 ug of plasmid #132777). Cell suspension with DNA was added to electroporation cuvettes. Electroporation protocol consisted of a square wave of 160 V, 950 uF, 20 ms. Transfection efficiency was estimated via electroporation of a EGFP expressing plasmid, generating ˜30% transfection efficiency.

### Example 5: Isolation of Prime-Edited HIPSC Clones

[0212] For V476I mutant (generated using PE2 plasmid #132775), clones were selected by plating of pooled (unsorted) transfected cells into 10 cm dishes at very low cell density (5,000 cells per dish). Colonies formed after 1-2 weeks were collected and clonally expanded for sequencing. For other mutants, generated using PE2 plasmid #132776, transfected hiPSC will become GFP fluorescent. Cells are FACS sorted ˜5 days post-transfection to generate a pool of transfected cells. Clone isolation is performed by limiting dilution into 96 well plates (˜0.7 cell/well). Clones are expanded and DNA extracted for sequencing.

### Example 6: Differentiation of HIPSC into Cardiomyocytes

[0213] The process of hiPSC differentiation into cardiomyocytes that was used is based on previously published protocols from Allen Institute by an (Sop_for_cardiomyocyte_differentiation_methods_v1.2_200211.Pdf, n.d.), followed enrichment step based on another published protocol (Cyganek et al., 2018), with modifications.

Protocol for Differentiation of hiPSC into Cardiomyocytes (CM)

| Day | Differentiation steps |
|---|---|
| D −3 | hiPSC maintained in Matrigel/mTeSR plus are allowed to achieve confluence of ~85% before |
| | passaging. |
| | 125,000 cells are seeded into each well of 6-well Matrigel coated plates using mTeSR supplemented |
| | with 10 uM of ROCK inhibitor (Y27632) |
| D −2 | Media change to mTeSR plus without ROCK inhibitor |
| D −1 | Media change to fresh mTeSR plus |
| D 0 | Start of differentiation protocol |
| | Media is changed to RPMI 1640 (Gibco, 11875093) supplemented with 1X B27 without insulin |
| | (Gibco, #1895601) and 7.5 uM of Wnt inhibitor CHIR99021 |
| D 2 | Media is changed to RPMI 1640 (Gibco, 11875093) supplemented with 1X B27 without insulin |
| | (Gibco, #1895601) and 7.5 uM IWP2 (Tocris, #13122) |
| D 4 | Media is changed to RPMI 1640 (Gibco, 11875093) supplemented with 1X B27 without insulin |
| | (Gibco, #1895601) |
| D 6 | Media is changed to RPMI 1640 (Gibco, 11875093) supplemented with 1X B27 PLUS (Gibco, # |
| | A3582801) |
| D 8-D 11 | Media is changed every 3 days until start of enrichment |
| D 12 | Start of enrichment |
| | Media is changed to RPMI 1640 without glucose (Gibco, 11879020) supplemented with 4 mM |
| | lactate, 0.2 mg/ml L-ascorbic acid 2-phosphate, and 0.5 mg/ml human recombinant albumin. CM |
| | are kept in enrichment media for 3-4 days |
| D 16 | Media is changed back to RPMI 1640 supplemented with B27 PLUS and cells allowed to recover 1- |
| | 2 days |
| D 17-18 | Enriched CM are harvested and seeded onto microscopy-grade flat bottom Matrigel-coated 96-well |
| | plates at 80,000 cells/well. |
| D 25-D 30 | After ~7 days the CM are ready for functional characterization |

### Example 7: Testing of Proarrhythmic Drugs in IPSC-Derived Cardiomyocytes

[0214] hiPSC-derived cardiomyocytes are incubated with an intracellular calcium-sensing fluorescent dye (Early Tox Cardiotoxicity kit, Molecular Devices, #R8211) for 2 h at 37° C. before addition of drugs for testing. Fluctuations of dye fluorescence correlate directly with intracellular calcium level fluctuations that happen during cardiomyocyte beating. This assay allows to collect data related to beating rate, and peak amplitude and width, among other parameters, in a high-throughput manner. An initial reading of calcium influx is performed to determine the basal level of cardiomyocyte activity. After basal reading, drugs or vehicle are added and incubated for 1.5-2h before a second reading is performed. Fluorescence intensity reading can be performed using plate readers or high-content microscopy. Using a plate reader, we collect a 30 sec reading with 300 frames per read. Using high-content microscopy, a stream of 600 images is collected from 30 sec. Fluorescence intensity data is analyzed with software PeakPro to determine peak characteristics. Peak frequency is determined and utilized as beating per minute (BPM). Alternatively, electrical activity of iPSC-CM can be measured with multielectrode arrays, although at a generally lower throughput.

### Example 8: Immunocytochemistry

[0215] hiPSC-derived cardiomyocytes were fixed with 4% formaldehyde for 10 min and washed 3× with DPBS. They were permeabilized with 0.1% Triton-X in PBS and incubated with primary antibody (Troponin T, Novus Biologicals #NBP27543) overnight. Cells were washed 3X, incubated with secondary antibodies for 1-2h, and washed twice before short incubation with whole cell stain CellMask Blue (ThermoFisher, #H32720). Cells were washed once more and covered in DPBS. ImageXpress Micro was used to acquire images from 12 wells for each genotype iPSC-CM.

### Example 9: Prime Editing

### Design, Cloning and Sanger Sequencing of pegRNA Constructs

[0216] A total of 14 SNPs were selected for CRISPR prime editing into hiPSC. FIG. 1A. gRNA sequences and prime editing template fragments were synthesized, annealed in house, and cloned into a digested backbone containing the gRNA scaffold. Resulting plasmids were Sanger-sequenced. FIG. 2.

### Example 10: Prime Editing

### Transfection Optimization

[0217] Electroporation parameters for delivery of plasmid DNA was performed in hIPSC cells using a CMV-EGFP plasmid. Briefly, 2 ug total of DNA was added into 100,000 cells resuspended in Ingenio electroporation solution and transferred to 0.2 cm GenePulser (BioRad) cuvettes. Eight distinct electroporation protocols were tested, including both square wave and exponential decay curve protocols. Transfection efficiency (GFP positive cells) and toxicity (propidium iodide positive cells) were measured via microscopy. The protocol with highest percentage of live cells positive for EGFP was used for follow-up experiments and further validation. FIG. 3.

### Example 11: Prime Editing

### Differentiation of hiPSC into Cardiomyocytes

[0218] Wild-type and V476I hiPSC clonal lines were successfully differentiated into cardiomyocytes using a protocol that manipulates the Wnt pathway. See Example 6. Differentiation efficiency was measured via flow cytometry, using an FITC-tagged antibody against troponin T (cTnT), a bona-fide cardiomyocyte marker. The protocol for generation of hiPSC-CM was optimized by titrating the starting cell density and the concentration of the Wnt pathway modulators. After optimization, CM populations that are over >80% cTnT positive were routinely obtained. Expression of cTnT was confirmed using fluorescence microscopy. FIG. 4 and FIG. 5

### Example 12: Functional Characterization of HIPSC-Cm

[0219] Unedited and V476I hiPSC-CM were treated with pro-(isoproterenol and propranolol) and anti-arrhythmic (sotalol) drugs to observe their ability to replicate cardiac muscle physiology. The observed basal rate of beats per minute (BPM) was similar to previously published data for hiPSC-derived CM (Bedut et al., 2016). FIG. 6.

### Example 13: Characterization of Drug Responses in Wild-Type and V476I Mutant Cardiomyocytes

[0220] hiPSC-CM were treated with a fluorescent calcium-sensing probe for 2h before addition of drugs. The cells were then incubated with drugs for 1.5-2h. A plate reader (SpectraMax) was used to measure fluctuations in fluorescence for 30 sec. Images were analyzed using PeakPro to generate peak frequency which is a proxy for beats per minute. Both wild-type and V476I mutant show expected responses to pro-arrhythmic drugs, demonstrating functional responsiveness of this cellular model. FIG. 7.

### Example 14: Characterization of Additional Variants

[0221] Using the gnomAD browser (Broad Institute) resource, the kcnh-2 variation frequency was examined in the v3.1.2 data set and the Exome Aggregation Consortium (ExAC). For kcnh-2, 555 missense variants with allele frequencies were extracted. Based on this analysis, the most frequent kcnh-2 variants are prioritized as down selection criteria, e.g., allele frequencies equal to or greater than 3.4×10⁻⁵ encompasses 99 nonsynonymous SNPs. The various variants are engineered into the cells of the disclosure. The resulting cells are analyzed for evidence of cardiotoxicity according to any method, including those of the invention. The resulting cells are also used to test the toxicity of any drug. Variants that are pathogenic, of uncertain significance, benign, etc., are identified. Drugs are characterized as causing cardiotoxicity (survival, arrythmias, etc.) and others as not being toxic. The results are used in diagnostic and prognostic methods.

### Example 15: Characterization of Additional Genes

[0222] Databases such as ClinVar, dbSNP, and gnomAD provide a resource for identifying SNPs of interest in any other genes to engineer into iPSC cell lines for drug testing on differentiated cardiomyocytes. Some of the genes are selected from ion channels, ATP-binding cassette (ABC) transporters involved in drug transport (e.g., ABCB1, ABCB4, ABCCI, ABCC2, SLC10A2, SLC28A3, SLC22A7, SLC22A17), Carbonyl reductases in drug metabolism (e.g., CBR3), Hyaluronan synthase 3 involved in oxidative stress response (e.g., HAS3), Hereditary hemochromatosis protein in iron metabolism (e.g., HFE), Retinoic acid receptor gamma and DNA topoisomerases in topoisomerase-induced DNA damage (e.g., RARG, TOP2B), CUGBP Elav-like family member 4 in splicing of sarcomere genes (e.g., CELF4), DNA polymerase gamma in mitochondrial replication (e.g., DPOG2), Chaperones involved in ion channel trafficking (e.g., Hsp70 and Hsp90).

### Example 16: Modulation of KCNH2 Gene Expression by CRISPRI GRNAS

[0223] CRISPRi is the gRNA-directed targeting of nuclease-dead Cas9 (dCas9) fused to a transcriptional repressor (KRAB) to the promoter region on genes of interest (see, e.g., Larson et al., Nature Protocols. 8:2180-2196, 2013). The anchoring of the dCas9-KRAB to the promoter region interferes with the formation and elongation of the transcriptional machinery and/or recruits additional transcriptional repressors to negatively modulate gene expression. By targeting dCas-KRAB to the promoter region of KCNH2, the expression of the hERG channel is modulated to various levels, simulating the effects of naturally occurring KCNH2 SNPs that result in net reduction of hERG channel units on the surface of cardiomyocytes. To perform this, 42 sgRNAs against the promoter region of KCNH2 gene were designed and are being screened for the effects of these gRNAs on a non-cardiomyocyte cellular system that expresses high levels of KCNH2 (SHSY5Y cells) via lentiviral vectors. Successful gRNAs, defined as able to significantly reduce KCNH2 gene expression, as measured by qPCR, by 25%, 50%, 75% and >90% are transduced into human iPSC. These cells are differentiated into cardiomyocytes and tested against a broad panel of drugs to detect signs of arrhythmia events. This system allows one to mimic the (predicted) effect of dozens of uncharacterized SNPs in a reduced size sample manner.

[0224] Table 4 provides examples of gRNA target sequences that are being tested with CRISPRi.

[0225] For convenience, given the large number of Sequence IDs, they can be summarized as follows:

| SEQUENCE ID NO. | DESCRIPTION |
|---|---|
| 1 | mRNA for KCNH2 wild-type |
| 2-1054 | mRNA for KCNH2 carrying each of the |
| | identified SNP mutations |
| 1055-1094 | Target sequences from Table 4 |
| 1095 | Sp. Nuclease dead Cas9 |
| 1096 | gRNA expression vector |
| 1097 | Vector primeCas9-GFP |
| 1098 | pegRNA-GG-acceptor vector |
| 1099 | Prime Cas9-addgene plasmid |
| 1100-1113 | Exemplary pegRNAs for gene editing of |
| | KCNH2 SNPs |
| 1114 | Cas9 sequence for prime editing |
| 1115 | Cas9-RT sequence for prime editing |
| 1116-1155 | gRNA for CRISPRinterference Table 4 |

[0226] All publications, patents, patent applications and other documents cited in this application are hereby incorporated by reference in their entireties for all purposes to the same extent as if each individual publication, patent, patent application or other document were individually indicated to be incorporated by reference for all purposes.

[0227] While various specific embodiments/aspects have been illustrated and described, it will be appreciated that various changes can be made without departing from the spirit and scope of the disclosure.

[0228] Embodiments or descriptions that include “or” between one or more members of a group are considered satisfied if one, more than one, or all of the group members are present in, employed in, or otherwise relevant to a given product or process unless indicated to the contrary or otherwise evident from the context. The invention includes embodiments in which exactly one member of the group is present in, employed in, or otherwise relevant to a given product or process. The invention includes embodiments in which more than one, or all of the group members are present in, employed in, or otherwise relevant to a given product or process. Furthermore, the disclosure encompasses all variations, combinations, and permutations in which one or more limitations, elements, clauses, and descriptive terms from one or more of the listed claims is introduced into another claim. For example, any claim that is dependent on another claim can be modified to include one or more limitations found in any other claims that is dependent on the same base claim. Where elements are presented as lists, e.g., in Markush group format, each subgroup of the elements is also disclosed, and any element(s) can be removed from the group. It should it be understood that, in general, where the invention, or aspects of the invention, is/are referred to as comprising particular elements and/or features, certain embodiments of the disclosure or aspects of the disclosure consist, or consist essentially of, such elements and/or features. For purposes of simplicity, those embodiments have not been specifically set forth in haec verba herein. It is also noted that the terms “comprising” and “containing” are intended to be open and permits the inclusion of additional elements or steps. Where ranges are given, endpoints are included. Furthermore, unless otherwise indicated or otherwise evident from the context and understanding of one of ordinary skill in the art, values that are expressed as ranges can assume any specific value or sub-range within the stated ranges in different embodiments of the invention, to the tenth of the unit of the lower limit of the range, unless the context clearly dictates otherwise.

[0229] This application refers to various issued patents, published patent applications, journal articles, and other publications, all of which are incorporated herein by reference. If there is a conflict between any of the incorporated references and the instant specification, the specification shall control. In addition, any particular embodiment of the present invention that falls within the prior art may be explicitly excluded from any one or more of the embodiments. Because such embodiments are deemed to be known to one of ordinary skill in the art, they may be excluded even if the exclusion is not set forth explicitly herein. Any particular embodiment of the invention can be excluded from any embodiment, for any reason, whether or not related to the existence of prior art. Those skilled in the art will recognize or be able to ascertain using no more than routine experimentation many equivalents to the specific embodiments described herein. The scope of the present embodiments described herein is not intended to be limited to the above Description, but rather is as set forth in the appended embodiments. Those of ordinary skill in the art will appreciate that various changes and modifications to this description may be made without departing from the spirit or scope of the present invention, as defined in the embodiments explicitly disclosed above and in the claims.

### REFERENCES

[0230] Anzalone, A. V., Randolph, P. B., Davis, J. R., Sousa, A. A., Koblan, L. W., Levy, J. M., Chen, P. J., Wilson, C., Newby, G. A., Raguram, A., & Liu, D. R. (2019). Search-and-replace genome editing without double-strand breaks or donor DNA. Nature, 576 (7785), 149-157. https://doi.org/10.1038/s41586-019-1711-4
[0231] Bedut, S., Seminatore-Nole, C., Lamamy, V., Caignard, S., Boutin, J. A., Nosjean, O., Stephan, J.-P., & Coge, F. (2016). High-throughput drug profiling with voltage- and calcium-sensitive fluorescent probes in human iPSC-derived cardiomyocytes. American Journal of Physiology-Heart and Circulatory Physiology, 311 (1), H44-H53. https://doi.org/10.1152/ajpheart.00793.2015
[0232] Cyganek, L., Tiburcy, M., Sekeres, K., Gerstenberg, K., Bohnenberger, H., Lenz, C., Henze, S., Stauske, M., Salinas, G., Zimmermann, W.-H., Hasenfuss, G., & Guan, K. (2018). Deep phenotyping of human induced pluripotent stem cell-derived atrial and ventricular cardiomyocytes. JCI Insight, 3 (12), e99941. https://doi.org/10.1172/jci.insight.99941.
[0233] Dowey, S. N., Huang, X., Chou, B.-K., Ye, Z., & Cheng, L. (2012). Generation of integration-free human induced pluripotent stem cells from postnatal blood mononuclear cells by plasmid vector expression. Nature Protocols, 7 (11), 2013-2021. doi.org/10.1038/nprot.2012.121.
[0234] Sop_for_cardiomyocyte_differentiation_methods_v1.2_200211.pdf. (n.d.). Retrieved November www.allencell.org/uploads/8/1/9/9/81996008/sop_for_cardiomyocyte_differention_methods_v1.2_200211.pdf.
[0235] Lian, X., Zhang, J., Azarin, S. M., Zhu, K., Hazeltine, L. B., Bao, X., Hsiao, C., Kamp, T. J. & Palecek, S. P. Directed cardiomyocyte differentiation from human pluripotent stem cells by modulating Wnt/B-catenin signaling under fully defined conditions. Nature Protocols 8, 162-175 (2013).
[0236] Sharma, A., Li, G., Rajarajan, K., Hamaguchi, R., Burridge, P. W. & Wu, S. M. Derivation of highly purified cardiomyocytes from human induced pluripotent stem cells using small molecule-modulated differentiation and subsequent glucose starvation. Journal of visualized experiments: JoVE 18; (97): 52628. doi: 10.3791/52628 (2015).
[0237] Cyganek, L., Tiburcy, M., Sekeres, K., Gerstenberg, K., Bohnenberger, H., Lenz, C., Henze, S., Stauske, M., Salinas, G., Zimmermann, W. H., Hasenfuss, G. & Guan, K. Deep phenotyping of human induced pluripotent stem cell-derived atrial and ventricular cardiomyocytes. JCI insight 3 (12): e99941. doi: 10.1172/jci.insight.99941 (2018).
[0238] Kapplinger, J. D., Tester, D. J., Salisbury, B. A., Carr, J. L., Harris-Kerr, C., Pollevick, G. D., Wilde, A. A. & Ackerman, M. J. Spectrum and prevalence of mutations from the first 2,500 consecutive unrelated patients referred for the FAMILION long QT syndrome genetic test. Heart rhythm 6, 1297-1303 (2009).
[0239] Kapplinger, J. D., Tester, D. J., Salisbury, B. A., Carr, J. L., Harris-Kerr, C., Pollevick, G. D., Wilde, A. A. M. & Ackerman, M. J. Spectrum and prevalence of mutations from the first 2,500 consecutive unrelated patients referred for the FAMILION (R) long QT syndrome genetic test. Heart Rhythm 6, 1297-1303 (2009).
[0240] 6. Duzkale, H., Shen, J., Mclaughlin, H., Alfares, A., Kelly, M. A., Pugh, T. J., Funke, B. H., Rehm, H. L. & Lebo, M. S. A systematic approach to assessing the clinical significance of genetic variants. Clinical genetics 84, 453-463 (2013).
[0241] 7. Ware, J. S., Walsh, R., Cunningham, F., Birney, E. & Cook, S. A. Paralogous annotation of disease-causing variants in long QT syndrome genes. Human mutation 33, 1188-1191 (2012).
[0242] 8. Larson, M. H., Gilbert, L. A., Wang, X., Lim, W. A., Weissman, J. S. & Qi, L. S. CRISPR interference (CRISPRi) for sequence-specific control of gene expression. Nature Protocols 8, 2180-2196 (2013).

TABLE 1
ClinVar SNPs Identified as Potentially Relevant to Cardiac Disease, which may be examples of SNPs to test with the methods of the disclosure (PREDICT PLATFORM).

| | Name | | | | | |
|---|---|---|---|---|---|---|
| | kenh2_protein_coding Human | | | | | |
| SEQ | putative potassium channel | SEQ | | | | |
| ID | subunit (h-erg) mRNA, | ID | Name | Accession | Condition(s) | Clinical significance (LR) |
| 1 | complete cds; WILD TYPE | 1 | | | | |
| 2 | SNP:c.1001C > T (p.Pro334Leu) | 605 | SNP:c.2690A > C (p.Lys897Thr) | VCV000067427 | Not Prov.\|Long QT Syn.\|Long QT Syn. 2\|Arr [symbol] | Benign(LR: Aug. 19, 2021) |
| 3 | SNP:c.1003C > T (p.Gln335Ter) | 779 | SNP:c.3133C > T (p.Leu1045Phe) | VCV000067473 | Arrhythmia\|Congenital long QT Syn.\|Arrhyth [symbol] | Benign(LR: Jul. 27, 2020) |
| 4 | SNP:c.1009A > G (p.Thr337Ala) | 152 | SNP:c.1598T > G (p.Val533Gly) | VCV000191574 | not spec. | Benign(LR: Jun. 24, 2013) |
| 5 | SNP:c.1010C > G (p.Thr337Ser) | 816 | SNP:c.326T > G (p.Leu109Arg) | VCV000067484 | Not Prov.\|Long QT Syn. 2 | Benign(LR: May 28, 2019) |
| 6 | SNP:c.1017C > G (p.Asn339Lys) | 576 | SNP:c.2617G > A (p.Gly873Ser) | VCV000067419 | Brugada Syn.\|Not Prov.\|Long QT Syn.\|not sp [symbol] | Benign/Likely benign(LR: Dec. 2, 2020) |
| 7 | SNP:c.1025A > T (p.Asp342Val) | 918 | SNP:c.542G > A (p.Arg181Gln) | VCV000067510 | Long QT Syn.\|Not Prov.\|not spec.\|Cardiovas. [symbol] | Benign/Likely benign(LR: Nov. 21, 2020) |
| 8 | SNP:c.1036G > A (p.Asp346Asn) | 700 | SNP:c.2900C > T (p.Pro967Leu) | VCV000067451 | Arrhythmia\|Long QT Syn.\|Not Prov.\|Cardiov. [symbol] | Benign/Likely benign(LR: Nov. 4, 2020) |
| 9 | SNP:c.1039C > T (p.Pro347Ser) | 361 | SNP:c.1918T > C (p.Phe640Leu) | VCV000200751 | Long QT Syn. 2\|Not Prov. | Conf. Interp. of Patho.(LR: Apr. 25, 2018) |
| 10 | SNP:c.1043T > A (p.Phe348Tyr) | 1053 | SNP:c.98A > C (p.Asn33Thr) | VCV000067553 | Long QT Syn.\|Not Prov. | Conf. Interp. of Patho.(LR: Apr. 29, 2021) |
| 11 | SNP:c.1052C > T (p.Ser351Leu) | 52 | SNP:c.1262C > T (p.Thr421Met) | VCV000067173 | Not Prov.\|Long QT Syn.\|Congenital long QT [symbol] | Conf. Interp. of Patho.(LR: Apr. 30, 2021) |
| 12 | SNP:c.1054C > T (p.Pro352Ser) | 188 | SNP:c.1684C > T (p.His562Tyr) | VCV000200733 | Not Prov.\|Long QT Syn. | Conf. Interp. of Patho.(LR: Aug. 1, 2019) |
| 13 | SNP:c.1055C > G (p.Pro352Arg) | 220 | SNP:c.1711A > G (p.Ile571 Val) | VCV000067247 | Congenital long QT Syn.\|Not Prov.\|Long QT [symbol] | Conf. Interp. of Patho.(LR: Aug. 11, 2017) |
| 14 | SNP:c.1058C > T (p.Thr353Ile) | 777 | SNP:c.3125T > C (p.Leu1042Pro) | VCV000264155 | Cardiovas. pheno.\|Not Prov. | Conf. Interp. of Patho.(LR: Aug. 19, 2016) |
| 15 | SNP:c.1066C > T (p.Arg356Cys) | 114 | SNP:c.1469C > T (p.Ala490Val) | VCV000862292 | Inborn genetic diseases\|Long QT Syn.\|Long ( [symbol] | Conf. Interp. of Patho.(LR: Aug. 20, 2020) |
| 16 | SNP:c.1067G > A (p.Arg356His) | 741 | SNP:c.301A > G (p.Lys101Glu) | VCV000067462 | Not Prov.\|Congenital long QT Syn.\|Long QT [symbol] | Conf. Interp. of Patho.(LR: Aug. 22, 2020) |
| 17 | SNP:c.1071G > T (p.Glu357Asp) | 149 | SNP:c.1591C > T (p.Arg531Trp) | VCV000067218 | Congenital long QT Syn.\|Not Prov.\|not spec.\| [symbol] | Conf. Interp. of Patho.(LR: Aug. 24, 2021) |
| 18 | SNP:c.1073T > A (p.Ile358Asn) | 395 | SNP:c.1979C > T (p.Ser660Leu) | VCV000067352 | Not Prov.\|Long QT Syn.\|Congenital long QT [symbol] | Conf. Interp. of Patho.(LR: Aug. 30, 2020) |
| 19 | SNP:c.1076T > A (p.Ile359Lys) | 184 | SNP:c.167G > T (p.Arg56Leu) | VCV000200557 | Not Prov.\|Long QT Syn. | Conf. Interp. of Patho.(LR: Dec. 10, 2020) |
| 20 | SNP:c.1081C > T (p.Pro361Ser) | 592 | SNP:c.2660G > A (p.Arg887His) | VCV000067423 | Arrhythmia\|Congenital long QT Syn.\|not spec [symbol] | Conf. Interp. of Patho.(LR: Dec. 11, 2020) |
| 21 | SNP:c.1096C > T (p.Arg366Ter) | 459 | SNP:c.221C > G (p.Thr74Arg) | VCV000067376 | Long QT Syn.\|Congenital long QT Syn.\|Not I [symbol] | Conf. Interp. of Patho.(LR: Dec. 13, 2019) |
| 22 | SNP:c.1097G > A (p.Arg366Gln) | 892 | SNP:c.442C > T (p.Arg148Trp) | VCV000067505 | Cardiovas. pheno.\|not spec.\|Arrhythmia\|Long [symbol] | Conf. Interp. of Patho.(LR: Dec. 2, 2020) |
| 23 | SNP:c.1099A > G (p.Thr367Ala) | 394 | SNP:c.1973A > G (p.Asn658Ser) | VCV000389141 | Not Prov.\|Long QT Syn. | Conf. Interp. of Patho.(LR: Dec. 20, 2016) |
| 24 | SNP:c.1099A > T (p.Thr367Ser) | 578 | SNP:c.2624C > T (p.Thr875Met) | VCV000067420 | Arrhythmia\|not spec.\|Not Prov.\|Long QT Syn [symbol] | Conf. Interp. of Patho.(LR: Dec. 23, 2020) |
| 25 | SNP:c.1126C > G (p.Gln376Glu) | 11 | SNP:c.1052C > T (p.Ser351Leu) | VCV000864050 | Long QT Syn.\|Long QT Syn. 2 | Conf. Interp. of Patho.(LR: Dec. 30, 2019) |
| 26 | SNP:c.1149C > A (p.Asp383Glu) | 855 | SNP:c.3436A > T (p.Thr1146Ser) | VCV000359301 | Short QT Syn. 1\|Long QT Syn. 2\|Arrhythmia [symbol] | Conf. Interp. of Patho.(LR: Dec. 6, 2020) |
| 27 | SNP:c.115T > C (p.Cys39Arg) | 9 | SNP:c.1039C > T (p.Pro347Ser) | VCV000067163 | not spec.\|Cardiovas. pheno.\|Arrhythmia\|Long [symbol] | Conf. Interp. of Patho.(LR: Dec. 7, 2020) |
| 28 | SNP:c.1178C > T (p.Pro393Leu) | 627 | SNP:c.2738C > T (p.Ala913Val) | VCV000014443 | Cardiovas. pheno.\|Congenital long QT Syn.\| [symbol] | Conf. Interp. of Patho.(LR: Dec. 8, 2020) |
| 29 | SNP:c.1180C > T (p.Arg394Cys) | 785 | SNP:c.3140G > T (p.Arg1047Leu) | VCV000036429 | Not Prov.\|Arrhythmia\|none provided\|Torsade [symbol] | Conf. Interp. of Patho.(LR: Dec. 8, 2020) |
| 30 | SNP:c.1181G > A (p.Arg394His) | 716 | SNP:c.2941A > G (p.Ser981Gly) | VCV000067454 | Not Prov.\|Arrhythmia\|not spec.\|Cardiovas. ph [symbol] | Conf. Interp. of Patho.(LR: Feb. 19, 2021) |
| 31 | SNP:c.1189C > T (p.Arg397Cys) | 495 | SNP:c.2350C > T (p.Arg784Trp) | VCV000014433 | Congenital long QT Syn.\|Long QT Syn. 2\|L [symbol] | Conf. Interp. of Patho.(LR: Feb. 22, 2021) |
| 32 | SNP:c.1190G > A (p.Arg397His) | 887 | SNP:c.422C > T (p.Pro141Leu) | VCV000067504 | Hypertrophic cardiomyopathy\|Not Prov.\|Lo [symbol] | Conf. Interp. of Patho.(LR: Feb. 25, 2021) |
| 33 | SNP:c.1193G > A (p.Trp398Ter) | 2 | SNP:c.1001C > T (p.Pro334Leu) | VCV000067161 | Not Prov.\|Congenital long QT Syn.\|Long QT [symbol] | Conf. Interp. of Patho.(LR: Jan. 29, 2019) |
| 34 | SNP:c.1199T > A (p.Ile400Asn) | 283 | SNP:c.1814C > T (p.Pro605Leu) | VCV000067284 | Long QT Syn.\|Congenital long QT Syn.\|Long [symbol] | Conf. Interp. of Patho.(LR: Jul. 11, 2018) |
| 35 | SNP:c.119C > T (p.Ala40Val) | 460 | SNP:c.221C > T (p.Thr74Met) | VCV000067377 | Long QT Syn.\|Not Prov. | Conf. Interp. of Patho.(LR: Jul. 11, 2018) |
| 36 | SNP:c.1205A > G (p.His402Arg) | 153 | SNP:c.1600C > A (p.Arg534Ser) | VCV000200728 | Long QT Syn.\|Not Prov. | Conf. Interp. of Patho.(LR: Jul. 23, 2018) |
| 37 | SNP:c.121G > C (p.Val41Leu) | 594 | SNP:c.2665T > G (p.Leu889Val) | VCV000200475 | Not Prov.\|Long QT Syn.\|Arrhythmia | Conf. Interp. of Patho.(LR: Jul. 29, 2020) |
| 38 | SNP:c.121G > T (p.Val41Phe) | 136 | SNP:c.1525G > A (p.Asp509Asn) | VCV000200354 | Cardiovas. pheno.\|Long QT Syn. 2\|Long QT [symbol] | Conf. Interp. of Patho.(LR: Jul. 3, 2018) |
| 39 | SNP:c.1225G > A (p.Val409Met) | 988 | SNP:c.80G > A (p.Arg27His) | VCV000200540 | Not Prov.\|Long QT Syn. | Conf. Interp. of Patho.(LR: Jun. 29, 2019) |
| 40 | SNP:c.1226T > A (p.Val409Glu) | 730 | SNP:c.299G > A (p.Arg100Gln) | VCV000067460 | Not Prov.\|Long QT Syn.\|Congenital long QT [symbol] | Conf. Interp. of Patho.(LR: Jun. 30, 2020) |
| 41 | SNP:c.1229G > A (p.Trp410Ter) | 276 | SNP:c.1805T > C (p.Leu602Pro) | VCV000234996 | Cardiovas. pheno.\|not spec.\|Not Prov.\|Long [symbol] | Conf. Interp. of Patho.(LR: Jun. 8, 2020) |
| 42 | SNP:c.1229G > C (p.Trp410Ser) | 524 | SNP:c.2417G > A (p.Gly806Glu) | VCV000067398 | Not Prov.\|Congenital long QT Syn.\|Long QT [symbol] | Conf. Interp. of Patho.(LR: Mar. 12, 2021) |
| 43 | SNP:c.122T > C (p.Val41Ala) | 423 | SNP:c.2081G > A (p.Arg694His) | VCV000200410 | Long QT Syn.\|Not Prov. | Conf. Interp. of Patho.(LR: Mar. 14, 2020) |
| 44 | SNP:c.1231G > A (p.Asp411Asn [symbol] | 804 | SNP:c.3203A > G (p.Gln1068Arg) | VCV000067480 | Arrhythmia\|Not Prov.\|Cardiovas. pheno.\|Lon [symbol] | Conf. Interp. of Patho.(LR: Mar. 16, 2021) |
| 45 | SNP:c.1238T > C (p.Leu413Pro) | 310 | SNP:c.1862G > A (p.Ser621Asn) | VCV000067299 | Long QT Syn.\|Primary familial hypertrophic [symbol] | Conf. Interp. of Patho.(LR: Mar. 18, 2020) |
| 46 | SNP:c.1238T > G (p.Leu413Arg) | 677 | SNP:c.2843G > A (p.Arg948His) | VCV000067443 | Long QT Syn.\|Long QT Syn. 2\|not spec.\|Not [symbol] | Conf. Interp. of Patho.(LR: Mar. 18, 2021) |
| 47 | SNP:c.1240A > G (p.Ile414Val) | 469 | SNP:c.2246G > T (p.Gly749Val) | VCV000067378 | Congenital long QT Syn.\|Not Prov.\|not spec [symbol] | Conf. Interp. of Patho.(LR: Mar. 31, 2016) |
| 48 | SNP:c.1259A > G (p.Tyr420Cys) | 604 | SNP:c.2684C > T (p.Thr895Met) | VCV000067426 | Long QT Syn.\|SUDDEN INFANT DEATH & [symbol] | Conf. Interp. of Patho.(LR: May 17, 2020) |
| 49 | SNP:c.125T > A (p.Ile42Asn) | 552 | SNP:c.2536C > T (p.Pro846Ser) | VCV000067409 | Congenital long QT Syn.\|Not Prov.\|Long QT [symbol] | Conf. Interp. of Patho.(LR: May 20, 2019) |
| 50 | SNP:c.125T > C (p.Ile42Thr) | 772 | SNP:c.3112G > A (p.Val1038Met) | VCV000067471 | Not Prov.\|Congenital long QT Syn.\|Arrhythm [symbol] | Conf. Interp. of Patho.(LR: May 28, 2021) |
| 51 | SNP:c.1262C > A (p.Thr421Lys) | 596 | SNP:c.2674C > T (p.Arg892Cys) | VCV000191470 | Long QT Syn.\|Not Prov.\|not spec.\|Arrhythmi [symbol] | Conf. Interp. of Patho.(LR: Nov. 11, 2020) |
| 52 | SNP:c.1262C > T (p.Thr421Met) | 1050 | SNP:c.982C > T (p.Arg328Cys) | VCV000067552 | Arrhythmia\| Long QT Syn.\|Not Prov.\|Long Q [symbol] | Conf. Interp. of Patho.(LR: Nov. 21, 2020) |
| 53 | SNP:c.1264G > A (p.Ala422Thr) | 415 | SNP:c.2053C > T (p.Arg685Cys) | VCV000448974 | none provided\| Long QT Syn.\|Long QT Syn. 2 [symbol] | Conf. Interp. of Patho.(LR: Nov. 25, 2019) |
| 54 | SNP:c.1277C > A (p.Pro426His) | 727 | SNP:c.298C > G (p.Arg100Gly) | VCV000014442 | Congenital long QT Syn.\|Cardiovas. pheno.\| [symbol] | Conf. Interp. of Patho.(LR: Nov. 28, 2017) |
| 55 | SNP:c.1279T > C (p.Tyr427His) | 441 | SNP:c.2131A > G (p.Ile711Val) | VCV000067367 | Long QT Syn.\|Arrhythmia\|Congenital long Q [symbol] | Conf. Interp. of Patho.(LR: Nov. 8, 2019) |
| 56 | SNP:c.127T > G (p.Tyr43Asp) | 926 | SNP:c.568G > A (p.Ala190Thr) | VCV000067512 | Long QT Syn.\|not spec.\|Not Prov.\|Long QT S [symbol] | Conf. Interp. of Patho.(LR: Oct. 14, 2020) |
| 57 | SNP:c.1280A > C (p.Tyr427Ser) | 1031 | SNP:c.934C > T (p.Arg312Cys) | VCV000067547 | Long QT Syn. 2\|Short QT Syn. 1\|Congenital [symbol] | Conf. Interp. of Patho.(LR: Oct. 14, 2020) |
| 58 | SNP:c.1280A > G (p.Tyr427Cys) | 535 | SNP:c.2468G > A (p.Arg823Gln) | VCV000418246 | Arrhythmia Long QT Syn.\|Not Prov. [symbol] | Conf. Interp. of Patho.(LR: Oct. 15, 2020) |
| 59 | SNP:c.1282T > C (p.Ser428Pro) | 718 | SNP:c.2948C > T (p.Thr983Ile) | VCV000067455 | Long QT Syn.\|Long QT Syn. 2\|not spec.\|Not [symbol] | Conf. Interp. of Patho.(LR: Oct. 15, 2020) |
| 60 | SNP:c.1283C > T (p.Ser428Leu) | 247 | SNP:c.1750G > T (p.Gly584Cys) | VCV000067263 | Congenital long QT Syn.\|Not Prov.\|Long QT [symbol] | Conf. Interp. of Patho.(LR: Oct. 17, 2018) |
| 61 | SNP:c.1285G > C (p.Ala429Pro) | 506 | SNP:c.2371C > T (p.Arg791Trp) | VCV000067391 | Long QT Syn.\|Not Prov.\|Brugada Syn. 1\|Carc [symbol] | Conf. Interp. of Patho.(LR: Oct. 23, 2020) |
| 62 | SNP:c.128A > G (p.Tyr43Cys) | 80 | SNP:c.1352C > T (p.Pro451Leu) | VCV000067190 | Congenital long QT Syn.\|Long QT Syn.\|Long [symbol] | Conf. Interp. of Patho.(LR: Oct. 25, 2020) |
| 63 | SNP:c.1291T > C (p.Phe431Leu) | 77 | SNP:c.1342G > T (p.Ala448Ser) | VCV000448973 | Long QT Syn. 2\|Long QT Syn.\|Arrhythmia [symbol] | Conf. Interp. of Patho.(LR: Oct. 26, 2020) |
| 64 | SNP:c.1293C > A (p.Phe431Leu) | 501 | SNP:c.2360T > A (p.Ile787Asn) | VCV000200428 | Long QT Syn.\|Not Prov. [symbol] | Conf. Interp. of Patho.(LR: Oct. 3, 2019) |
| 65 | SNP:c.1307C > T (p.Thr436Met) | 684 | SNP:c.2860C > T (p.Arg954Cys) | VCV000067444 | SUDDEN INFANT DEATH Syn.\|Cardiovas [symbol] | Conf. Interp. of Patho.(LR: Oct. 4, 2019) |
| 66 | SNP:c.1319C > T (p.Pro440Leu) | 421 | SNP:c.2078T > C (p.Leu693Pro) | VCV000067359 | Long QT Syn.\|Inborn genetic diseases\|Conge [symbol] | Conf. Interp. of Patho.(LR: Oct. 6, 2017) |
| 67 | SNP:c.131G > A (p.Cys44Tyr) | 335 | SNP:c.1888G > A (p.Val630Ile) | VCV000222669 | Long QT Syn.\|Long QT Syn. 2 [symbol] | Conf. Interp. of Patho.(LR: Oct. 6, 2020) |
| 68 | SNP:c.131G > T (p.Cys44Phe) | 686 | SNP:c.2863C > G (p.Leu955Val) | VCV000067445 | Arrhythmia\|Not Prov.\|Long QT Syn.\|Congeni [symbol] | Conf. Interp. of Patho.(LR: Oct. 6, 2020) |
| 69 | SNP:c.1325C > T (p.Ala442Val) | 831 | SNP:c.3322C > G (p.Leu1108Val) | VCV000067488 | Arrhythmia\| Long QT Syn.\|Long QT Syn. 2\|N [symbol] | Conf. Interp. of Patho.(LR: Oct. 6, 2020) |
| 70 | SNP:c.132C > G (p.Cys44Trp) | 758 | SNP:c.3079C > A (p.Leu1027Ile) | VCV000200254 | Cardiac arrhythmia\| Arrhythmia [symbol] | Conf. Interp. of Patho.(LR: Oct. 8, 2020) |
| 71 | SNP:c.1330G > A (p.Glu444Lys) | 171 | SNP:c.164C > T (p.Ser55Leu) | VCV000067224 | Congenital long QT Syn.\|Not Prov.\|Long QT [symbol] | Conf. Interp. of Patho.(LR: Oct. 9, 2020) |
| 72 | SNP:c.1330G > T (p.Glu444Ter) | 889 | SNP:c.431A > T (p.Asp144Val) | VCV000526910 | Long QT Syn.\|Arrhythmia [symbol] | Conf. Interp. of Patho.(LR: Sep. 10, 2020) |
| 73 | SNP:c.1332G > C (p.Glu444Asp) | 622 | SNP:c.2729C > T (p.Pro910Leu) | VCV000067430 | Not Prov.\|Cardiovas. pheno.\|Arrhythmia\|Long [symbol] | Conf. Interp. of Patho.(LR: Sep. 13, 2021) |
| 74 | SNP:c.1332G > T (p.Glu444Asp) | 646 | SNP:c.2771G > A (p.Gly924Glu) | VCV000067437 | Long QT Syn. 2\|Cardiovas. pheno.\|Congenita [symbol] | Conf. Interp. of Patho.(LR: Sep. 15, 2020) |
| 75 | SNP:c.133A > T (p.Asn45Tyr) | 790 | SNP:c.3164G > A (p.Arg1055Gln) | VCV000067475 | Not Prov.\|Cardiovas. pheno.\|not spec.\|Arrhyth [symbol] | Conf. Interp. of Patho.(LR: Sep. 17, 2020) |
| 76 | SNP:c.1342G > A (p.Ala448Thr) | 338 | SNP:c.188C > A (p.Pro63His) | VCV000200559 | Long QT Syn.\|Not Prov. [symbol] | Conf. Interp. of Patho.(LR: Sep. 24, 2021) |
| 77 | SNP:c.1342G > T (p.Ala448Ser) | 914 | SNP:c.526C > T (p.Arg176Trp) | VCV000067509 | Not Prov.\|Long QT Syn. 2\|Short QT Syn. 1\| [symbol] | Conf. Interp. of Patho., risk factor(LR: Jun. 11, 2021) |
| 78 | SNP:c.1348C > T (p.Gln450Ter) | 117 | SNP:c.1471G > A (p.Val491Ile) | VCV000200344 | Long QT Syn.\|not spec.\|Arrhythmia\|Not Prov [symbol] | Likely benign(LR: Dec. 4, 2020) |
| 79 | SNP:c.134A > C (p.Asn45Thr) | 913 | SNP:c.524C > A (p.Ala175Asp) | VCV000200211 | Long QT Syn.\|Long QT Syn. 2\|not spec. [symbol] | Likely benign(LR: Jul. 31, 2019) |
| 80 | SNP:c.1352C > T (p.Pro451Leu) | 968 | SNP:c.736G > T (p.Gly246Cys) | VCV000379687 | not spec. [symbol] | Likely benign(LR: May 11, 2015) |
| 81 | SNP:c.1357G > A (p.Ala453Thr) | 955 | SNP:c.697G > T (p.Ala233Ser) | VCV000527096 | Long QT Syn.\|Not Prov. [symbol] | Likely benign(LR: May 13, 2020) |
| 82 | SNP:c.135C > A (p.Asn45Lys) | 660 | SNP:c.278A > G (p.Lys93Arg) | VCV000413325 | Long QT Syn.\|Cardiovas. pheno.\|Not Prov.\| [symbol] | Likely benign(LR: Nov. 15, 2020) |
| 83 | SNP:c.1366G > T (p.Asp456Tyr) | 712 | SNP:c.2932G > A (p.Glu978Lys) | VCV000067453 | Not Prov.\|Arrhythmia\|not spec.\|Long QT Syn [symbol] | Likely benign(LR: Nov. 15, 2020) |
| 84 | SNP:c.136G > A (p.Asp46Asn) | 217 | SNP:c.1708G > T (p.Ala570Ser) | VCV001284270 | Not Prov. | Likely pathogenic |
| 85 | SNP:c.1372A > T (p.Ile458Phe) | 234 | SNP:c.1738G > C (p.Asp580His) | VCV000191223 | Not Prov. | Likely pathogenic |
| 86 | SNP:c.1378G > T (p.Asp460Tyr) | 293 | SNP:c.1831T > G (p.Tyr611Asp) | VCV000067290 | Congenital long QT Syn.\|Long QT Syn [symbol] | Likely pathogenic |
| 87 | SNP:c.137A > G (p.Asp46Gly) | 573 | SNP:c.260T > C (p.Leu87Pro) | VCV000067418 | Congenital long QT Syn.\|Not Prov [symbol] | Likely pathogenic |
| 88 | SNP:c.1384A > G (p.Met462Val [symbol] | 165 | SNP:c.162C > A (p.Tyr54Ter) | VCV000488895 | Not Prov. | Likely pathogenic(LR: Apr. 19, 2016) |
| 89 | SNP:c.1387T > C (p.Phe463Leu) | 474 | SNP:c.2263G > A (p.Ala755Thr) | VCV000200423 | Not Prov. | Likely pathogenic(LR: Apr. 28, 2014) |
| 90 | SNP:c.138C > G (p.Asp46Glu) | 37 | SNP:c.121G > C (p.Val41Leu) | VCV000372589 | Not Prov. | Likely pathogenic(LR: Apr. 9, 2015) |
| 91 | SNP:c.1391T > C (p.Ile464Thr) | 517 | SNP:c.2396T > C (p.Leu799Pro) | VCV000200442 | Not Prov. | Likely pathogenic(LR: Aug. 13, 2019) |
| 92 | SNP:c.1394T > C (p.Val465Ala) | 46 | SNP:c.1238T > G (p.Leu413Arg) | VCV000279588 | Long QT Syn. 2 | Likely pathogenic(LR: Aug. 30, 2016) |
| 93 | SNP:c.1396G > T (p.Asp466Tyr) | 230 | SNP:c.172G > A (p.Glu58Lys) | VCV000067254 | Not Prov.\|Long QT Syn.\|Congenital long QT [symbol] | Likely pathogenic(LR: Aug. 30, 2021) |
| 94 | SNP:c.1397A > G (p.Asp466Gly [symbol] | 300 | SNP:c.1843C > T (p.Leu615Phe) | VCV000067294 | Not Prov.\|Congenital long QT Syn [symbol] | Likely pathogenic(LR: Aug. 6, 2020) |
| 95 | SNP:c.1397A > T (p.Asp466Val) | 212 | SNP:c.1704G > C (p.Trp568Cys) | VCV000067243 | Congenital long QT Syn.\|Long QT Syn [symbol] | Likely pathogenic(LR: Aug. 8, 2018) |
| 96 | SNP:c.1408A > G (p.Asn470Asp [symbol] | 183 | SNP:c.167G > A (p.Arg56Gln) | VCV000067228 | Long QT Syn.\|Congenital long QT Syn [symbol] | Likely pathogenic(LR: Aug. 9, 2018) |
| 97 | SNP:c.140G > T (p.Gly47Val) | 475 | SNP:c.2266A > G (p.Met756Val) | VCV000067381 | Long QT Syn. 2\| Acquired long QT Syn [symbol] | Likely pathogenic(LR: Dec. 11, 2019) |
| 98 | SNP:c.1415G > C (p.Arg472Pro) | 225 | SNP:c.1715G > C (p.Gly572Ala) | VCV000391858 | Not Prov. | Likely pathogenic(LR: Dec. 19, 2016) |
| 99 | SNP:c.1417A > C (p.Thr473Pro) | 1023 | SNP:c.916G > T (p.Gly306Trp) | VCV000067544 | Congenital long QT Syn.\|Long QT Syn.\|Not [symbol] | Likely pathogenic(LR: Dec. 22, 2017) |
| 100 | SNP:c.1418C > A (p.Thr473Asn) | 161 | SNP:c.1610G > A (p.Arg537Gln) | VCV000200360 | Not Prov. | Likely pathogenic(LR: Dec. 30, 2016) |
| 101 | SNP:c.1418C > T (p.Thr473Ile) | 502 | SNP:c.2362G > A (p.Glu788Lys) | VCV000067389 | Long QT Syn.\|Congenital long QT Syn [symbol] | Likely pathogenic(LR: Feb. 11, 2016) |
| 102 | SNP:c.1421C > T (p.Thr474Ile) | 1028 | SNP:c.92T > A (p.Ile31Asn) | VCV000520423 | Long QT Syn. 2 | Likely pathogenic(LR: Feb. 14, 2018) |
| 103 | SNP:c.1424A > G (p.Tyr475Cys) | 200 | SNP:c.1693G > C (p.Ala565Pro) | VCV000200372 | Not Prov. | Likely pathogenic(LR: Feb. 2, 2015) |
| 104 | SNP:c.1425C > A (p.Tyr475Ter) | 612 | SNP:c.2701C > T (p.Gln901Ter) | VCV000927383 | Arrhythmia | Likely pathogenic(LR: Feb. 21, 2020) |
| 105 | SNP:c.1426G > A (p.Val476Ile) | 249 | SNP:c.1754G > T (p.Trp585Leu) | VCV000200739 | Not Prov. | Likely pathogenic(LR: Feb. 27, 2012) |
| 106 | SNP:c.1447G > A (p.Val483Ile) | 876 | SNP:c.379C > T (p.Leu127Phe) | VCV000200278 | Not Prov. | Likely pathogenic(LR: Feb. 4, 2014) |
| 107 | SNP:c.1447G > T (p.Val483Phe) | 447 | SNP:c.2162C > T (p.Pro721Leu) | VCV000067371 | Long QT Syn.\|Congenital long QT Syn. | Likely pathogenic(LR: Feb. 6, 2019) |
| 108 | SNP:c.1459G > A (p.Gly487Ser) | 384 | SNP:c.1952T > G (p.Met651Arg) | VCV000427945 | Long QT Syn. 2 | Likely pathogenic(LR: Feb. 9, 2017) |
| 109 | SNP:c.1460G > C (p.Gly487Ala) | 1029 | SNP:c.92T > C (p.Ile31Thr) | VCV000067545 | Congenital long QT Syn.\|Not Prov. | Likely pathogenic(LR: Jan. 12, 2021) |
| 110 | SNP:c.1462C > T (p.Arg488Cys) | 236 | SNP:c.173A > G (p.Glu58Gly) | VCV000067257 | Congenital long QT Syn.\|Not Prov. | Likely pathogenic(LR: Jan. 14, 2021) |
| 111 | SNP:c.1465A > T (p.Ile489Phe) | 122 | SNP:c.1478A > G (p.Tyr493Cys) | VCV000067206 | Congenital long QT Syn.\|Long QT Syn.\|Not [symbol] | Likely pathogenic(LR: Jan. 15, 2021) |
| 112 | SNP:c.1468G > A (p.Ala490Thr) | 285 | SNP:c.1819A > T (p.Ile607Phe) | VCV000418245 | Not Prov. | Likely pathogenic(LR: Jan. 2, 2015) |
| 113 | SNP:c.1468G > C (p.Ala490Pro) | 725 | SNP:c.296A > G (p.Tyr99Cys) | VCV000200582 | Not Prov. | Likely pathogenic(LR: Jan. 21, 2020) |
| 114 | SNP:c.1469C > T (p.Ala490Val) | 178 | SNP:c.1673C > A (p.Ala558Glu) | VCV000067226 | Not Prov.\|Congenital long QT Syn. | Likely pathogenic(LR: Jan. 22, 2021) |
| 115 | SNP:c.146G > A (p.Cys49Tyr) | 280 | SNP:c.1811G > T (p.Gly604Val) | VCV000200741 | Not Prov. | Likely pathogenic(LR: Jan. 3, 2018) |
| 116 | SNP:c.146G > T (p.Cys49Phe) | 453 | SNP:c.2192A > C (p.His731Pro) | VCV000200417 | Not Prov. | Likely pathogenic(LR: Jan. 31, 2014) |
| 117 | SNP:c.1471G > A (p.Val491Ile) | 151 | SNP:c.1595T > C (p.Leu532Pro) | VCV000978356 | Long QT Syn. 1 | Likely pathogenic(LR: Jan. 8, 2019) |
| 118 | SNP:c.1474C > T (p.His492Tyr) | 275 | SNP:c.1802G > A (p.Gly601Asp) | VCV000200730 | Not Prov. | Likely pathogenic(LR: Jul. 14, 2021) |
| 119 | SNP:c.1475A > T (p.His492Leu) | 737 | SNP:c.3007G > T (p.Asp1003Tyr) | VCV000200516 | Not Prov. | Likely pathogenic(LR: Jul. 16, 2014) |
| 120 | SNP:c.1477T > C (p.Tyr493His) | 67 | SNP:c.131G > A (p.Cys44Tyr) | VCV001214199 | Not Prov. | Likely pathogenic(LR: Jul. 23, 2021) |
| 121 | SNP:c.1478A > C (p.Tyr493Ser) | 101 | SNP:c.1418C > T (p.Thr473Ile) | VCV000811073 | not spec. | Likely pathogenic(LR: Jul. 24, 2018) |
| 122 | SNP:c.1478A > G (p.Tyr493Cys) | 471 | SNP:c.2255G > A (p.Arg752Gln) | VCV000014435 | Long QT Syn.\|Not Prov.\|Congenital long QT [symbol] | Likely pathogenic(LR: Jul. 29, 2021) |
| 123 | SNP:c.1478A > T (p.Tyr493Phe) | 195 | SNP:c.1689G > C (p.Trp563Cys) | VCV000200368 | Not Prov. | Likely pathogenic(LR: Jul. 31, 2018) |
| 124 | SNP:c.1479C > A (p.Tyr493Ter) | 263 | SNP:c.1781G > A (p.Gly594Asp) | VCV000067271 | Congenital long QT Syn.\|Long QT Syn. | Likely pathogenic(LR: Jul. 31, 2019) |
| 125 | SNP:c.147C > G (p.Cys49Trp) | 197 | SNP:c.1691T > A (p.Leu564Gln) | VCV000572344 | Long QT Syn. | Likely pathogenic(LR: Jul. 9, 2019) |
| 126 | SNP:c.148G > C (p.Glu50Gln) | 516 | SNP:c.2390C > A (p.Ala797Asp) | VCV000200440 | not spec.\|Not Prov. | Likely pathogenic(LR: Jun. 12, 2013) |
| 127 | SNP:c.1496T > G (p.Leu499Arg) | 533 | SNP:c.2464G > C (p.Val822Leu) | VCV000200456 | Not Prov. | Likely pathogenic(LR: Jun. 15, 2017) |
| 128 | SNP:c.1501G > A (p.Asp501Asn [symbol] | 489 | SNP:c.232G > A (p.Ala78Thr) | VCV001197726 | Not Prov. | Likely pathogenic(LR: Jun. 22, 2021) |
| 129 | SNP:c.1501G > C (p.Asp501His) | 393 | SNP:c.1970G > T (p.Gly657Val) | VCV000427076 | Not Prov. | Likely pathogenic(LR: Jun. 26, 2015) |
| 130 | SNP:c.1502A > G (p.Asp501Gly [symbol] | 315 | SNP:c.1873G > C (p.Val625Leu) | VCV000618184 | Not Prov. | Likely pathogenic(LR: Jun. 26, 2017) |
| 131 | SNP:c.150G > T (p.Glu50Asp) | 531 | SNP:c.245T > C (p.Ile82Thr) | VCV000585220 | Long QT Syn. 2 | Likely pathogenic(LR: Jun. 5, 2017) |
| 132 | SNP:c.1516A > G (p.Ile506Val) | 98 | SNP:c.1415G > C (p.Arg472Pro) | VCV000200340 | Not Prov. | Likely pathogenic(LR: Jun. 8, 2012) |
| 133 | SNP:c.1519C > G (p.Pro507Ala) | 58 | SNP:c.1280A > G (p.Tyr427Cys) | VCV000067179 | Long QT Syn. 1\|Congenital long QT Syn. | Likely pathogenic(LR: Mar. 16, 2017) |
| 134 | SNP:c.1519C > T (p.Pro507Ser) | 250 | SNP:c.1755G > C (p.Trp585Cys) | VCV000581669 | Long QT Syn. | Likely pathogenic(LR: Mar. 16, 2018) |
| 135 | SNP:c.1520C > T (p.Pro507Leu) | 118 | SNP:c.1474C > T (p.His492Tyr) | VCV000067204 | Long QT Syn. 2\|Congenital long QT Syn.\|A [symbol] | Likely pathogenic(LR: Mar. 18, 2020) |
| 136 | SNP:c.1525G > A (p.Asp509Asn | 241 | SNP:c.1745G > T (p.Arg582Leu) | VCV000067258 | Congenital long QT Syn.\|Long QT Syn. | Likely pathogenic(LR: Mar. 25, 2020) |
| 137 | SNP:c.1537T > C (p.Phe513Leu) | 59 | SNP:c.1282T > C (p.Ser428Pro) | VCV000200335 | Not Prov. | Likely pathogenic(LR: Mar. 26, 2014) |
| 138 | SNP:c.1564G > A (p.Gly522Arg [symbol] | 304 | SNP:c.1851C > A (p.Phe617Leu) | VCV000392690 | Not Prov. | Likely pathogenic(LR: Mar. 30, 2017) |
| 139 | SNP:c.1567C > A (p.Leu523Met [symbol] | 84 | SNP:c.136G > A (p.Asp46Asn) | VCV000200551 | Not Prov. | Likely pathogenic(LR: Mar. 9, 2015) |
| 140 | SNP:c.156C > A (p.Cys52Ter) | 407 | SNP:c.202T > C (p.Phe68Leu) | VCV000067355 | Congenital long QT Syn.\|Not Prov. | Likely pathogenic(LR: May 10, 2014) |
| 141 | SNP:c.156C > G (p.Cys52Trp) | 306 | SNP:c.1853C > T (p.Thr618Ile) | VCV000067297 | short QT Syn.\|Long QT Syn. | Likely pathogenic(LR: May 10, 2017) |
| 142 | SNP:c.1575G > T (p.Lys525Asn) | 64 | SNP:c.1293C > A (p.Phe431Leu) | VCV000067183 | Not Prov.\|Congenital long Q Syn. | Likely pathogenic(LR: May 10, 2018) |
| 143 | SNP:c.1576A > G (p.Thr526Ala) | 1038 | SNP:c.959C > A (p.Ser320Ter) | VCV001215035 | Not Prov. | Likely pathogenic(LR: May 14, 2021) |
| 144 | SNP:c.157G > A (p.Gly53Ser) | 291 | SNP:c.1828A > G (p.Lys610Glu) | VCV001066309 | Long QT Syn. | Likely pathogenic(LR: May 16, 2020) |
| 145 | SNP:c.157G > C (p.Gly53Arg) | 176 | SNP:c.1664G > A (p.Cys555Tyr) | VCV000372574 | Not Prov. | Likely pathogenic(LR: May 18, 2016) |
| 146 | SNP:c.1582C > T (p.Arg528Trp) | 396 | SNP:c.197G > A (p.Cys66Tyr) | VCV000545688 | Long QT Syn. 2 | Likely pathogenic(LR: May 18, 2018) |
| 147 | SNP:c.1583G > C (p.Arg528Pro) | 327 | SNP:c.1882G > C (p.Gly628Arg) | VCV000200749 | Not Prov. | Likely pathogenic(LR: May 18, 2020) |
| 148 | SNP:c.158G > A (p.Gly53Asp) | 1022 | SNP:c.916G > C (p.Gly306Arg) | VCV000067543 | Long QT Syn. 2\|Long QT Syn.\|Congenital [symbol] | Likely pathogenic(LR: Nov. 10, 2017) |
| 149 | SNP:c.1591C > T (p.Arg531Trp) | 270 | SNP:c.1970A > G (p.Tyr597Cys) | VCV000067277 | Congenital long QT Syn.\|Not Prov.\|Long QT [symbol] | Likely pathogenic(LR: Nov. 18, 2015) |
| 150 | SNP:c.1592G > A (p.Arg531Gln) | 317 | SNP:c.1874T > C (p.Val625Ala) | VCV000222668 | Long QT Syn. 2\|Long QT Syn. | Likely pathogenic(LR: Nov. 26, 2015) |
| 151 | SNP:c.1595T > C (p.Leu532Pro) | 116 | SNP:c.146G > T (p.Cys49Phe) | VCV000972694 | Long QT Syn. 2 | Likely pathogenic(LR: Nov. 26, 2019) |
| 152 | SNP:c.1598T > G (p.Val533Gly) | 57 | SNP:c.1280A > C (p.Tyr427Ser) | VCV000067178 | Cardiovas. pheno.\|Congenital long QT Syn. | Likely pathogenic(LR: Nov. 7, 2016) |
| 153 | SNP:c.1600C > A (p.Arg534Ser) | 878 | SNP:c.387C > G (p.Phe129Leu) | VCV000200280 | Not Prov. | Likely pathogenic(LR: Nov. 7, 2019) |
| 154 | SNP:c.1600C > G (p.Arg534Gly) | 202 | SNP:c.1694C > T (p.Ala565Val) | VCV000200735 | Not Prov. | Likely pathogenic(LR: Oct. 1, 2019) |
| 155 | SNP:c.1600C > T (p.Arg534Cys) | 191 | SNP:c.1686C > G (p.His562Gln) | VCV000379052 | Not Prov. | Likely pathogenic(LR: Oct. 21, 2016) |
| 156 | SNP:c.1601G > T (p.Arg534Leu) | 440 | SNP:c.212G > A (p.Gly71Glu) | VCV000264521 | Cardiovas. pheno. | Likely pathogenic(LR: Oct. 27, 2015) |
| 157 | SNP:c.1603G > A (p.Val535Met) | 488 | SNP:c.2326C > T (p.Leu776Phe) | VCV000200425 | Not Prov. | Likely pathogenic(LR: Sep. 17, 2012) |
| 158 | SNP:c.1603G > T (p.Val535Leu) | 218 | SNP:c.170C > T (p.Ala57Val) | VCV000200775 | Not Prov. | Likely pathogenic(LR: Sep. 3, 2014) |
| 159 | SNP:c.1609C > T (p.Arg537Trp) | 35 | SNP:c.119C > T (p.Ala40Val) | VCV000200544 | Not Prov. | Likely pathogenic(LR: Sep. 30, 2013) |
| 160 | SNP:c.160T > C (p.Tyr54His) | 7 | SNP:c.1025A > T (p.Asp342Val) | VCV000067162 | Acquired long QT Syn. | Not Prov. |
| 161 | SNP:c.1610G > A (p.Arg537Gln) | 34 | SNP:c.1199T > A (p.Ile400Asn) | VCV000067165 | Congenital long QT Syn. | Not Prov. |
| 162 | SNP:c.1612A > G (p.Lys538Glu) | 38 | SNP:c.121G > T (p.Val41Phe) | VCV000067167 | Congenital long QT Syn. | Not Prov. |
| 163 | SNP:c.1621C > T (p.Arg541Cys) | 42 | SNP:c.1229G > C (p.Trp410Ser) | VCV000067168 | Congenital long QT Syn. | Not Prov. |
| 164 | SNP:c.1622G > A (p.Arg541His) | 43 | SNP:c.122T > C (p.Val41Ala) | VCV000067169 | Congenital long QT Syn. | Not Prov. |
| 165 | SNP:c.162C > A (p.Tyr54Ter) | 45 | SNP:c.1238T > C (p.Leu413Pro) | VCV000067170 | Congenital long QT Syn. | Not Prov. |
| 166 | SNP:c.162C > G (p.Tyr54Ter) | 48 | SNP:c.1259A > G (p.Tyr420Cys) | VCV000067171 | Congenital long QT Syn. | Not Prov. |
| 167 | SNP:c.1639G > A (p.Ala547Thr) | 49 | SNP:c.125T > A (p.Ile42Asn) | VCV000067172 | Congenital long QT Syn. | Not Prov. |
| 168 | SNP:c.1640C > T (p.Ala547Val) | 54 | SNP:c.1277C > A (p.Pro426His) | VCV000067175 | Congenital long QT Syn. | Not Prov. |
| 169 | SNP:c.1645G > A (p.Val549Met [symbol] | 55 | SNP:c.1279T > C (p.Tyr427His) | VCV000067176 | Congenital long QT Syn. | Not Prov. |
| 170 | SNP:c.164C > A (p.Ser55Ter) | 56 | SNP:c.127T > G (p.Tyr43Asp) | VCV000067177 | Congenital long QT Syn. | Not Prov. |
| 171 | SNP:c.164C > T (p.Ser55Leu) | 61 | SNP:c.1285G > C (p.Ala429Pro) | VCV000067181 | Congenital long QT Syn. | Not Prov. |
| 172 | SNP:c.1652T > C (p.Phe551Ser) | 68 | SNP:c.131G > T (p.Cys44Phe) | VCV000067186 | Congenital long QT Syn. | Not Prov. |
| 173 | SNP:c.1655T > A (p.Leu552Ter) | 70 | SNP:c.132C > G (p.Cys44Trp) | VCV000067187 | Congenital long QT Syn. | Not Prov. |
| 174 | SNP:c.1655T > C (p.Leu552Ser) | 74 | SNP:c.1332G > T (p.Glu444Asp) | VCV000067188 | Not Prov. | Not Prov. |
| 175 | SNP:c.1661T > C (p.Met554Thr) | 75 | SNP:c.133A > T (p.Asn45Tyr) | VCV000067189 | Congenital long QT Syn. | Not Prov. |
| 176 | SNP:c.1664G > A (p.Cys555Tyr) | 83 | SNP:c.1366G > T (p.Asp456Tyr) | VCV000067191 | Congenital long QT Syn. | Not Prov. |
| 177 | SNP:c.1672G > C (p.Ala558Pro) | 86 | SNP:c.1378G > T (p.asp460Tyr) | VCV000067192 | Congenital long QT Syn. | Not Prov. |
| 178 | SNP:c.1673C > A (p.Ala558Glu) | 89 | SNP:c.1387T > C (p.Phe463Leu) | VCV000067193 | Congenital long QT Syn. | Not Prov. |
| 179 | SNP:c.1675C > T (p.Leu559Phe) | 93 | SNP:c.1396G > T (p.Asp466Tyr) | VCV000067194 | Congenital long QT Syn. | Not Prov. |
| 180 | SNP:c.1676T > A (p.Leu559His) | 97 | SNP:c.140G > T (p.Gly47Val) | VCV000067195 | Congenital long QT Syn. | Not Prov. |
| 181 | SNP:c.1676T > C (p.Leu559Pro) | 99 | SNP:c.1417A > C (p.Thr473Pro) | VCV000067196 | Congenital long QT Syn. | Not Prov. |
| 182 | SNP:c.1678A > G (p.Ile560Val) | 100 | SNP:c.1418C > A (p.Thr473Asn) | VCV000067197 | Congenital long QT Syn. | Not Prov. |
| 183 | SNP:c.167G > A (p.Arg56Gln) | 103 | SNP:c.1424A > G (p.Tyr475Cys) | VCV000067199 | Congenital long QT Syn. | Not Prov. |
| 184 | SNP:c.167G > T (p.Arg56Leu) | 111 | SNP:c.1465A > T (p.Ile489Phe) | VCV000067201 | Congenital long QT Syn. | Not Prov. |
| 185 | SNP:c.1681G > A (p.Ala561Thr) | 113 | SNP:c.1468G > C (p.Ala490Pro) | VCV000067202 | Congenital long QT Syn. | Not Prov. |
| 186 | SNP:c.1681G > C (p.Ala561Pro) | 115 | SNP:c.146G > A (p.Cys49Tyr) | VCV000067203 | Congenital long QT Syn. | Not Prov. |
| 187 | SNP:c.1682C > T (p.Ala561Val) | 121 | SNP:c.1478A > C (p.Tyr493Ser) | VCV000067205 | Congenital long QT Syn. | Not Prov. |
| 188 | SNP:c.1684C > T (p.His562Tyr) | 123 | SNP:c.1478A > T (p.Tyr493Phe) | VCV000067207 | Congenital long QT Syn. | Not Prov. |
| 189 | SNP:c.1685A > C (p.His562Pro) | 129 | SNP:c.1501G > C (p.Asp501His) | VCV000067209 | Congenital long QT Syn. | Not Prov. |
| 190 | SNP:c.1685A > G (p.His562Arg) | 131 | SNP:c.150G > T (p.Glu50Asp) | VCV000067211 | short QT Syn. | Not Prov. |
| 191 | SNP:c.1686C > G (p.His562Gln) | 142 | SNP:c.1575G > T (p.Lys525Asn) | VCV000067213 | Congenital long QT Syn. | Not Prov. |
| 192 | SNP:c.1687T > G (p.Trp563Gly) | 144 | SNP:c.157G > A (p.Gly53Ser) | VCV000067214 | Congenital long QT Syn. | Not Prov. |
| 193 | SNP:c.1688G > A (p.Trp563Ter) | 147 | SNP:c.1583G > C (p.Arg528Pro) | VCV000067216 | Congenital long QT Syn. | Not Prov. |
| 194 | SNP:c.1689G > A (p.Trp563Ter) | 148 | SNP:c.158G > A (p.Gly53Asp) | VCV000067217 | Congenital long QT Syn. | Not Prov. |
| 195 | SNP:c.1689G > C (p.Trp563Cys) | 150 | SNP:c.1592G > A (p.Arg531Gln) | VCV000067219 | Congenital long QT Syn. | Not Prov. |
| 196 | SNP:c.1689G > T (p.Trp563Cys) | 180 | SNP:c.1676T > A (p.Leu559His) | VCV000067227 | Congenital long QT Syn. | Not Prov. |
| 197 | SNP:c.1691T > A (p.Leu564Gln) | 189 | SNP:c.1685A > C (p.His562Pro) | VCV000067231 | Congenital long QT Syn. | Not Prov. |
| 198 | SNP:c.1691T > C (p.Leu564Pro) | 192 | SNP:c.1687T > G (p.Trp563Gly) | VCV000067233 | Congenital long QT Syn. | Not Prov. |
| 199 | SNP:c.1693G > A (p.Ala565Thr) | 196 | SNP:c.1689G > T (p.Trp563Cys) | VCV000067234 | Congenital long QT Syn. | Not Prov. |
| 200 | SNP:c.1693G > C (p.Ala565Pro) | 198 | SNP:c.1691T > C (p.Leu564Pro) | VCV000067235 | Congenital long QT Syn. | Not Prov. |
| 201 | SNP:c.1693G > T (p.Ala565Ser) | 199 | SNP:c.1693G > A (p.Ala565Thr) | VCV000067236 | Congenital long QT Syn. | Not Prov. |
| 202 | SNP:c.1694C > T (p.Ala565Val) | 203 | SNP:c.1696T > G (p.Cys566Gly) | VCV000067237 | Congenital long QT Syn. | Not Prov. |
| 203 | SNP:c.1696T > G (p.Cys566Gly) | 204 | SNP:c.1697G > C (p.Cys566Ser) | VCV000067238 | Congenital long QT Syn. | Not Prov. |
| 204 | SNP:c.1697G > C (p.Cys566Ser) | 205 | SNP:c.1697G > T (p.Cys566Phe) | VCV000067239 | Congenital long QT Syn. | Not Prov. |
| 205 | SNP:c.1697G > T (p.Cys566Phe) | 209 | SNP:c.1702T > C (p.Trp568Arg) | VCV000067242 | Congenital long QT Syn. | Not Prov. |
| 206 | SNP:c.169G > A (p.Ala57Thr) | 213 | SNP:c.1704G > T (p.Trp568Cys) | VCV000067244 | Congenital long QT Syn. | Not Prov. |
| 207 | SNP:c.169G > C (p.Ala57Pro) | 214 | SNP:c.1705T > C (p.Tyr569His) | VCV000067245 | Congenital long QT Syn. | Not Prov. |
| 208 | SNP:c.1700T > C (p.Ile567Thr) | 219 | SNP:c.1711A > C (p.Ile571Leu) | VCV000067246 | Congenital long QT Syn. | Not Prov. |
| 209 | SNP:c.1702T > C (p.Trp568Arg) | 223 | SNP:c.1714G > T (p.Gly572Cys) | VCV000067249 | Congenital long QT Syn. | Not Prov. |
| 210 | SNP:c.1703G > C (p.Trp568Ser) | 224 | SNP:c.1715G > A (p.Gly572Asp) | VCV000067250 | Congenital long QT Syn. | Not Prov. |
| 211 | SNP:c.1704G > A (p.Trp568Ter) | 227 | SNP:c.1720A > G (p.Met574Val) | VCV000067252 | Congenital long QT Syn. | Not Prov. |
| 212 | SNP:c.1704G > C (p.Trp568Cys) | 228 | SNP:c.1724A > G (p.Glu575Gly) | VCV000067253 | Congenital long QT Syn. | Not Prov. |
| 213 | SNP:c.1704G > T (p.Trp568Cys) | 235 | SNP:c.173A > C (p.Glu58Ala) | VCV000067256 | Congenital long QT Syn. | Not Prov. |
| 214 | SNP:c.1705T > C (p.Tyr569His) | 242 | SNP:c.1747A > G (p.Ile583Val) | VCV000067259 | Congenital long QT Syn. | Not Prov. |
| 215 | SNP:c.1707C > G (p.Tyr569Ter) | 244 | SNP:c.174G > C (p.Glu58Asp) | VCV000067260 | Congenital long QT Syn. | Not Prov. |
| 216 | SNP:c.1708G > A (p.Ala570Thr) | 246 | SNP:c.1750G > C (p.Gly584Arg) | VCV000067262 | Congenital long QT Syn. | Not Prov. |
| 217 | SNP:c.1708G > T (p.Ala570Ser) | 248 | SNP:c.1751G > T (p.Gly584Val) | VCV000067264 | Congenital long QT Syn. | Not Prov. |
| 218 | SNP:c.170C > T (p.Ala57Val) | 251 | SNP:c.1755G > T (p.Trp585Cys) | VCV000067265 | Congenital long QT Syn. | Not Prov. |
| 219 | SNP:c.1711A > C (p.Ile571Leu) | 253 | SNP:c.1762A > G (p.Asn588Asp) | VCV000067266 | Congenital long QT Syn. | Not Prov. |
| 220 | SNP:c.1711A > G (p.Ile571Val) | 256 | SNP:c.1769G > T (p.Gly590Val) | VCV000067267 | Congenital long QT Syn. | Not Prov. |
| 221 | SNP:c.1714G > A (p.Gly572Ser) | 258 | SNP:c.1777A > G (p.Ile593Val) | VCV000067268 | Congenital long QT Syn. | Not Prov. |
| 222 | SNP:c.1714G > C (p.Gly572Arg) | 264 | SNP:c.1783A > G (p.Lys595Glu) | VCV000067272 | Congenital long QT Syn. | Not Prov. |
| 223 | SNP:c.1714G > T (p.Gly572Cys) | 265 | SNP:c.1785A > T (p.Lys595Asn) | VCV000067273 | Congenital long QT Syn. | Not Prov. |
| 224 | SNP:c.1715G > A (p.Gly572Asp | 268 | SNP:c.1787C > G (p.Pro596Arg) | VCV000067275 | Congenital long QT Syn. | Not Prov. |
| 225 | SNP:c.1715G > C (p.Gly572Ala) | 269 | SNP:c.1787C > T (p.Pro596Leu) | VCV000067276 | Congenital long QT Syn. | Not Prov. |
| 226 | SNP:c.1715G > T (p.Gly572Val) | 272 | SNP:c.1797C > A (p.Ser599Arg) | VCV000067278 | Congenital long QT Syn. | Not Prov. |
| 227 | SNP:c.1720A > G (p.Met574Val) | 274 | SNP:c.1801G > T (p.Gly601Cys) | VCV000067280 | Congenital long QT Syn. | Not Prov. |
| 228 | SNP:c.1724A > G (p.Glu575Gly) | 279 | SNP:c.1811G > A (p.Gly604Asp) | VCV000067282 | Congenital long QT Syn. | Not Prov. |
| 229 | SNP:c.1726C > T (p.Gln576Ter) | 281 | SNP:c.1813C > T (p.Pro605Ser) | VCV000067283 | Congenital long QT Syn. | Not Prov. |
| 230 | SNP:c.172G > A (p.Glu58Lys) | 284 | SNP:c.1816T > C (p.Ser606Pro) | VCV000067285 | Congenital long QT Syn. | Not Prov. |
| 231 | SNP:c.1730C > A (p.Pro577Gln) | 287 | SNP:c.1825G > C (p.Asp609His) | VCV000067287 | Congenital long QT Syn. | Not Prov. |
| 232 | SNP:c.1733A > C (p.His578Pro) | 288 | SNP:c.1825G > T (p.Asp609Tyr) | VCV000067288 | Congenital long QT Syn. | Not Prov. |
| 233 | SNP:c.1736T > C (p.Met579Thr) | 295 | SNP:c.1834G > T (p.Val612Leu) | VCV000067291 | Congenital long QT Syn. | Not Prov. |
| 234 | SNP:c.1738G > C (p.Asp580His) | 299 | SNP:c.1843C > G (p.Leu615Val) | VCV000067293 | Congenital long QT Syn. | Not Prov. |
| 235 | SNP:c.173A > C (p.Glu58Ala) | 305 | SNP:c.1853C > G (p.Thr618Ser) | VCV000067296 | Congenital long QT Syn. | Not Prov. |
| 236 | SNP:c.173A > G (p.Glu58Gly) | 311 | SNP:c.1863C > G (p.Ser621Arg) | VCV000067300 | Congenital long QT Syn. | Not Prov. |
| 237 | SNP:c.1742C > A (p.Ser581Ter) | 313 | SNP:c.1868C > T (p.Thr623Ile) | VCV000067302 | Congenital long QT Syn. | Not Prov. |
| 238 | SNP:c.1742C > T (p.Ser581Leu) | 316 | SNP:c.1874T > A (p.Val625Glu) | VCV000067303 | Congenital long QT Syn. | Not Prov. |
| 239 | SNP:c.1744C > T (p.Arg582Cys) | 319 | SNP:c.1877G > A (p.Gly626Asp) | VCV000067305 | Congenital long QT Syn. | Not Prov. |
| 240 | SNP:c.1745G > A (p.Arg582His) | 320 | SNP:c.1877G > C (p.Gly626Ala) | VCV000067306 | Congenital long QT Syn. | Not Prov. |
| 241 | SNP:c.1745G > T (p.Arg582Leu) | 321 | SNP:c.1877G > T (p.Gly626Val) | VCV000067307 | Congenital long QT Syn. | Not Prov. |
| 242 | SNP:c.1747A > G (p.Ile583Val) | 322 | SNP:c.1879T > A (p.Phe627Ile) | VCV000067308 | Congenital long QT Syn. | Not Prov. |
| 243 | SNP:c.1749C > G (p.Ile583Met) | 323 | SNP:c.1879T > C (p.Phe627Leu) | VCV000067309 | Congenital long QT Syn. | Not Prov. |
| 244 | SNP:c.174G > C (p.Glu58Asp) | 325 | SNP:c.1881C > G (p.Phe627Leu) | VCV000067310 | Congenital long QT Syn. | Not Prov. |
| 245 | SNP:c.1750G > A (p.Gly584Ser) | 328 | SNP:c.1883G > C (p.Gly628Ala) | VCV000067311 | Congenital long QT Syn. | Not Prov. |
| 246 | SNP:c.1750G > C (p.Gly584Arg) | 329 | SNP:c.1883G > T (p.Gly628Val) | VCV000067312 | Congenital long QT Syn. | Not Prov. |
| 247 | SNP:c.1750G > T (p.Gly584Cys) | 333 | SNP:c.1886A > T (p.Asn629Ile) | VCV000067316 | Congenital long QT Syn. | Not Prov. |
| 248 | SNP:c.1751G > T (p.Gly584Val) | 334 | SNP:c.1887C > A (p.Asn629Lys) | VCV000067317 | Congenital long QT Syn. | Not Prov. |
| 249 | SNP:c.1754G > T (p.Trp585Leu) | 336 | SNP:c.1888G > C (p.Val630Leu) | VCV000067318 | Congenital long QT Syn. | Not Prov. |
| 250 | SNP:c.1755G > C (p.Trp585Cys) | 337 | SNP:c.1889T > C (p.Val630Ala) | VCV000067319 | Congenital long QT Syn. | Not Prov. |
| 251 | SNP:c.1755G > T (p.Trp585Cys) | 339 | SNP:c.1891T > G (p.Ser631Ala) | VCV000067320 | Congenital long QT Syn. | Not Prov. |
| 252 | SNP:c.1756C > G (p.Leu586Val) | 344 | SNP:c.1897A > G (p.Asn633Asp) | VCV000067322 | Congenital long QT Syn. | Not Prov. |
| 253 | SNP:c.1762A > G (p.Asn588Asp | 346 | SNP:c.1898A > T (p.Asn633Ile) | VCV000067324 | Congenital long QT Syn. | Not Prov. |
| 254 | SNP:c.1764C > A (p.Asn588Lys [symbol] | 349 | SNP:c.1903A > G (p.Asn635Asp) | VCV000067326 | Congenital long QT Syn. | Not Prov. |
| 255 | SNP:c.1764C > G (p.Asn588Lys [symbol] | 352 | SNP:c.1905C > G (p.Asn635Lys) | VCV000067328 | Congenital long QT Syn. | Not Prov. |
| 256 | SNP:c.1769G > T (p.Gly590Val) | 356 | SNP:c.1910A > G (p.Glu637Gly) | VCV000067330 | Congenital long QT Syn. | Not Prov. |
| 257 | SNP:c.1771G > A (p.Asp591Asn [symbol] | 357 | SNP:c.1911G > C (p.Glu637Asp) | VCV000067331 | Congenital long QT Syn. | Not Prov. |
| 258 | SNP:c.1777A > G (p.Ile593Val) | 358 | SNP:c.1912A > G (p.Lys638Glu) | VCV000067332 | Congenital long QT Syn. | Not Prov. |
| 259 | SNP:c.1778T > A (p.Ile593Lys) | 360 | SNP:c.1914G > T (p.Lys638Asn) | VCV000067333 | Congenital long QT Syn. | Not Prov. |
| 260 | SNP:c.1778T > C (p.Ile593Thr) | 362 | SNP:c.1918T > G (p.Phe640Val) | VCV000067334 | Congenital long QT Syn. | Not Prov. |
| 261 | SNP:c.1778T > G (p.Ile593 Arg) | 364 | SNP:c.191G > A (p.Cys64Tyr) | VCV000067335 | Congenital long QT Syn. | Not Prov. |
| 262 | SNP:c.1780G > C (p.Gly594Arg) | 368 | SNP:c.1926C > G (p.Ile642Met) | VCV000973054 | Long QT Syn. 2 | Not Prov. |
| 263 | SNP:c.1781G > A (p.Gly594Asp) | 370 | SNP:c.192C > G (p.Cys64Trp) | VCV000067338 | Congenital long QT Syn. | Not Prov. |
| 264 | SNP:c.1783A > G (p.Lys595Glu) | 372 | SNP:c.1930G > C (p.Val644Leu) | VCV000067339 | Congenital long QT Syn. | Not Prov. |
| 265 | SNP:c.1785A > T (p.Lys595Asn) | 376 | SNP:c.1933A > T (p.Met645Leu) | VCV000067342 | Congenital long QT Syn. | Not Prov. |
| 266 | SNP:c.1786C > G (p.Pro596Ala) | 379 | SNP:c.1942G > A (p.Gly648Ser) | VCV000067344 | Congenital long QT Syn. | Not Prov. |
| 267 | SNP:c.1787C > A (p.Pro596His) | 381 | SNP:c.1945T > C (p.Ser649Pro) | VCV000067345 | Congenital long QT Syn. | Not Prov. |
| 268 | SNP:c.1787C > G (p.Pro596Arg) | 387 | SNP:c.1967T > G (p.Phe656Cys) | VCV000067347 | Congenital long QT Syn. | Not Prov. |
| 269 | SNP:c.1787C > T (p.Pro596Leu) | 389 | SNP:c.1969G > C (p.Gly657Arg) | VCV000067349 | Congenital long QT Syn. | Not Prov. |
| 270 | SNP:c.1790A > G (p.Tyr597Cys) | 390 | SNP:c.1969G > T (p.Gly657Cys) | VCV000067350 | Congenital long QT Syn. | Not Prov. |
| 271 | SNP:c.1796G > A (p.Ser599Asn) | 392 | SNP:c.196T > G (p.Cys66Gly) | VCV000067351 | Congenital long QT Syn. | Not Prov. |
| 272 | SNP:c.1797C > A (p.Ser599Arg) | 398 | SNP:c.1985T > C (p.Ile662Thr) | VCV000067353 | Congenital long QT Syn. | Not Prov. |
| 273 | SNP:c.1801G > A (p.Gly601Ser) | 400 | SNP:c.1A > T (p.Met1Leu) | VCV000067354 | Congenital long QT Syn. | Not Prov. |
| 274 | SNP:c.1801G > T (p.Gly601Cys) | 417 | SNP:c.2059C > T (p.His687Tyr) | VCV000067357 | Congenital long QT Syn. | Not Prov. |
| 275 | SNP:c.1802G > A (p.Gly601Asp [symbol] | 420 | SNP:c.206T > C (p.Leu69Pro) | VCV000067358 | Congenital long QT Syn. | Not Prov. |
| 276 | SNP:c.1805T > C (p.Leu602Pro) | 426 | SNP:c.2087G > C (p.Arg696Pro) | VCV000067361 | Congenital long QT Syn. | Not Prov. |
| 277 | SNP:c.1808G > A (p.Gly603Asp) | 427 | SNP:c.208C > A (p.His70Asn) | VCV000067362 | Congenital long QT Syn. | Not Prov. |
| 278 | SNP:c.1810G > A (p.Gly604Ser) | 433 | SNP:c.2117C > G (p.Ser706Cys) | VCV000067364 | Congenital long QT Syn. | Not Prov. |
| 279 | SNP:c.1811G > A (p.Gly604Asp [symbol] | 434 | SNP:c.2117C > T (p.Ser706Phe) | VCV000067365 | Acquired long QT Syn. | Not Prov. |
| 280 | SNP:c.1811G > T (p.Gly604Val) | 448 | SNP:c.2167T > C (p.Cys723Arg) | VCV000067372 | Not Prov. | Not Prov. |
| 281 | SNP:c.1813C > T (p.Pro605Ser) | 452 | SNP:c.2182A > T (p.Ile728Phe) | VCV000067373 | Congenital long QT Syn. | Not Prov. |
| 282 | SNP:c.1814C > A (p.Pro605His) | 456 | SNP:c.220A > C (p.Thr74Pro) | VCV000067375 | Congenital long QT Syn. | Not Prov. |
| 283 | SNP:c.1814C > T (p.Pro605Leu) | 476 | SNP:c.2271G > C (p.Lys757Asn) | VCV000067382 | Congenital long QT Syn. | Not Prov. |
| 284 | SNP:c.1816T > C (p.Ser606Pro) | 483 | SNP:c.2299G > T (p.Asp767Tyr) | VCV000067383 | Congenital long QT Syn. | Not Prov. |
| 285 | SNP:c.1819A > T (p.Ile607Phe) | 484 | SNP:c.2309T > C (p.Val770Ala) | VCV000067384 | Congenital long QT Syn. | Not Prov. |
| 286 | SNP:c.1825G > A (p.Asp609Asn [symbol] | 490 | SNP:c.232G > C (p.Ala78Pro) | VCV000067386 | Congenital long QT Syn. | Not Prov. |
| 287 | SNP:c.1825G > C (p.Asp609His) | 496 | SNP:c.2354G > C (p.Gly785Ala) | VCV000067387 | Congenital long QT Syn. | Not Prov. |
| 288 | SNP:c.1825G > T (p.Asp609Tyr) | 497 | SNP:c.2354G > T (p.Gly785Val) | VCV000067388 | Congenital long QT Syn. | Not Prov. |
| 289 | SNP:c.1826A > C (p.Asp609Ala) | 503 | SNP:c.2364G > C (p.Glu788Asp) | VCV000067390 | Congenital long QT Syn. | Not Prov. |
| 290 | SNP:c.1826A > G (p.Asp609Gly [symbol] | 515 | SNP:c.238G > C (p.Ala80Pro) | VCV000067392 | Congenital long QT Syn. | Not Prov. |
| 291 | SNP:c.1828A > G (p.Lys610Glu) | 518 | SNP:c.2398G > T (p.Gly800Trp) | VCV000067393 | Congenital long QT Syn. | Not Prov. |
| 292 | SNP:c.1831T > C (p.Tyr611His) | 519 | SNP:c.2399G > A (p.Gly800Glu) | VCV000067394 | Congenital long QT Syn. | Not Prov. |
| 293 | SNP:c.1831T > G (p.Tyr611Asp) | 520 | SNP:c.239C > T (p.Ala80Val) | VCV000067395 | Sudden cardiac death | Not Prov. |
| 294 | SNP:c.1832A > G (p.Tyr611Cys) | 528 | SNP:c.2452T > C (p.Ser818Pro) | VCV000067400 | Congenital long QT Syn. | Not Prov. |
| 295 | SNP:c.1834G > T (p.Val612Leu) | 541 | SNP:c.2503C > T (p.Arg835Trp) | VCV000067404 | Congenital long QT Syn. | Not Prov. |
| 296 | SNP:c.1837A > T (p.Thr613Ser) | 544 | SNP:c.2509G > T (p.Asp837Tyr) | VCV000067406 | Congenital long QT Syn. | Not Prov. |
| 297 | SNP:c.1838C > T (p.Thr613Met) | 550 | SNP:c.2536C > A (p.Pro846Thr) | VCV000067408 | Congenital long QT Syn. | Not Prov. |
| 298 | SNP:c.1841C > T (p.Ala614Val) | 555 | SNP:c.253G > C (p.Ala85Pro) | VCV000067410 | Congenital long QT Syn. | Not Prov. |
| 299 | SNP:c.1843C > G (p.Leu615Val) | 557 | SNP:c.254C > T (p.Ala85Val) | VCV000067411 | Congenital long QT Syn. | Not Prov. |
| 300 | SNP:c.1843C > T (p.Leu615Phe) | 559 | SNP:c.2573T > C (p.Ile858Thr) | VCV000067412 | Congenital long QT Syn. | Not Prov. |
| 301 | SNP:c.1847A > G (p.Tyr616Cys) | 562 | SNP:c.257T > G (p.Leu86Arg) | VCV000067414 | Congenital long QT Syn. | Not Prov. |
| 302 | SNP:c.1848C > G (p.Tyr616Ter) | 563 | SNP:c.2581A > C (p.Asn861His) | VCV000067415 | Congenital long QT Syn. | Not Prov. |
| 303 | SNP:c.1849T > C (p.Phe617Leu) | 564 | SNP:c.2582A > C (p.Asn861Thr) | VCV000067416 | Congenital long QT Syn. | Not Prov. |
| 304 | SNP:c.1851C > A (p.Phe617Leu) | 583 | SNP:c.2635G > C (p.Gly879Arg) | VCV000067421 | Congenital long QT Syn. | Not Prov. |
| 305 | SNP:c.1853C > G (p.Thr618Ser) | 601 | SNP:c.2681G > T (p.Arg894Leu) | VCV000067425 | Congenital long QT Syn. | Not Prov. |
| 306 | SNP:c.1853C > T (p.Thr618Ile) | 629 | SNP:c.2744C > T (p.Ala915Val) | VCV000067431 | Not Prov. | Not Prov. |
| 307 | SNP:c.1858A > G (p.Ser620Gly) | 648 | SNP:c.2773G > A (p.Gly925Arg) | VCV000067439 | Not Prov. | Not Prov. |
| 308 | SNP:c.1859G > A (p.Ser620Asn) | 675 | SNP:c.2842C > A (p.Arg948Ser) | VCV000067442 | Congenital long QT Syn. | Not Prov. |
| 309 | SNP:c.185G > A (p.Arg62Gln) | 687 | SNP:c.286A > G (p.Ile96Val) | VCV000067446 | Congenital long QT Syn. | Not Prov. |
| 310 | SNP:c.1862G > A (p.Ser621Asn) | 692 | SNP:c.2879G > A (p.Ser960Asn) | VCV000067447 | Congenital long QT Syn. | Not Prov. |
| 311 | SNP:c.1863C > G (p.Ser621Arg) | 693 | SNP:c.287T > C (p.Ile96Thr) | VCV000067448 | Congenital long QT Syn. | Not Prov. |
| 312 | SNP:c.1864C > T (p.Leu622Phe) | 724 | SNP:c.296A > C (p.Tyr99Ser) | VCV000067457 | Congenital long QT Syn. | Not Prov. |
| 313 | SNP:c.1868C > T (p.Thr623Ile) | 754 | SNP:c.305A > C (p.Asp102Ala) | VCV000067464 | Congenital long QT Syn. | Not Prov. |
| 314 | SNP:c.1870A > T (p.Ser624Cys) | 755 | SNP:c.305A > T (p.Asp102Val) | VCV000067465 | Congenital long QT Syn. | Not Prov. |
| 315 | SNP:c.1873G > C (p.Val625Leu) | 786 | SNP:c.3146T > C (p.Leu1049Pro) | VCV000067474 | Congenital long QT Syn. | Not Prov. |
| 316 | SNP:c.1874T > A (p.Val625Glu) | 793 | SNP:c.3173C > A (p.Ala1058Glu) | VCV000067476 | Not Prov. | Not Prov. |
| 317 | SNP:c.1874T > C (p.Val625Ala) | 795 | SNP:c.317T > A (p.Phe106Tyr) | VCV000067477 | Congenital long QT Syn. | Not Prov. |
| 318 | SNP:c.1876G > A (p.Gly626Ser) | 798 | SNP:c.318C > A (p.Phe106Leu) | VCV000067478 | Congenital long QT Syn. | Not Prov. |
| 319 | SNP:c.1877G > A (p.Gly626Asp) | 801 | SNP:c.3196C > G (p.Leu1066Val) | VCV000067479 | Congenital long QT Syn. | Not Prov. |
| 320 | SNP:c.1877G > C (p.Gly626Ala) | 826 | SNP:c.3302C > T (p.Pro1101Leu) | VCV000067487 | Congenital long QT Syn. | Not Prov. |
| 321 | SNP:c.1877G > T (p.Gly626Val) | 832 | SNP:c.332A > T (p.Asp111Val) | VCV000067489 | Congenital long QT Syn. | Not Prov. |
| 322 | SNP:c.1879T > A (p.Phe627Ile) | 849 | SNP:c.3404G > A (p.Arg1135His) | VCV000067493 | short QT Syn. | Not Prov. |
| 323 | SNP:c.1879T > C (p.Phe627Leu) | 851 | SNP:c.340C > T (p.Pro114Ser) | VCV000067494 | Congenital long QT Syn. | Not Prov. |
| 324 | SNP:c.1881C > A (p.Phe627Leu) | 854 | SNP:c.3430G > A (p.Ala1144Thr) | VCV000067495 | Congenital long QT Syn. | Not Prov. |
| 325 | SNP:c.1881C > G (p.Phe627Leu) | 871 | SNP:c.371T > C (p.Met124Thr) | VCV000067500 | Congenital long QT Syn. | Not Prov. |
| 326 | SNP:c.1882G > A (p.Gly628Ser) | 872 | SNP:c.371T > G (p.Met124Arg) | VCV000067501 | Congenital long QT Syn. | Not Prov. |
| 327 | SNP:c.1882G > C (p.Gly628Arg) | 907 | SNP:c.47A > C (p.Asp 16Ala) | VCV000067507 | Congenital long QT Syn. | Not Prov. |
| 328 | SNP:c.1883G > C (p.Gly628Ala) | 921 | SNP:c.559G > A (p.Gly187Ser) | VCV000067511 | Not Prov. | Not Prov. |
| 329 | SNP:c.1883G > T (p.Gly628Val) | 939 | SNP:c.644T > G (p.Val215Gly) | VCV000067515 | Not Prov. | Not Prov. |
| 330 | SNP:c.1885A > G (p.Asn629Asp [symbol] | 944 | SNP:c.65T > C (p.Phe22Ser) | VCV000067517 | Congenital long QT Syn. | Not Prov. |
| 331 | SNP:c.1886A > C (p.Asn629Thr) | 960 | SNP:c.712G > A (p.Gly238Ser) | VCV000067519 | Congenital long QT Syn. | Not Prov. |
| 332 | SNP:c.1886A > G (p.Asn629Ser) | 962 | SNP:c.722C > T (p.Pro241Leu) | VCV000067520 | Congenital long QT Syn. | Not Prov. |
| 333 | SNP:c.1886A > T (p.Asn629Ile) | 963 | SNP:c.724C > G (p.Arg242Gly) | VCV000067521 | Congenital long QT Syn. | Not Prov. |
| 334 | SNP:c.1887C > A (p.Asn629Lys) | 971 | SNP:c.751C > G (p.Pro251Ala) | VCV000067522 | Not Prov. | Not Prov. |
| 335 | SNP:c.1888G > A (p.Val630Ile) | 973 | SNP:c.754C > G (p.Arg252Gly) | VCV000067524 | Congenital long QT Syn. | Not Prov. |
| 336 | SNP:c.1888G > C (p.Val630Leu) | 976 | SNP:c.762C > G (p.His254Gln) | VCV000067525 | Not Prov. | Not Prov. |
| 337 | SNP:c.1889T > C (p.Val630Ala) | 984 | SNP:c.77G > T (p.Ser26Ile) | VCV000067528 | Congenital long QT Syn. | Not Prov. |
| 338 | SNP:c.188C > A (p.Pro63His) | 987 | SNP:c.805C > T (p.Arg269Trp) | VCV000067529 | Congenital long QT Syn. | Not Prov. |
| 339 | SNP:c.1891T > G (p.Ser631Ala) | 989 | SNP:c.80G > C (p.Arg27Pro) | VCV000067530 | Congenital long QT Syn. | Not Prov. |
| 340 | SNP:c.1892C > T (p.Ser631Phe) | 993 | SNP:c.818G > A (p.Arg273Gln) | VCV000067531 | SUDDEN INFANT DEATH Syn. | Not Prov. |
| 341 | SNP:c.1894C > G (p.Pro632Ala) | 997 | SNP:c.82A > G (p.Lys28Glu) | VCV000067532 | Congenital long QT Syn. | Not Prov. |
| 342 | SNP:c.1894C > T (p.Pro632Ser) | 1000 | SNP:c.835G > A (p.Val279Met) | VCV000067534 | SUDDEN INFANT DEATH Syn. | Not Prov. |
| 343 | SNP:c.1897A > C (p.Asn633His) | 1008 | SNP:c.86T > C (p.Phe29Ser) | VCV000067536 | Congenital long QT Syn. | Not Prov. |
| 344 | SNP:c.1897A > G (p.Asn633Asp) | 1020 | SNP:c.902G > T (p.Arg301Leu) | VCV000067542 | Congenital long QT Syn. | Not Prov. |
| 345 | SNP:c.1898A > G (p.Asn633Ser) | 1030 | SNP:c.92T > G (p.Ile31Ser) | VCV000067546 | Congenital long QT Syn. | Not Prov. |
| 346 | SNP:c.1898A > T (p.Asn633Ile) | 1034 | SNP:c.940G > A (p.Gly314Ser) | VCV000067548 | Congenital long QT Syn. | Not Prov. |
| 347 | SNP:c.1900A > G (p.Thr634Ala) | 1040 | SNP:c.959C > T (p.Ser320Leu) | VCV000067550 | Congenital long QT Syn. | Not Prov. |
| 348 | SNP:c.1901C > T (p.Thr634Ile) | 104 | SNP:c.1425C > A (p.Tyr475Ter) | VCV001178326 | Long QT Syn. 2 | Pathogenic |
| 349 | SNP:c.1903A > G (p.Asn635Asp [symbol] | 255 | SNP:c.1764C > G (p.Asn588Lys) | VCV000014436 | short QT Syn.\|Short QT Syn. 1 | Pathogenic(LR: Apr. 1, 2005) |
| 350 | SNP:c.1904A > G (p.Asn635Ser) | 858 | SNP:c.344T > G (p.Val115Gly) | VCV000200276 | Not Prov. | Pathogenic(LR: Apr. 10, 2014) |
| 351 | SNP:c.1904A > T (p.Asn635Ile) | 443 | SNP:c.214C > T (p.Pro72Ser) | VCV000200564 | Not Prov. | Pathogenic(LR: Apr. 12, 2014) |
| 352 | SNP:c.1905C > G (p.Asn635Lys) | 174 | SNP:c.1655T > C (p.Leu552Ser) | VCV000067225 | Long QT Syn.\|Long QT Syn. 2\|Congenital [symbol] | Pathogenic(LR: Apr. 15, 2021) |
| 353 | SNP:c.1907C > T (p.Ser636Leu) | 355 | SNP:c.1909G > T (p.Glu637Ter) | VCV000977166 | Long QT Syn. | Pathogenic(LR: Apr. 2, 2019) |
| 354 | SNP:c.1909G > A (p.Glu637Lys) | 566 | SNP:c.2582A > T (p.Asn861Ile) | VCV000014440 | Congenital long QT Syn.\|Long QT Syn. 2\| [symbol] | Pathogenic(LR: Apr. 20, 2004) |
| 355 | SNP:c.1909G > T (p.Glu637Ter) | 324 | SNP:c.1881C > A (p.Phe627Leu) | VCV000200747 | Long QT Syn.\|Not Prov. | Pathogenic(LR: Apr. 22, 2020) |
| 356 | SNP:c.1910A > G (p.Glu637Gly) | 354 | SNP:c.1909G > A (p.Glu637Lys) | VCV000067329 | Long QT Syn.\|Congenital long QT Syn. | Pathogenic(LR: Apr. 26, 2018) |
| 357 | SNP:c.1911G > C (p.Glu637Asp) | 747 | SNP:c.303A > T (p.Lys101Asn) | VCV000200590 | Not Prov. | Pathogenic(LR: Apr. 28, 2014) |
| 358 | SNP:c.1912A > G (p.Lys638Glu) | 367 | SNP:c.1922C > T (p.Ser641Phe) | VCV000067337 | Congenital long QT Syn.\|Long QT Syn. | Pathogenic(LR: Apr. 30, 2019) |
| 359 | SNP:c.1913A > G (p.Lys638Arg) | 170 | SNP:c.164C > A (p.Ser55Ter) | VCV000418597 | Long QT Syn.\|Not Prov. | Pathogenic(LR: Apr. 7, 2021) |
| 360 | SNP:c.1914G > T (p.Lys638Asn) | 330 | SNP:c.1885A > G (p.Asn629Asp) | VCV000067313 | Congenital long QT Syn.\|Not Prov. | Pathogenic(LR: Apr. 9, 2015) |
| 361 | SNP:c.1918T > C (p.Phe640Leu) | 399 | SNP:c.198C > A (p.Cys66Ter) | VCV000863419 | Long QT Syn. | Pathogenic(LR: Apr. 9, 2019) |
| 362 | SNP:c.1918T > G (p.Phe640Val) | 580 | SNP:c.2626G > T (p.Glu876Ter) | VCV000488692 | Long QT Syn.\|Not Prov. | Pathogenic(LR: Aug. 14, 2020) |
| 363 | SNP:c.1919T > G (p.Phe640Cys) | 525 | SNP:c.2417G > C (p.Gly806Ala) | VCV000200453 | Not Prov. | Pathogenic(LR: Aug. 16, 2012) |
| 364 | SNP:c.191G > A (p.Cys64Tyr) | 734 | SNP:c.3003G > A (p.Trp1001Ter) | VCV000014431 | Long QT Syn. 2\|Not Prov. Long QT Syn. | Pathogenic(LR: Aug. 16, 2019) |
| 365 | SNP:c.1920C > A (p.Phe640Leu) | 286 | SNP:c.1825G > A (p.Asp609Asn) | VCV000067286 | Long QT Syn.\|Congenital long QT Syn.\|Not [symbol] | Pathogenic(LR: Aug. 22, 2019) |
| 366 | SNP:c.1920C > G (p.Phe640Leu) | 130 | SNP:c.1502A > G (p.Asp501Gly) | VCV000067210 | Not Prov.\|Congenital long QT Syn. | Pathogenic(LR: Aug. 24, 2012) |
| 367 | SNP:c.1922C > T (p.Ser641Phe) | 733 | SNP:c.3002G > A (p.Trp1001Ter) | VCV000200513 | Not Prov.\|Arrhythmia\|Long QT Syn. | Pathogenic(LR: Aug. 27, 2020) |
| 368 | SNP:c.1926C > G (p.Ile642Met) | 744 | SNP:c.3027C > G (p.Tyr1009Ter) | VCV000379293 | Long QT Syn.\|Not Prov. | Pathogenic(LR: Aug. 29, 2018) |
| 369 | SNP:c.9129C > A (p.Cys643Ter) | 16 | SNP:c.162C > G (p.Tyr54Ter) | VCV000519501 | Cardiovas. pheno. | Pathogenic(LR: Aug. 31, 2017) |
| 370 | SNP:c.192C > G (p.Cys64Trp) | 378 | SNP:c.193A > C (p.Thr65Ter) | VCV000014434 | Congenital long QT Syn.\|Long QT Syn. 2 | Pathogenic(LR: Dec. 13, 2002) |
| 371 | SNP:c.1930G > A (p.Val644Ile) | 385 | SNP:c.1659T > A (p.Tyr652Ter) | VCV000200402 | Not Prov. | Pathogenic(LR: Dec. 14, 2017) |
| 372 | SNP:c.1930G > C (p.Val644Leu) | 719 | SNP:c.2952C > A (p.Cys984Ter) | VCV000200510 | Not Prov. | Pathogenic(LR: Dec. 3, 2013) |
| 373 | SNP:c.1930G > T (p.Val644Phe) | 369 | SNP:c.1929C > A (p.Cys643Ter) | VCV000392341 | Not Prov. | Pathogenic(LR: Dec. 30, 2016) |
| 374 | SNP:c.1933A > C (p.Met645Leu) | 72 | SNP:c.1330G > T (p.Glu444Ter) | VCV000200337 | Not Prov. | Pathogenic(LR: Dec. 7, 2012) |
| 375 | SNP:c.1933A > G (p.Met645Val) | 124 | SNP:c.1479C > A (p.Tyr493Ter) | VCV000237291 | Long QT Syn. | Pathogenic(LR: Dec. 9, 2015) |
| 376 | SNP:c.1933A > T (p.Met645Leu) | 222 | SNP:c.1714G > C (p.Gly572Arg) | VCV000014429 | Congenital long QT Syn.\|Long QT Syn. 2 | Pathogenic(LR: Feb. 1, 2000) |
| 377 | SNP:c.1935G > A (p.Met645Ile) | 436 | SNP:c.2111G > C (p.Gly71Arg) | VCV000067366 | Long QT Syn.\|Congenital long QT Syn.\|Not [symbol] | Pathogenic(LR: Feb. 11, 2019) |
| 378 | SNP:c.193A > C (p.Thr65Pro) | 802 | SNP:c.31C > T (p.Gln11Ter) | VCV000200588 | Not Prov. | Pathogenic(LR: Feb. 15, 2012) |
| 379 | SNP:c.1942G > A (p.Gly648Ser) | 96 | SNP:c.1408A > G (p.Asn470Asp) | VCV000014421 | Congenital long QT Syn.\|Long QT Syn. 2 | Pathogenic(LR: Feb. 17, 2006) |
| 380 | SNP:c.1943G > A (p.Gly648Asp) | 302 | SNP:c.1848C > G (p.Tyr616Ter) | VCV000560696 | Long QT Syn. 2 | Pathogenic(LR: Feb. 17, 2018) |
| 381 | SNP:c.1945T > C (p.Ser649Pro) | 522 | SNP:c.2414T > C (p.Phe805Ser) | VCV000067396 | Congenital long QT Syn.\|Not Prov. | Pathogenic(LR: Feb. 2, 2012) |
| 382 | SNP:c.1946C > T (p.Ser649Phe) | 260 | SNP:c.1778T > C (p.Ile93Thr) | VCV000067270 | Not Prov.\|Congenital long QT Syn. | Pathogenic(LR: Feb. 2, 2014) |
| 383 | SNP:c.194C > G (p.Thr65Ser) | 406 | SNP:c.2026C > T (p.Gln676Ter) | VCV000200405 | Not Prov. | Pathogenic(LR: Feb. 2, 2014) |
| 384 | SNP:c.1952T > G (p.Met651Arg) | 726 | SNP:c.2987A > T (p.Asn996Ile) | VCV000067458 | Not Prov.\|Long QT Syn. 2\|Congenital long Q [symbol] | Pathogenic(LR: Feb. 24, 2020) |
| 385 | SNP:c.1956T > A (p.Tyr652Ter) | 905 | SNP:c.461G > A (p.Trp154Ter) | VCV000456935 | Long QT Syn. | Pathogenic(LR: Feb. 3, 2017) |
| 386 | SNP:c.1963A > G (p.Ile655Val) | 179 | SNP:c.1675C > T (p.Leu559Phe) | VCV000200363 | Not Prov. | Pathogenic(LR: Feb. 5, 2014) |
| 387 | SNP:c.1967T > G (p.Phe656Cys) | 186 | SNP:c.1681G > C (p.Ala561Pro) | VCV000067230 | Congenital long QT Syn.\|Cardiovas. pheno [symbol] | Pathogenic(LR: Feb. 5, 2018) |
| 388 | SNP:c.1969G > A (p.Gly657Ser) | 365 | SNP:c.1920C > A (p.Phe640Leu) | VCV000067336 | Long QT Syn. 2\|Congenital long QT Syn. | Pathogenic(LR: Jan. 1, 2013) |
| 389 | SNP:c.1969G > C (p.Gly657Arg) | 359 | SNP:c.1913A > G (p.Lys638Arg) | VCV000200395 | Not Prov. | Pathogenic(LR: Jan. 10, 2014) |
| 390 | SNP:c.1969G > T (p.Gly657Cys) | 215 | SNP:c.1707C > G (p.Tyr569Ter) | VCV000489342 | Not Prov. | Pathogenic(LR: Jan. 15, 2018) |
| 391 | SNP:c.196T > C (p.Cys66Arg) | 267 | SNP:c.1787C > A (p.Pro596His) | VCV000067274 | Not Prov.\|Congenital long QT Syn. | Pathogenic(LR: Jan. 31, 2014) |
| 392 | SNP:c.196T > G (p.Cys66Gly) | 254 | SNP:c.1764C > A (p.Asn588Lys) | VCV000014437 | short QT Syn.\|Short QT Syn. 1 | Pathogenic(LR: Jan. 6, 2004) |
| 393 | SNP:c.1970G > T (p.Gly657Val) | 177 | SNP:c.1672G > C (p.Ala558Pro) | VCV000014444 | Congenital long QT Syn. Long QT Syn. 2 | Pathogenic(LR: Jul. 1, 2008) |
| 394 | SNP:c.1973A > G (p.Asn658Ser) | 374 | SNP:c.1933A > C (p.Met645LEu) | VCV000869431 | Long QT Syn. 2 | Pathogenic(LR: Jul. 11, 2019) |
| 395 | SNP:c.1979C > T (p.Ser660Leu) | 714 | SNP:c.2932G > T (p.Glu978Ter) | VCV000200484 | Not Prov. | Pathogenic(LR: Jul. 15, 2014) |
| 396 | SNP:c.197G > A (p.Cys66Tyr) | 532 | SNP:c.2464G > A (p.Val822Met) | VCV000014424 | Not Prov.\|Long QT Syn.\|Long QT Syn. 1\| [symbol] | Pathogenic(LR: Jul. 23, 2020) |
| 397 | SNP:c.1982C > T (p.Ala661Val) | 259 | SNP:c.1778T > A (p.Ile593Lys) | VCV000067269 | Long QT Syn.\|Congenital long QT Syn. | Pathogenic(LR: Jul. 25, 2017) |
| 398 | SNP:c.1985T > C (p.Ile662Thr) | 446 | SNP:c.215C > T (p.Pro72Leu) | VCV000067370 | Congenital long QT Syn.\|Not Prov. | Pathogenic(LR: Jul. 3, 2019) |
| 399 | SNP:c.198C > A (p.Cys66Ter) | 53 | SNP:c.1264G > A (p.Ala422Thr) | VCV000067174 | Not Prov.\|Congenital long QT Syn. | Pathogenic(LR: Jul. 31, 2012) |
| 400 | SNP:c.1A > T (p.Met1Leu) | 803 | SNP:c.3202C > T (p.Gln1068Ter) | VCV000446417 | Long QT Syn. 2 | Pathogenic(LR: Jul. 4, 2017) |
| 401 | SNP:c.2003C > A (p.S668Ter) | 710 | SNP:c.2931C > A (p.Cys977Ter) | VCV000568003 | Long QT Syn. | Pathogenic(LR: Jul. 5, 2018) |
| 402 | SNP:c.2003G > C (p.Gly669Ala) | 536 | SNP:c.2477C > T (p.Thr826Ile) | VCV000067403 | Not Prov.\|Congenital long QT Syn. | Pathogenic(LR: Jun. 12, 2013) |
| 403 | SNP:c.200A > G (p.asp67Gly) | 185 | SNP:c.1681G > A (p.Ala561Thr) | VCV000067229 | Long QT Syn.\|Inborn genetic diseases\|Not P [symbol] | Pathogenic(LR: Jun. 15, 2020) |
| 404 | SNP:c.2012C > G (p.Ala671Gly) | 418 | SNP:c.2062C > T (p.Gln688Ter) | VCV000456901 | Long QT Syn. | Pathogenic(LR: Jun. 16, 2017) |
| 405 | SNP:c.2014C > T (p.Arg672Cys) | 125 | SNP:c.147C > G (p.Cys49Trp) | VCV000200555 | Not Prov. | Pathogenic(LR: Jun. 19, 2013) |
| 406 | SNP:c.2026C > T (p.Gln676Ter) | 229 | SNP:c.1726C > T (p.Gln576Ter) | VCV000419311 | Not Prov. | Pathogenic(LR: Jun. 23, 2015) |
| 407 | SNP:c.202T > C (p.Phe68Leu) | 1014 | SNP:c.87C > A (p.Phe29Leu) | VCV000067538 | Long QT Syn.\|Congenital long QT Syn. | Pathogenic(LR: Jun. 29, 2020) |
| 408 | SNP:c.2030T > C (p.Met677Thr) | 33 | SNP:c.1193G > A (p.Trp398Ter) | VCV000200327 | Not Prov.\|Long QT Syn. | Pathogenic(LR: Jun. 4, 2020) |
| 409 | SNP:c.2033T > C (p.Leu678Pro) | 194 | SNP:c.1689G > A (p.Trp563Ter) | VCV000526968 | Not Prov.\|Long QT Syn. | Pathogenic(LR: Jun. 6, 2018) |
| 410 | SNP:c.2035C > T (p.Arg679Trp) | 540 | SNP:c.2494A > T (p.Lys832Ter) | VCV000200460 | Not Prov. | Pathogenic(LR: Jun. 7, 2018) |
| 411 | SNP:c.2036G > A (p.Arg679Gln) | 653 | SNP:c.2780G > A (p.Trp927Ter) | VCV000200499 | Long QT Syn. | Pathogenic(LR: Mar. 1, 2018) |
| 412 | SNP:c.203T > G (p.Phe68Cys) | 50 | SNP:c.125T > C (p.Ile42Thr) | VCV000200546 | Not Prov. | Pathogenic(LR: Mar. 15, 2013) |
| 413 | SNP:c.2042G > A (p.Arg681Gln) | 366 | SNP:c.1920C > G (p.Phe640Leu) | VCV000423753 | Not Prov. | Pathogenic(LR: Mar. 3, 2017) |
| 414 | SNP:c.2046G > C (p.Glu682Asp) | 51 | SNP:c.1262C > A (p.Thr421Lys) | VCV000200331 | Not Prov. | Pathogenic(LR: Mar. 31, 2013) |
| 415 | SNP:c.2053C > T (p.Arg685Cys) | 307 | SNP:c.1858A > G (p.Ser620Gly) | VCV001189275 | Not Prov. | Pathogenic(LR: Mar. 5, 2021) |
| 416 | SNP:c.2054G > A (p.Arg685His) | 326 | SNP:c.1882G > A (p.Gly628Ser) | VCV000014427 | Long QT Syn.\|Congenital long QT Syn.\|Lon [symbol] | Pathogenic(LR: May 12, 2020) |
| 417 | SNP:c.2059C > T (p.His687Tyr) | 292 | SNP:c.1831T > C (p.Tyr611His) | VCV000029778 | Congenital long QT Syn.\|Long QT Syn. 2 | Pathogenic(LR: May 13, 2005) |
| 418 | SNP:c.2062C > T (p.Gln688Ter) | 261 | SNP:c.1778T > G (p.Ile593Arg) | VCV000014423 | Congenital long QT Syn.\|Long QT Syn. 2\|No [symbol] | Pathogenic(LR: May 24, 2019) |
| 419 | SNP:c.206T > A (p.Leu69Gln) | 347 | SNP:c.1900A > G (p.Thr634Ala) | VCV000200391 | Not Prov. | Pathogenic(LR: May 28, 2014) |
| 420 | SNP:c.206T > C (p.Leu69Pro) | 226 | SNP:c.1715G > T (p.Gly572Val) | VCV000067251 | Congenital long QT Syn.\|Not Prov. | Pathogenic(LR: May 4, 2016) |
| 421 | SNP:c.2078T > C (p.Leu693Pro) | 239 | SNP:c.1744C > T (p.Arg582Cys) | VCV000014428 | Not Prov.\|Long QT Syn.\|Congenital long QT [symbol] | Pathogenic(LR: Nov. 10, 2020) |
| 422 | SNP:c.2080C > T (p.Arg694Cys) | 748 | SNP:c.3040C > T (p.Arg1014Ter) | VCV000200518 | Not Prov.\|Long QT Syn. | Pathogenic(LR: Nov. 13, 2019) |
| 423 | SNP:c.2081G > A (p.Arg694His) | 237 | SNP:c.1742C > A (p.Ser581Ter) | VCV000200737 | Not Prov. | Pathogenic(LR: Nov. 16, 2011) |
| 424 | SNP:c.2083C > T (p.Gln695Ter) | 567 | SNP:c.2587C > T (p.Arg863Ter) | VCV000220208 | Inborn genetic diseases\|Not Prov.\|Long QT S [symbol] | Pathogenic(LR: Nov. 2, 2020) |
| 425 | SNP:c.2086C > T (p.Arg696Cys) | 742 | SNP:c.301A > T (p.Lys101Ter) | VCV000200586 | Not Prov. | Pathogenic(LR: Nov. 20, 2013) |
| 426 | SNP:c.2087G > C (p.Arg696Pro) | 21 | SNP:c.1096C > T (p.Arg366Ter) | VCV000200321 | Not Prov.\|Long QT Syn. | Pathogenic(LR: Nov. 21, 2019) |
| 427 | SNP:c.208C > A (p.His70Asn) | 375 | SNP:c.1933A > G (p.Met645Val) | VCV000067341 | Congenital long QT Syn.\|Not Prov. | Pathogenic(LR: Nov. 22, 2013) |
| 428 | SNP:c.2092G > A (p.Glu698Lys) | 41 | SNP:c.1229G > A (p.Trp410Ter) | VCV000972695 | Long QT Syn. 2 | Pathogenic(LR: Nov. 22, 2019) |
| 429 | SNP:c.2094G > T (p.Glu698Asp) | 140 | SNP:c.156C > A (p.Cys52Ter) | VCV000200772 | Long QT Syn. | Pathogenic(LR: Nov. 3, 2019) |
| 430 | SNP:c.2097G > T (p.Glu699Asp) | 266 | SNP:c.1786C > G (p.Pro596Ala) | VCV000218093 | Long QT Syn. 2 | Pathogenic(LR: Nov. 4, 2015) |
| 431 | SNP:c.209A > G (p.His70Arg) | 221 | SNP:c.1714G > A (p.Gly572Ser) | VCV000067248 | Long QT Syn. 2\|Not Prov.\|Congenital long Q [symbol] | Pathogenic(LR: Nov. 8, 2019) |
| 432 | SNP:c.2104C > T (p.Gln702Ter) | 190 | SNP:c.1685A > G (p.His562Arg) | VCV000067232 | Long QT Syn.\|Congenital long QT Syn. | Pathogenic(LR: Oct. 1, 2019) |
| 433 | SNP:c.2117C > G (p.Ser706Cys) | 102 | SNP:c.1421C > T (p.Thr474Ile) | VCV000067198 | Not Prov.\|Congenital long QT Syn. | Pathogenic(LR: Oct. 10, 2014) |
| 434 | SNP:c.2117C > T (p.Ser706Phe) | 3 | SNP:c.1003C > T (p.Gln335Ter) | VCV000968402 | Long QT Syn. | Pathogenic(LR: Oct. 10, 2019) |
| 435 | SNP:c.211G > A (p.Gly71Arg) | 1041 | SNP:c.95C > T (p.Ala32Val) | VCV000869439 | Long QT Syn. 2 | Pathogenic(LR: Oct. 12, 2019) |
| 436 | SNP:c.211G > C (p.Gly71Arg) | 173 | SNP:c.1655T > A (p.Leu552Ter) | VCV000648088 | Not Prov.\|Long QT Syn. | Pathogenic(LR: Oct. 20, 2020) |
| 437 | SNP:c.211G > T (p.Gly71Trp) | 401 | SNP:c.2003C > A (p.Ser668Ter) | VCV000620172 | Not Prov. | Pathogenic(LR: Oct. 22, 2018) |
| 438 | SNP:c.2122A > G (p.Thr708Ala) | 155 | SNP:c.1600C > T (p.Arg534Cys) | VCV000067220 | Not Prov.\|Long QT Syn.\|Congenital long Q [symbol] | Pathogenic(LR: Oct. 24, 2020) |
| 439 | SNP:c.2128G > A (p.Gly710Ser) | 193 | SNP:c.1688G > A (p.Trp563Ter) | VCV000943351 | Long QT Syn. | Pathogenic(LR: Oct. 26, 2019) |
| 440 | SNP:c.212G > A (p.Gly71Glu) | 992 | SNP:c.817C > T (p.Arg273Ter) | VCV001076382 | Long QT Syn. | Pathogenic(LR: Oct. 26, 2020) |
| 441 | SNP:c.2131A > G (p.Ile711Val) | 800 | SNP:c.3193C > T (p.Gln1065Ter) | VCV000519524 | Cardiovas. pheno.\|Long QT Syn. | Pathogenic(LR: Oct. 28, 2020) |
| 442 | SNP:c.2144C > T (p.Ala715Val) | 278 | SNP:c.1810G > A (p.Gly604Ser) | VCV000067281 | Not Prov.\|Congenital long QT Syn.\|Long Q [symbol] | Pathogenic(LR: Oct. 29, 2020) |
| 443 | SNP:c.214C > T (p.Pro72Ser) | 565 | SNP:c.2582A > G (p.Asn861Ser) | VCV000200471 | Not Prov. | Pathogenic(LR: Oct. 30, 2013) |
| 444 | SNP:c.215C > A (p.Pro72Gln) | 332 | SNP:c.1886A > G (p.Asn629Ser) | VCV000067315 | Long QT Syn. 2\|Long QT Syn.\|Congenital [symbol] | Pathogenic(LR: Oct. 31, 2018) |
| 445 | SNP:c.215C > G (p.Pro72Arg) | 432 | SNP:c.2104C > T (p.Gln702Ter) | VCV000200407 | Not Prov.\|Long QT Syn. 2\|Short QT Syn. 1 | Pathogenic(LR: Oct. 31, 2018) |
| 446 | SNP:c.215C > T (p.Pro72Leu) | 273 | SNP:c.1801G > A (p.Gly601Ser) | VCV000067279 | Long QT Syn. 2\|Congenital long QT Syn.\| [symbol] | Pathogenic(LR: Oct. 5, 2020) |
| 447 | SNP:c.2162C > T (p.Pro721Leu) | 919 | SNP:c.545C > A (p.Ser182Ter) | VCV000372376 | Long QT Syn.\|Not Prov. | Pathogenic(LR: Oct. 9, 2018) |
| 448 | SNP:c.2167T > C (p.Cys723Arg) | 296 | SNP:c.1837A > T (p.Thr613Ser) | VCV000200743 | Not Prov. | Pathogenic(LR: Sep. 12, 2014) |
| 449 | SNP:c.2167T > G (p.Cys723Gly) | 211 | SNP:c.1704G > A (p.Trp568Ter) | VCV000200370 | Not Prov.\|Cardiovas. pheno [symbol] | Pathogenic(LR: Sep. 15, 2017) |
| 450 | SNP:c.2168G > A (p.Cys723Tyr) | 112 | SNP:c.1468G > A (p.Ala490Thr) | VCV000014430 | Long QT Syn.\|Congenital long QT Syn.\|Long [symbol] | Pathogenic(LR: Sep. 21, 2019) |
| 451 | SNP:c.2171T > C (p.Leu724Pro) | 463 | SNP:c.2230C > T (p.Arg744Ter) | VCV000180383 | Long QT Syn. 2\|Cardiovas. pheno.\|Long QT [symbol] | Pathogenic(LR: Sep. 23, 2021) |
| 452 | SNP:c.2182A > T (p.Ile728Phe) | 950 | SNP:c.685G > T (p.Glu229Ter) | VCV000180379 | Long QT Syn. 2\|Not Prov.\|Long QT Syn. | Pathogenic(LR: Sep. 26, 2017) |
| 453 | SNP:c.2192A > C (p.His731Pro) | 298 | SNP:c.1841C > T (p.Ala614Val) | VCV000029777 | Long QT Syn.\|Congenital long QT Syn.\|Long [symbol] | Pathogenic(LR: Sep. 27, 2018) |
| 454 | SNP:c.2200C > T (p.Arg734Cys) | 970 | SNP:c.749C > A (p.Ser250Ter) | VCV000200301 | Not Prov. | Pathogenic(LR: Sep. 30, 2019) |
| 455 | SNP:c.2204C > T (p.Ser735Leu) | 380 | SNP:c.1943G > A (p.Gly648Asp) | VCV000200753 | Not Prov. | Pathogenic(LR: Sep. 9, 2011) |
| 456 | SNP:c.220A > C (p.Thr74Pro) | 301 | SNP:c.1847A > G (p.Tyr616Cys) | VCV000067295 | Not Prov.\|Long QT Syn.\|Congenital long QT [symbol] | Pathogenic/Likely pathogenic(LR: Apr. 12, 2019) |
| 457 | SNP:c.220A > G (p.Thr74Ala) | 187 | SNP:c.1682C > T (p.Ala561Val) | VCV000014420 | Cardiovas. pheno.\|Congenital long QT Syn.\| [symbol] | Pathogenic/Likely pathogenic(LR: Apr. 2, 2020) |
| 458 | SNP:c.2216A > G (p.His739Arg) | 534 | SNP:c.2467C > T (p.Arg823Trp) | VCV000067402 | Long QT Syn.\|Congenital long QT Syn.\|Card [symbol] | Pathogenic/Likely pathogenic(LR: Aug. 3, 2020) |
| 459 | SNP:c.221C > G (p.Thr74Arg) | 424 | SNP:c.2083C > T (p.Gln695Ter) | VCV000420923 | Not Prov.\|Long QT Syn. | Pathogenic/Likely pathogenic(LR: Dec. 23, 2017) |
| 460 | SNP:c.221C > T (p.Thr74Met) | 318 | SNP:c.1876G > A (p.Gly626Ser) | VCV000067304 | Long QT Syn. 2\|Congenital long QT Syn.\| [symbol] | Pathogenic/Likely pathogenic(LR: Dec. 27, 2019) |
| 461 | SNP:c.2221A > C (p.Lys741Gln) | 543 | SNP:c.2509G > A (p.Asp837Asn) | VCV000067405 | Long QT Syn. 2\| Long QT Syn.\|Congenital [symbol] | Pathogenic/Likely pathogenic(LR: Feb. 7, 2020) |
| 462 | SNP:c.2222A > G (p.Lys741Arg) | 345 | SNP:c.1898A > G (p.Asn633Ser) | VCV000067323 | Long QT Syn. 2\|Long QT Syn.\|Cardiovas. ph [symbol] | Pathogenic/Likely pathogenic(LR: Jan. 24, 2020) |
| 463 | SNP:c.2230C > T (p.Arg744Ter) | 431 | SNP:c.209A > G (p.His70Arg) | VCV000067363 | Long QT Syn.\|Congenital long QT Syn.\|Not [symbol] | Pathogenic/Likely pathogenic(LR: Jan. 26, 2021) |
| 464 | SNP:c.2231G > A (p.Arg744Gln) | 545 | SNP:c.2510A > G (p.Asp837Gly) | VCV000067407 | Long QT Syn. 2\|Long QT Syn.\|Congenital [symbol] | Pathogenic/Likely pathogenic(LR: Jul. 30, 2020) |
| 465 | SNP:c.2231G > C (p.Arg744Pro) | 331 | SNP:c.1886A > C (p.Asn629Thr) | VCV000067314 | Long QT Syn.\|Congenital long QT Syn.\|Not [symbol] | Pathogenic/Likely pathogenic(LR: Jul. 31, 2016) |
| 466 | SNP:c.2236G > T (p.Ala746Ser) | 523 | SNP:c.2414T > G (p.Phe805Cys) | VCV000067397 | Long QT Syn.\|Cardiovas. pheno.\|Congenital [symbol] | Pathogenic/Likely pathogenic(LR: Jul. 7, 2017) |
| 467 | SNP:c.223C > G (p.Gln75Glu) | 388 | SNP:c.1969G > A (p.Gly657Ser) | VCV000067348 | Congenital long QT Syn. Long QT Syn [symbol] | Pathogenic/Likely pathogenic(LR: Jun. 7, 2021) |
| 468 | SNP:c.2245G > T (p.Gly749Cys) | 470 | SNP:c.2254C > T (p.Arg752Trp) | VCV000067379 | Not Prov.\|Cardiovas. pheno.\|Long QT Syn.\| [symbol] | Pathogenic/Likely pathogenic(LR: Mar. 17, 2021) |
| 469 | SNP:c.2246G > T (p.Gly749Val) | 128 | SNP:c.1501G > A (p.Asp501Asn) | VCV000067208 | Long QT Syn.\|Congenital long QT Syn.\|Card [symbol] | Pathogenic/Likely pathogenic(LR: Mar. 22, 2019) |
| 470 | SNP:c.2254C > T (p.Arg752Trp) | 78 | SNP:c.1348C > T (p.Gln450Ter) | VCV000620154 | Not Prov.\|Long QT Syn. | Pathogenic/Likely pathogenic(LR: Mar. 23, 2021) |
| 471 | SNP:c.2255G > A (p.Arg752Gln) | 487 | SNP:c.2320G > T (p.Asp774Tyr) | VCV000067385 | Congenital long QT Syn.\|Long QT Syn. 2\|No [symbol] | Pathogenic/Likely pathogenic(LR: May 10, 2017) |
| 472 | SNP:c.2257G > T (p.Ala753Ser) | 62 | SNP:c.128A > G (p.Tyr43Cys) | VCV000067182 | Long QT Syn.\|Congenital long QT Syn.\| [symbol] | Pathogenic/Likely pathogenic(LR: May 21, 2020) |
| 473 | SNP:c.2261T > G (p.Leu754Arg) | 245 | SNP:c.1750G > A (p.Gly584Ser) | VCV000067261 | Long QT Syn.\|Long QT Syn. 2\|Short QT Syn [symbol] | Pathogenic/Likely pathogenic(LR: Oct. 11, 2021) |
| 474 | SNP:c.2263G > A (p.Ala755Thr) | 145 | SNP:c.157G > C (p.Gly53Arg) | VCV000067215 | Not Prov.\|Arrhythmia\|Congenital long QT Sy [symbol] | Pathogenic/Likely pathogenic(LR: Oct. 23, 2020) |
| 475 | SNP:c.2266A > G (p.Met756Val) | 444 | SNP:c.215C > A (p.Pro72Gln) | VCV000067368 | Congenital long QT Syn.\|Long QT Syn.\|Long [symbol] | Pathogenic/Likely pathogenic(LR: Oct. 3, 2020) |
| 476 | SNP:c.2271G > C (p.Lys757Asn) | 342 | SNP:c.1894C > T (p.Pro632Ser) | VCV000067321 | Cardiovas. pheno.\|Congenital long QT Syn.\|N [symbol] | Pathogenic/Likely pathogenic(LR: Sep. 17, 2019) |
| 477 | SNP:c.2276A > G (p.Lys759Arg) | 297 | SNP:c.1838C > T (p.Thr613Met) | VCV000067292 | Long QT Syn. 2\|Congenital long QT Syn.\|Sh [symbol] | Pathogenic/Likely pathogenic(LR: Sep. 20, 2020) |
| 478 | SNP:c.227G > T (p.Arg76Leu) | 529 | SNP:c.2453C > T (p.Ser818Leu) | VCV000014432 | Long QT Syn.\|Congenital long QT Syn.\|Long [symbol] | Pathogenic/Likely pathogenic(LR: Sep. 30, 2020) |
| 479 | SNP:c.2291C > G (p.Pro764Arg) | 416 | SNP:c.2054G > A (p.Arg685His) | VCV000979129 | Long QT Syn. 2 | Uncertain significance |
| 480 | SNP:c.2291C > T (p.Pro764Leu) | 491 | SNP:c.2332G > A (p.Ala778Thr) | VCV000979128 | Long QT Syn. 2 | Uncertain significance |
| 481 | SNP:c.2296G > A (p.Gly766Arg) | 688 | SNP:c.2870C > T (p.Pro957Leu) | VCV000979134 | Long QT Syn. 2 | Uncertain significance |
| 482 | SNP:c.2296G > T (p.Gly766Trp) | 956 | SNP:c.704T > C (p.Val235Ala) | VCV001049705 | Not Prov. | Uncertain significance |
| 483 | SNP:c.2299G > T (p.Asp767Tyr) | 1013 | SNP:c.877G > T (p.Ala293Ser) | VCV000200308 | Not Prov. | Uncertain significance(LR: Apr. 1, 2014) |
| 484 | SNP:c.2309T > C (p.Val770Ala) | 539 | SNP:c.2486A > C (p.Asp829Ala) | VCV000851362 | Long QT Syn. | Uncertain significance(LR: Apr. 1, 2020) |
| 485 | SNP:c.2312A > C (p.His771Pro) | 66 | SNP:c.1319C > T (p.Pro440Leu) | VCV000067185 | Arrhythmia\|Congenital long QT Syn.\|Not Pro [symbol] | Uncertain significance(LR: Apr. 1, 2021) |
| 486 | SNP:c.2312A > G (p.His771 Arg) | 1019 | SNP:c.89T > C (p.Ile30Thr) | VCV000067541 | Long QT Syn.\|Congenital long QT Syn. [symbol] | Uncertain significance(LR: Apr. 11, 2018) |
| 487 | SNP:c.2320G > T (p.Asp774Tyr) | 941 | SNP:c.652A > G (p.Met218Val) | VCV000067516 | Long QT Syn.\|Not Prov.\|Congenital long QT [symbol] | Uncertain significance(LR: Apr. 13, 2018) |
| 488 | SNP:c.2326C > T (p.Leu776Phe) | 877 | SNP:c.383A > G (p.Asn128Ser) | VCV000191473 | Long QT Syn.\|Not Prov. | Uncertain significance(LR: Apr. 14, 2017) |
| 489 | SNP:c.232G > A (p.Ala78Thr) | 844 | SNP:c.3379C > T (p.Leu1127Phe) | VCV000923705 | Arrhythmia | Uncertain significance(LR: Apr. 14, 2019) |
| 490 | SNP:c.232G > C (p.Ala78Pro) | 157 | SNP:c.1603G > A (p.Val535Met) | VCV000161256 | Long QT Syn. 2\|Not Prov.\|Long QT Syn.\|Car [symbol] | Uncertain significance(LR: Apr. 15, 2019) |
| 491 | SNP:c.2332G > A (p.Ala778Thr) | 862 | SNP:c.3464C > T (p.Ser1155Leu) | VCV000580441 | Long QT Syn. | Uncertain significance(LR: Apr. 16, 2018) |
| 492 | SNP:c.233C > T (p.Ala78Val) | 13 | SNP:c.1055C > G (p.Pro352Arg) | VCV001038936 | Long QT Syn. | Uncertain significance(LR: Apr. 19, 2018) |
| 493 | SNP:c.2343C > G (p.Phe781Leu) | 405 | SNP:c.2014C > T (p.Arg672Cys) | VCV001020103 | Long QT Syn. | Uncertain significance(LR: Apr. 21, 2020) |
| 494 | SNP:c.2345T > C (p.Ile782Thr) | 932 | SNP:c.58C > G (p.Arg20Gly) | VCV000067513 | Not Prov.\|Congenital long QT Syn. | Uncertain significance(LR: Apr. 22, 2020) |
| 495 | SNP:c.2350C > T (p.Arg784Trp) | 933 | SNP:c.602C > T (p.Thr201Met) | VCV000200295 | Not Prov. | Uncertain significance(LR: Apr. 23, 2013) |
| 496 | SNP:c.2354G > C (p.Gly785Ala) | 494 | SNP:c.2345T > C (p.Ile 782Thr) | VCV000977169 | Long QT Syn. | Uncertain significance(LR: Apr. 23, 2019) |
| 497 | SNP:c.2354G > T (p.Gly785Val) | 159 | SNP:c.1609C > T (p.Arg537Trp) | VCV000067222 | Congenital long QT Syn.\|Arrhythmia\|Long Q [symbol] | Uncertain significance(LR: Apr. 23, 2020) |
| 498 | SNP:c.235G > A (p.Ala79Thr) | 154 | SNP:c.1600C > G (p.Arg534Gly) | VCV000908910 | Long QT Syn. 2 | Uncertain significance(LR: Apr. 27, 2017) |
| 499 | SNP:c.235G > C (p.Ala79Pro) | 32 | SNP:c.1190G > A (p.Arg397His) | VCV000851410 | Long QT Syn.\|Arrhythmia | Uncertain significance(LR: Apr. 27, 2020) |
| 500 | SNP:c.235G > T (p.Ala79Ser) | 343 | SNP:c.1897A > C (p.Asn633His) | VCV001001814 | Long QT Syn. | Uncertain significance(LR: Apr. 27, 2020) |
| 501 | SNP:c.2360T > A (p.Ile787Asn) | 473 | SNP:c.2261T > G (p.Leu754Arg) | VCV000200767 | Not Prov. | Uncertain significance(LR: Apr. 28, 2017) |
| 502 | SNP:c.2362G > A (p.Glu788Lys) | 409 | SNP:c.2033T > C (p.Leu678Pro) | VCV000067356 | Long QT Syn.\|Congenital long QT Syn. | Uncertain significance(LR: Apr. 30, 2016) |
| 503 | SNP:c.2364G > C (p.Glu788Asp) | 776 | SNP:c.3124C > G (p.Leu1042Val) | VCV000427971 | Hypertrophic cardiomyopathy | Uncertain significance(LR: Apr. 30, 2017) |
| 504 | SNP:c.2366T > C (p.Ile789Thr) | 175 | SNP:c.1661T > C (p.Met554Thr) | VCV000642793 | Long QT Syn. | Uncertain significance(LR: Apr. 30, 2019) |
| 505 | SNP:c.2369T > C (p.Leu790Pro) | 1037 | SNP:c.950A > G (p.Asn317Ser) | VCV000405346 | Arrhythmia\|Short QT Syn. 1\|Long QT Syn. 2 [symbol] | Uncertain significance(LR: Apr. 30, 2019) |
| 506 | SNP:c.2371C > T (p.Arg791Trp) | 850 | SNP:c.3406C > T (p.Leu136Phe) | VCV001035669 | Long QT Syn. | Uncertain significance(LR: Apr. 30, 2020) |
| 507 | SNP:c.2372G > A (p.Arg791Gln) | 823 | SNP:c.3296C > T (p.Pro1099Leu) | VCV000526951 | Long QT Syn. | Uncertain significance(LR: Apr. 4, 2018) |
| 508 | SNP:c.2377G > A (p.Asp793Asn) | 97 | SNP:c.1982C > T (p.Ala661Val) | VCV000977179 | Sudden cardiac arrest | Uncertain significance(LR: Apr. 7, 2020) |
| 509 | SNP:c.2380G > A (p.Val794Ile) | 643 | SNP:c.2768C > T (p.Pro926Leu) | VCV000572279 | Long QT Syn.\|Long QT Syn. 2\|Arrhythmia | Uncertain significance(LR: Apr. 7, 2020) |
| 510 | SNP:c.2383G > A (p.Val795Ile) | 771 | SNP:c.3109G > A (p.Asp1037Asn) | VCV000067470 | Long QT Syn.\|Arrhythmia\|Not Prov. | Uncertain significance(LR: Apr. 7, 2020) |
| 511 | SNP:c.2386G > C (p.Val796Leu) | 277 | SNP:c.1808G > A (p.Gly603Asp) | VCV000456894 | Long QT Syn. | Uncertain significance(LR: Apr. 8, 2020) |
| 512 | SNP:c.2386G > T (p.Val796Leu) | 749 | SNP:c.3041G > A (p.Arg1014Gln) | VCV000922413 | Not Prov.\|Long QT Syn.\|Arrhythmia | Uncertain significance(LR: Apr. 8, 2020) |
| 513 | SNP:c.2387T > G (p.Val796Gly) | 994 | SNP:c.823A > C (p.Ser275Arg) | VCV000577151 | Long QT Syn. | Uncertain significance(LR: Apr. 8, 2020) |
| 514 | SNP:c.238G > A (p.Ala80Thr) | 894 | SNP:c.446G > A (p.Gly149Asp) | VCV000563779 | Long QT Syn. | Uncertain significance(LR: Apr. 9, 2019) |
| 515 | SNP:c.238G > C (p.Ala80Pro) | 946 | SNP:c.664G > A (p.Val222Met) | VCV000835460 | Long QT Syn. | Uncertain significance(LR: Apr. 9, 2019) |
| 516 | SNP:c.2390C > A (p.Ala797Asp) | 133 | SNP:c.1519C > G (p.Pro507Ala) | VCV000656162 | Long QT Syn. | Uncertain significance(LR: Aug. 1, 2018) |
| 517 | SNP:c.2396T > C (p.Leu799Pro) | 949 | SNP:c.683C > T (p.Ala228Val) | VCV000659941 | Long QT Syn. | Uncertain significance(LR: Aug. 10, 2018) |
| 518 | SNP:c.2398G > T (p.Gly800Trp) | 1047 | SNP:c.977G > A (p.Arg326His) | VCV000649300 | Long QT Syn. | Uncertain significance(LR: Aug. 10, 2018) |
| 519 | SNP:c.2399G > A (p.Gly800Glu) | 707 | SNP:c.2913G > T (p.Glu971Asp) | VCV000926285 | Arrhythmia | Uncertain significance(LR: Aug. 10, 2020) |
| 520 | SNP:c.239C > T (p.Ala80Val) | 797 | SNP:c.3187G > C (p.Val1063Leu) | VCV000845043 | Long QT Syn. | Uncertain significance(LR: Aug. 10, 2020) |
| 521 | SNP:c.2405A > G (p.Asn802Ser) | 568 | SNP:c.2588G > A (p.Arg863Gln) | VCV001026816 | Long QT Syn. | Uncertain significance(LR: Aug. 11, 2020) |
| 522 | SNP:c.2414T > C (p.Phe805Cys) | 749 | SNP:c.3032A > G (p.Glu1011Gly) | VCV000922211 | Long QT Syn.\|Arrhythmia | Uncertain significance(LR: Aug. 11, 2020) |
| 523 | SNP:c.2414T > G (p.Phe85Glu) | 951 | SNP:c.692G > A (p.Arg231Gln) | VCV000952892 | Long QT Syn. | Uncertain significance(LR: Aug. 11, 2020) |
| 524 | SNP:c.2417G > A (p.Gly806Ala) | 71 | SNP:c.1330G > A (p.Glu444Lys) | VCV000191472 | Arrhythmia\|Not Prov.\|Long QT Syn.\|Long Q [symbol] | Uncertain significance(LR: Aug. 14, 2019) |
| 525 | SNP:c.2417G > C (p.Gly806Thr) | 542 | SNP:c.2504G > A (p.Arg835Gln) | VCV000200464 | Not Prov. | Uncertain significance(LR: Aug. 14, 2019) |
| 526 | SNP:c.2437G > A (p.Ala813His) | 650 | SNP:c.2774G > C (p.Gly925Ala) | VCV000200495 | Not Prov. | Uncertain significance(LR: Aug. 17, 2018) |
| 527 | SNP:c.243G > C (p.Gln81Pro) | 24 | SNP:c.1099A > T (p.Thr367Ser) | VCV000067164 | Not Prov.\|Arrhythmia | Uncertain significance(LR: Aug. 18, 2020) |
| 528 | SNP:c.2452T > C (p.Ser818Leu) | 103 | SNP:c.935G > A (p.Arg312His) | VCV000456942 | Arrhythmia Not Prov.\|Long QT Syn. | Uncertain significance(LR: Aug. 18, 2020) |
| 529 | SNP:c.2453C > T (p.Ser818Arg) | 404 | SNP:c.2012C > G (p.Ala671Gly) | VCV001024776 | Long QT Syn. | Uncertain significance(LR: Aug. 2, 2020) |
| 530 | SNP:c.2458G > A (p.Gly820Thr) | 767 | SNP:c.3098G > T (p.Arg1033Leu) | VCV001059933 | Long QT Syn. | Uncertain significance(LR: Aug. 2, 2020) |
| 531 | SNP:c.245T > C (p.Ile82Met) | 880 | SNP:c.38C > A (p.Thr13Asn) | VCV000923223 | Long QT Syn.\|Arrhythmia | Uncertain significance(LR: Aug. 2, 2020) |
| 532 | SNP:c.2464G > A (p.Val822Leu) | 881 | SNP:c.391G > A (p.Val131Met) | VCV000920295 | Arrhythmia | Uncertain significance(LR: Aug. 20, 2019) |
| 533 | SNP:c.2464G > C (p.Val822Trp) | 373 | SNP:c.1930G > T (p.Val644Phe) | VCV000067340 | Congenital long QT Syn.\|Long QT Syn. | Uncertain significance(LR: Aug. 20, 2020) |
| 534 | SNP:c.2467C > T (p.Arg823Gln) | 1043 | SNP:c.967G > A (p.Asp323Asn) | VCV000067551 | Congenital long QT Syn.\|Long QT Syn. | Uncertain significance(LR: Aug. 20, 2020) |
| 535 | SNP:c.2468G > A (p.Arg823Ile) | 781 | SNP:c.3137A > G (p.Gln1046Arg) | VCV000958659 | Long QT Syn. | Uncertain significance(LR: Aug. 21, 2019) |
| 536 | SNP:c.2477C > T (p.Thr826Ser) | 829 | SNP:c.331G > A (p.Asp111Asn) | VCV000921508 | Arrhythmia | Uncertain significance(LR: Aug. 21, 2019) |
| 537 | SNP:c.247G > T (p.Ala83Arg) | 294 | SNP:c.1832A > G (p.Tyr611Cys) | VCV001019935 | Long QT Syn. | Uncertain significance(LR: Aug. 22, 2020) |
| 538 | SNP:c.2482T > C (p.Cys828Ala) | 942 | SNP:c.655G > A (p.Asp219Asn) | VCV000663570 | Long QT Syn. | Uncertain significance(LR: Aug. 23, 2018) |
| 539 | SNP:c.2486A > C (p.Asp829Ter) | 438 | SNP:c.2122A > G (p.Thr708Ala) | VCV000527003 | Long QT Syn | Uncertain significance(LR: Aug. 24, 2017) |
| 540 | SNP:c.2494A > T (p.Lys832Trp) | 134 | SNP:c.1519C > T (p.Pro507Ser) | VCV000200350 | Not Prov. | Uncertain significance(LR: Aug. 25, 2017) |
| 541 | SNP:c.2503C > T (p.Arg835Gln) | 807 | SNP:c.3215C > T (p.Thr1072Met) | VCV000359303 | Long QT Syn. 2\|Arrhythmia\|Not Prov.\|Long [symbol] | Uncertain significance(LR: Aug. 25, 2020) |
| 542 | SNP:c.2504G > A (p.Arg835Asn) | 864 | SNP:c.3469C > T (p.Pro1157Ser) | VCV000456933 | Arrhythmia\|Long QT Syn. | Uncertain significance(LR: Aug. 26, 2019) |
| 543 | SNP:c.2509G > A (p.Asp837Tyr) | 65 | SNP:c.1307C > T (p.Thr436Met) | VCV000067184 | Arrhythmia\|Long QT Syn.\|Not Prov.\|Congeni [symbol] | Uncertain significance(LR: Aug. 26, 2020) |
| 544 | SNP:c.2509G > T (p.Asp837Gly) | 640 | SNP:c.2765G > A (p.Arg922Gln) | VCV000067436 | Long QT Syn.\|Not Prov.\|Congenital long QT [symbol] | Uncertain significance(LR: Aug. 26, 2020) |
| 545 | SNP:c.2510A > G (p.Asp837Met) | 44 | SNP:c.1231G > A (p.Asp411Asn) | VCV000941613 | Long QT Syn. | Uncertain significance(LR: Aug. 27, 2019) |
| 546 | SNP:c.2515C > A (p.Leu839Arg) | 257 | SNP:c.1771G > A (p.Asp591Asn) | VCV000911854 | Long QT Syn. 2\| Long QT Syn.\|Arrhythmia | Uncertain significance(LR: Aug. 27, 2020) |
| 547 | SNP:c.251A > G (p.Gln84Pro) | 429 | SNP:c.2094G > T (p.Glu698Asp) | VCV001001384 | Long QT Syn. | Uncertain significance(LR: Aug. 27, 2020) |
| 548 | SNP:c.2525T > C (p.Leu842Pro) | 934 | SNP:c.607G > A (p.Ala203Thr) | VCV000067514 | Cardiovas. pheno.\|Not Prov.\|Long QT Syn. | Uncertain significance(LR: Aug. 27, 2020) |
| 549 | SNP:c.2530A > G (p.Met844Val) | 808 | SNP:c.3224C > A (p.Pro1075Gln) | VCV000629130 | Arrhythmia | Uncertain significance(LR: Aug. 28, 2018) |
| 550 | SNP:c.2536C > A (p.Pro846Thr) | 1002 | SNP:c.853G > A (p.Ala285Thr) | VCV000220070 | Long QT Syn. | Uncertain significance(LR: Aug. 29, 2015) |
| 551 | SNP:c.2536C > G (p.Pro846Ala) | 1046 | SNP:c.976C > T (p.Arg326Cys) | VCV001040723 | Long QT Syn. | Uncertain significance(LR: Aug. 29, 2020) |
| 552 | SNP:c.2536C > T (p.Pro846Ser) | 391 | SNP:c.196T > C (p.Cys66Arg) | VCV000456900 | Long QT Syn. | Uncertain significance(LR: Aug. 3, 2017) |
| 553 | SNP:c.2537C > T (p.Pro846Leu) | 105 | SNP:c.1426G > A (p.Val476Ile) | VCV000067200 | Long QT Syn.\|Congenital long QT Syn.\|not [symbol] | Uncertain significance(LR: Aug. 3, 2020) |
| 554 | SNP:c.253G > A (p.Ala85Thr) | 666 | SNP:c.280G > A (p.Val94Met) | VCV001055911 | Long QT Syn. | Uncertain significance(LR: Aug. 3, 2020) |
| 555 | SNP:c.253G > C (p.Ala85Pro) | 210 | SNP:c.1703G > C (p.Trp568Ser) | VCV000520444 | Long QT Syn. | Uncertain significance(LR: Aug. 31, 2016) |
| 556 | SNP:c.2548G > T (p.Asp850Tyr) | 69 | SNP:c.1325C > T (p.Ala442Val) | VCV000456885 | Long QT Syn.\|Long QT Syn. 2\|Short QT Syn [symbol] | Uncertain significance(LR: Aug. 31, 2018) |
| 557 | SNP:c.254C > T (p.Ala85Val) | 208 | SNP:c.1700T > C (p.Ile567Thr) | VCV000067241 | Congenital long QT Syn.\|Long QT Syn. | Uncertain significance(LR: Aug. 31, 2018) |
| 558 | SNP:c.2566C > G (p.Leu856Val) | 967 | SNP:c.731C > T (p.Ala244Val) | VCV000405349 | Long QT Syn. | Uncertain significance(LR: Aug. 31, 2018) |
| 559 | SNP:c.2573T > C (p.Ile858Thr) | 916 | SNP:c.530A > C (p.Glu177Ala) | VCV001045316 | Long QT Syn. | Uncertain significance(LR: Aug. 4, 2020) |
| 560 | SNP:c.2576C > T (p.Thr859Ile) | 958 | SNP:c.707G > T (p.Gly236Val) | VCV000067518 | Long QT Syn.\|Not Prov. | Uncertain significance(LR: Aug. 4, 2021) |
| 561 | SNP:c.257T > C (p.Leu86Pro) | 874 | SNP:c.374T > G (p.Phe125Cys) | VCV000067502 | Cardiovas. pheno.\|Congenital long QT Syn. | Uncertain significance(LR: Aug. 5, 2015) |
| 562 | SNP:c.257T > G (p.Leu86Arg) | 815 | SNP:c.3263C > G (p.Pro1088Arg) | VCV000954908 | Long QT Syn. | Uncertain significance(LR: Aug. 5, 2019) |
| 563 | SNP:c.2581A > C (p.Asn861His) | 351 | SNP:c.1904A > T (p.Asn635Ile) | VCV000067327 | Long QT Syn.\|Congenital long QT Syn. | Uncertain significance(LR: Aug. 6, 2019) |
| 564 | SNP:c.2582A > C (p.Asn861Thr) | 698 | SNP:c.2893G > A (p.Gly965Arg) | VCV000067450 | Long QT Syn.\|Long QT Syn. 2\|Not Prov. | Uncertain significance(LR: Aug. 6, 2020) |
| 565 | SNP:c.2582A > G (p.Asn861Ser) | 1011 | SNP:c.875G > A (p.Arg292His) | VCV001017664 | Long QT Syn. | Uncertain significance(LR: Aug. 7, 2020) |
| 566 | SNP:c.2582A > T (p.Asn861Ile) | 840 | SNP:c.3358C > G (p.Leu1120Val) | VCV000661932 | Long QT Syn. | Uncertain significance(LR: Aug. 8, 2018) |
| 567 | SNP:c.2587C > T (p.Arg863Ter) | 17 | SNP:c.1071G > T (p.Glu357Asp) | VCV000628850 | Arrhythmia | Uncertain significance(LR: Aug. 8, 2019) |
| 568 | SNP:c.2588G > A (p.Arg863Gln [symbol] | 593 | SNP:c.2660G > T (p.Arg887Leu) | VCV000628973 | Arrhythmia | Uncertain significance(LR: Aug. 8, 2019) |
| 569 | SNP:c.2591A > G (p.Asp864Gly [symbol] | 904 | SNP:c.460T > C (p.Trp 154Arg) | VCV000628868 | Arrhythmia | Uncertain significance(LR: Aug. 8, 2019) |
| 570 | SNP:c.2594C > T (p.Thr865Ile) | 308 | SNP:c.1859G > A (p.Ser620Asn) | VCV001017668 | Long QT Syn. | Uncertain significance(LR: Aug. 9, 2020) |
| 571 | SNP:c.2600T > C (p.Met867Thr) | 924 | SNP:c.563C > T (p.Ala188Val) | VCV000200293 | Long QT Syn.\|Not Prov. | Uncertain significance(LR: Aug. 9, 2020) |
| 572 | SNP:c.2606C > T (p.Pro869Leu) | 91 | SNP:c.1391T > C (p.Ile464Thr) | VCV000919164 | Arrhythmia | Uncertain significance(LR: Dec. 10, 2018) |
| 573 | SNP:c.260T > C (p.Leu87Pro) | 1027 | SNP:c.928C > A (p.Pro310Thr) | VCV000925941 | Arrhythmia | Uncertain significance(LR: Dec. 10, 2018) |
| 574 | SNP:c.2612C > G (p.Ser871Cys) | 464 | SNP:c.2231G > A (p.Arg744Gln) | VCV000924279 | Arrhythmia | Uncertain significance(LR: Dec. 10, 2020) |
| 575 | SNP:c.2612C > T (p.Ser871Phe) | 610 | SNP:c.2696C > T (p.Thr899Met) | VCV000862133 | Long QT Syn.\|Arrhythmia | Uncertain significance(LR: Dec. 10, 2020) |
| 576 | SNP:c.2617G > A (p.Gly873Ser) | 891 | SNP:c.440A > G (p.His 147Arg) | VCV000200285 | Not Prov.\|Long QT Syn. 2\|Short QT Syn. 1\| [symbol] | Uncertain significance(LR: Dec. 11, 2018) |
| 577 | SNP:c.2624C > G (p.Thr875 Arg) | 652 | SNP:c.2777C > T (p.Pro926Leu) | VCV000848808 | Long QT Syn. | Uncertain significance(LR: Dec. 11, 2019) |
| 578 | SNP:c.2624C > T (p.Thr875Met) | 863 | SNP:c.3467A > G (p.Asp1156Gly) | VCV000926485 | Arrhythmia | Uncertain significance(LR: Dec. 11, 2019) |
| 579 | SNP:c.2626G > A (p.Glu876Lys) | 419 | SNP:c.206T > A (p.Leu69Gln) | VCV000520445 | Long QT Syn. | Uncertain significance(LR: Dec. 12, 2016) |
| 580 | SNP:c.2626G > T (p.Glu876Ter) | 572 | SNP:c.2606C > T (p.Pro869Leu) | VCV000200473 | Arrhythmia\|Not Prov.\|Brugada Syn. 1 | Uncertain significance(LR: Dec. 13, 2019) |
| 581 | SNP:c.2634G > T (p.Glu878Asp) | 599 | SNP:c.2680C > T (p.Arg894Cys) | VCV000067424 | Long QT Syn.\|Not Prov.\|Congenital long QT [symbol] | Uncertain significance(LR: Dec. 13, 2019) |
| 582 | SNP:c.2635G > A (p.Gly879Ser) | 554 | SNP:c.253G > A (p.Ala85Thr) | VCV000456912 | Long QT Syn. | Uncertain significance(LR: Dec. 14, 2018) |
| 583 | SNP:c.2635G > C (p.Gly879Arg) | 902 | SNP:c.455C > G (p.Thr152Ser) | VCV000200288 | Arrhythmia\|Not Prov. | Uncertain significance(LR: Dec. 14, 2020) |
| 584 | SNP:c.2641T > A (p.Phe881Ile) | 897 | SNP:c.449C > T (p.Pro150Leu) | VCV001171810 | Arrhythmia | Uncertain significance(LR: Dec. 15, 2020) |
| 585 | SNP:c.2647C > T (p.Arg883Trp) | 833 | SNP:c.3343A > G (p.Met1115Val) | VCV000067490 | Not Prov.\|Arrhythmia\|Congenital long QT Sy [symbol] | Uncertain significance(LR: Dec. 16, 2019) |
| 586 | SNP:c.2648G > A (p.Arg883Gln [symbol] | 668 | SNP:c.2810G > A (p.Ser937Asn) | VCV000067440 | Congenital long QT Syn.\|Long QT Syn.\|Arrh [symbol] | Uncertain significance(LR: Dec. 16, 2020) |
| 587 | SNP:c.2651A > G (p.Gln884Arg [symbol] | 980 | SNP:c.773C > T (p.Pro258Leu) | VCV000495747 | Not Prov. | Uncertain significance(LR: Dec. 19, 2016) |
| 588 | SNP:c.2653C > T (p.Arg885Cys) | 683 | SNP:c.2857C > T (p.Leu953Phe) | VCV000924479 | Arrhythmia | Uncertain significance(LR: Dec. 19, 2018) |
| 589 | SNP:c.2654G > A (p.Arg885His) | 702 | SNP:c.2903C > T (p.Pro968Leu) | VCV000067452 | Arrhythmia\|Not Prov.\|Long QT Syn. 2 | Uncertain significance(LR: Dec. 19, 2018) |
| 590 | SNP:c.2659C > G (p.Arg887Gly) | 1015 | SNP:c.880G > A (p.Gly294Arg) | VCV000838034 | Long QT Syn. | Uncertain significance(LR: Dec. 19, 2019) |
| 591 | SNP:c.2659C > T (p.Arg887Cys) | 499 | SNP:c.235G > C (p.Ala79Pro) | VCV000200778 | Not Prov. | Uncertain significance(LR: Dec. 2, 2019) |
| 592 | SNP:c.2660G > A (p.Arg887His) | 271 | SNP:c.1796G > A (p.Ser599Asn) | VCV001172277 | Arrhythmia | Uncertain significance(LR: Dec. 21, 2020) |
| 593 | SNP:c.2660G > T (p.Arg887Leu) | 482 | SNP:c.2296G > T (p.Gly766Trp) | VCV000392164 | Not Prov. | Uncertain significance(LR: Dec. 22, 2016) |
| 594 | SNP:c.2665T > G (p.Leu889Val) | 760 | SNP:c.3089C > T (p.Pro1030Leu) | VCV000847541 | Not Prov.\|Long QT Syn.\|Arrhythmia | Uncertain significance(LR: Dec. 22, 2020) |
| 595 | SNP:c.2668T > C (p.Ser890Pro) | 493 | SNP:c.2343C > G (p.Phe781Leu) | VCV000264633 | Cardiovas. pheno. | Uncertain significance(LR: Dec. 23, 2015) |
| 596 | SNP:c.2674C > T (p.Arg892Cys) | 480 | SNP:c.2291C > T (p.Pro764Leu) | VCV000267296 | Arrhythmia\|Long QT Syn. | Uncertain significance(LR: Dec. 23, 2019) |
| 597 | SNP:c.2675G > A (p.Arg892His) | 635 | SNP:c.2758C > T (p.Arg920Trp) | VCV000067433 | Arrhythmia\|Long QT Syn.\|Congenital long Q [symbol] | Uncertain significance(LR: Dec. 23, 2019) |
| 598 | SNP:c.2678G > A (p.Arg893Lys) | 630 | SNP:c.2684C > A (p.Thr895Lys) | VCV000927873 | Arrhythmia | Uncertain significance(LR: Dec. 23, 2020) |
| 599 | SNP:c.2680C > T (p.Arg894Cys) | 139 | SNP:c.1567C > A (p.Leu523Met) | VCV000405357 | Long QT Syn. | Uncertain significance(LR: Dec. 24, 2016) |
| 600 | SNP:c.2681G > A (p.Arg894His) | 514 | SNP:c.238G > A (p.Ala80Thr) | VCV001311334 | Not Prov. | Uncertain significance(LR: Dec. 27, 2019) |
| 601 | SNP:c.2681G > T (p.Arg894Leu) | 735 | SNP:c.3003G > C (p.Trp1001Cys) | VCV000857986 | Long QT Syn. | Uncertain significance(LR: Dec. 27, 2019) |
| 602 | SNP:c.2684C > A (p.Thr895Lys) | 181 | SNP:c.1676T > C (p.Leu559Pro) | VCV000656408 | Long QT Syn. | Uncertain significance(LR: Dec. 28, 2018) |
| 603 | SNP:c.2684C > G (p.Thr895Arg) | 731 | SNP:c.299G > T (p.Arg100Leu) | VCV000657216 | Long QT Syn. | Uncertain significance(LR: Dec. 28, 2018) |
| 604 | SNP:c.2684C > T (p.Thr895Met) | 636 | SNP:c.2759G > A (p.Arg920Gln) | VCV000067434 | Not Prov.\|Arrhythmia\|Cardiovas. pheno.\|Con [symbol] | Uncertain significance(LR: Dec. 29, 2020) |
| 605 | SNP:c.2690A > C (p.Lys897Thr) | 645 | SNP:c.3392G > T (p.Gly1131Val) | VCV000918364 | Arrhythmia | Uncertain significance(LR: Dec. 3, 2018) |
| 606 | SNP:c.2690A > T (p.Lys897Met) | 168 | SNP:c.1640C > T (p.Ala547Val) | VCV000852580 | Long QT Syn.\|Arrhythmia | Uncertain significance(LR: Dec. 3, 2019) |
| 607 | SNP:c.2695A > T (p.Thr899Ser) | 830 | SNP:c.3320C > T (p.Ser1107Leu) | VCV000843735 | Long QT Syn.\|Short QT Syn. 1 | Uncertain significance(LR: Dec. 3, 2019) |
| 608 | SNP:c.2696C > A (p.Thr899Lys) | 15 | SNP:c.1066C > T (p.Arg356Cys) | VCV000925269 | Arrhythmia | Uncertain significance(LR: Dec. 3, 2020) |
| 609 | SNP:c.2696C > G (p.Thr899Arg) | 386 | SNP:c.1963A > G (p.Ile655Val) | VCV000405359 | Long QT Syn. | Uncertain significance(LR: Dec. 30, 2016) |
| 610 | SNP:c.2696C > T (p.Thr899Met) | 560 | SNP:c.2576C > T (p.Thr859Ile) | VCV000200469 | Not Prov. | Uncertain significance(LR: Dec. 31, 2019) |
| 611 | SNP:c.26C > T (p.Ala9Val) | 846 | SNP:c.3394C > G (p.Pro1132Ala) | VCV000191469 | Arrhythmia\|Long QT Syn.\|Not Prov. | Uncertain significance(LR: Dec. 31, 2019) |
| 612 | SNP:c.2701C > T (p.Gln901Ter) | 561 | SNP:c.257T > C (p.Leu86Pro) | VCV000067413 | Congenital long QT Syn.\|Not Prov. | Uncertain significance(LR: Dec. 31, 2020) |
| 613 | SNP:c.2702A > G (p.Gln901Arg) | 925 | SNP:c.566G > T (p.gly189Val) | VCV000637978 | Long QT Syn. 2 | Uncertain significance(LR: Dec. 4, 2018) |
| 614 | SNP:c.2707G > A (p.Gly903Arg) | 510 | SNP:c.2383G > A (p.val795Ile) | VCV001171063 | Arrhythmia | Uncertain significance(LR: Dec. 4, 2020) |
| 615 | SNP:c.2707G > C (p.Gly903Arg) | 625 | SNP:c.2735G > A (p.Arg912Gln) | VCV000527012 | Long QT Syn.\|Arrhythmia | Uncertain significance(LR: Dec. 4, 2020) |
| 616 | SNP:c.2710G > A (p.Glu904Lys) | 676 | SNP:c.2842C > T (p.Arg948Cys) | VCV000014441 | Congenital long QT Syn.\|Long QT Syn. 1/2, [symbol] | Uncertain significance(LR: Dec. 4, 2020) |
| 617 | SNP:c.2711A > G (p.Glu904Gly) | 739 | SNP:c.3014G > A (p.Arg1005Gln) | VCV000067461 | Arrhythmia\|Congenital long QT Syn. | Uncertain significance(LR: Dec. 6, 2019) |
| 618 | SNP:c.2711A > T (p.Glu904Val) | 95 | SNP:c.1397A > T (p.Asp466Val) | VCV000646851 | Long QT Syn. | Uncertain significance(LR: Dec. 7, 2018) |
| 619 | SNP:c.2717C > T (p.Ser906Leu) | 238 | SNP:c.1742C > T (p.Ser581Leu) | VCV000577995 | Arrhythmia\|Long QT Syn. | Uncertain significance(LR: Dec. 9, 2020) |
| 620 | SNP:c.2719G > A (p.Ala907Thr) | 680 | SNP:c.2854C > T (p.Pro952Ser) | VCV000919402 | Arrhythmia\|Not Prov.\|Long QT Syn. | Uncertain significance(LR: Dec. 9, 2020) |
| 621 | SNP:c.2719G > T (p.Ala907Ser) | 63 | SNP:c.1291T > C (p.Phe431Leu) | VCV000519399 | Cardiovas. pheno.\|Long QT Syn. | Uncertain significance(LR: Feb. 1, 2020) |
| 622 | SNP:c.2729C > T (p.Pro910Leu) | 762 | SNP:c.3094C > T (p.Arg1032Trp) | VCV000200522 | Long QT Syn.\|Arrhythmia\|Not Prov.\|Long Q [symbol] | Uncertain significance(LR: Feb. 1, 2021) |
| 623 | SNP:c.2731G > C (p.Gly911Arg) | 109 | SNP:c.1460G > C (p.Gly487Ala) | VCV000921335 | Arrhythmia | Uncertain significance(LR: Feb. 11, 2019) |
| 624 | SNP:c.2734C > T (p.Arg912Trp) | 607 | SNP:c.2695A > T (p.Thr899Ser) | VCV000919954 | Arrhythmia | Uncertain significance(LR: Feb. 11, 2019) |
| 625 | SNP:c.2735G > A (p.Arg912Gln) | 928 | SNP:c.572C > T (p.Pro191Leu) | VCV001027196 | Long QT Syn. | Uncertain significance(LR: Feb. 11, 2020) |
| 626 | SNP:c.2737G > A (p.Ala913Thr) | 521 | SNP:c.2405A > G (p.Asn802Ser) | VCV000216326 | Long QT Syn. | Uncertain significance(LR: Feb. 12, 2015) |
| 627 | SNP:c.2738C > T (p.Ala913Val) | 608 | SNP:c.2696C > A (p.Thr899Lys) | VCV001006883 | Long QT Syn. | Uncertain significance(LR: Feb. 12, 2020) |
| 628 | SNP:c.273G > T (p.Glu91Asp) | 974 | SNP:c.755G > A (p.Arg252Gln) | VCV000180380 | Long QT Syn. | Uncertain significance(LR: Feb. 12, 2020) |
| 629 | SNP:c.2744C > T (p.Ala915Val) | 614 | SNP:c.2707G > A (p.Gly903Arg) | VCV000067428 | Congenital long QT Syn.\|not spec.\|Long QT [symbol] | Uncertain significance(LR: Feb. 12, 2021) |
| 630 | SNP:c.2746G > A (p.Gly916Arg) | 770 | SNP:c.3107G > A (p.Gly1036Asp) | VCV000067469 | not spec.\|Long QT Syn.\|Not Prov.\|Congenital [symbol] | Uncertain significance(LR: Feb. 12, 2021) |
| 631 | SNP:c.274C > T (p.Arg92Cys) | 613 | SNP:c.2702A > G (p.Gln901Arg) | VCV000851829 | Long QT Syn. | Uncertain significance(LR: Feb. 13, 2019) |
| 632 | SNP:c.2750C > T (p.Pro917Leu) | 1016 | SNP:c.881G > T (p.Gly294Val) | VCV000067539 | Long QT Syn.\|SUDDEN INFANT DEATH S [symbol] | Uncertain significance(LR: Feb. 14, 2019) |
| 633 | SNP:c.2753G > A (p.Ser918Asn) | 1033 | SNP:c.93C > G (p.Ile31Met) | VCV000839172 | Long QT Syn. | Uncertain significance(LR: Feb. 14, 2019) |
| 634 | SNP:c.2758C > G (p.Arg920Gly) | 791 | SNP:c.3170G > A (p.Ser1057Asn) | VCV001022238 | Long QT Syn. | Uncertain significance(LR: Feb. 14, 2020) |
| 635 | SNP:c.2758C > T (p.Arg920Trp) | 745 | SNP:c.302A > G (p.Lys101Arg) | VCV001256427 | Not Prov. | Uncertain significance(LR: Feb. 15, 2021) |
| 636 | SNP:c.2759G > A (p.Arg920Gln) | 383 | SNP:c.194C > G (p.Thr65Ser) | VCV000237295 | Long QT Syn. | Uncertain significance(LR: Feb. 17, 2016) |
| 637 | SNP:c.275G > C (p.Arg92Pro) | 371 | SNP:c.1930G > A (p.Val644Ile) | VCV001009718 | Long QT Syn. | Uncertain significance(LR: Feb. 17, 2020) |
| 638 | SNP:c.275G > T (p.Arg92Leu) | 979 | SNP:c.772C > T (p.Pro258Ser) | VCV001060097 | Long QT Syn. | Uncertain significance(LR: Feb. 17, 2020) |
| 639 | SNP:c.2764C > T (p.Arg922Trp) | 647 | SNP:c.2771G > C (p.Gly924Ala) | VCV000067438 | Long QT Syn.\|Short QT Syn. 1\|not spec.\|Carc [symbol] | Uncertain significance(LR: Feb. 17, 2021) |
| 640 | SNP:c.2765G > A (p.Arg922Gln) | 751 | SNP:c.3052C > G (p.Pro1018Ala) | VCV000200520 | Long QT Syn.\|Arrhythmia\|Not Prov. | Uncertain significance(LR: Feb. 17, 2021) |
| 641 | SNP:c.2765G > T (p.Arg922Leu) | 353 | SNP:c.1907C > T (p.Ser636Leu) | VCV001303526 | Not Prov. | Uncertain significance(LR: Feb. 18, 2020) |
| 642 | SNP:c.2768C > A (p.Pro923Gln) | 477 | SNP:c.2276A > G (p.Lys759Arg) | VCV000999182 | Long QT Syn. | Uncertain significance(LR: Feb. 18, 2020) |
| 643 | SNP:c.2768C > T (p.Pro923Leu) | 697 | SNP:c.2891C > T (p.Pro964Leu) | VCV001046584 | Long QT Syn. | Uncertain significance(LR: Feb. 18, 2020) |
| 644 | SNP:c.2770G > A (p.Gly924Arg) | 999 | SNP:c.832A > T (p.Ser279Cys) | VCV001026541 | Long QT Syn. | Uncertain significance(LR: Feb. 18, 2020) |
| 645 | SNP:c.2770G > T (p.Gly924Trp) | 841 | SNP:c.3361C > T (p.Pro1121Ser) | VCV000920215 | Arrhythmia\|Long QT Syn. | Uncertain significance(LR: Feb. 18, 2021) |
| 646 | SNP:c.2771G > A (p.Gly924Glu) | 911 | SNP:c.523G > A (p.Ala175Thr) | VCV000571170 | Long QT Syn. | Uncertain significance(LR: Feb. 19, 2018) |
| 647 | SNP:c.2771G > C (p.Gly924Ala) | 437 | SNP:c.211G > T (p.Gly71Trp) | VCV000853484 | Long QT Syn. | Uncertain significance(LR: Feb. 19, 2019) |
| 648 | SNP:c.2773G > A (p.Gly925Arg) | 508 | SNP:c.2377G > A (p.Asp793Asn) | VCV000921995 | Arrhythmia | Uncertain significance(LR: Feb. 19, 2020) |
| 649 | SNP:c.2774G > A (p.Gly925Glu) | 240 | SNP:c.1745G > A (p.Arg582His) | VCV000926210 | Arrhythmia\| Long QT Syn. | Uncertain significance(LR: Feb. 19, 2021) |
| 650 | SNP:c.2774G > C (p.Gly925Ala) | 618 | SNP:c.2711A > T (p.Glu904Val) | VCV000193977 | Not Prov. | Uncertain significance(LR: Feb. 2, 2015) |
| 651 | SNP:c.2774G > T (p.Gly925Val) | 998 | SNP:c.830C > A (p.Ala277Asp) | VCV000067533 | Congenital long QT Syn.\|Long QT Syn. | Uncertain significance(LR: Feb. 2, 2020) |
| 652 | SNP:c.2777C > T (p.Pro926Leu) | 882 | SNP:c.391G > T (p.Val131Leu) | VCV000927974 | Not Prov.\|Arrhythmia\| Long QT Syn. | Uncertain significance(LR: Feb. 2, 2021) |
| 653 | SNP:c.2780G > A (p.Trp927Ter) | 201 | SNP:c.1693G > T (p.Ala565Ser) | VCV000519393 | Cardiovas. pheno. | Uncertain significance(LR: Feb. 20, 2017) |
| 654 | SNP:c.2780G > T (p.Trp927Leu) | 138 | SNP:c.1564G > A (p.Gly522Arg) | VCV000067212 | Congenital long QT Syn.\|Arrhythmia | Uncertain significance(LR: Feb. 21, 2020) |
| 655 | SNP:c.2781G > T (p.Trp927Cys) | 156 | SNP:c.1601G > T (p.Arg534Leu) | VCV000067221 | Congenital long QT Syn.\|Long QT Syn. | Uncertain significance(LR: Feb. 22, 2020) |
| 656 | SNP:c.2783G > A (p.Gly928Glu) | 512 | SNP:c.2386G > T (p.Val796Leu) | VCV000940061 | Long QT Syn. | Uncertain significance(LR: Feb. 22, 2020) |
| 657 | SNP:c.2785G > C (p.Glu929Gln) | 759 | SNP:c.3089C > G (p.Pro1030Arg) | VCV000837323 | Long QT Syn. | Uncertain significance(LR: Feb. 22, 2020) |
| 658 | SNP:c.2788A > C (p.Ser930Arg) | 682 | SNP:c.2855C > T (p.Pro952Leu) | VCV000862901 | Long QT Syn. | Uncertain significance(LR: Feb. 24, 2019) |
| 659 | SNP:c.2788A > G (p.Ser930Gly) | 606 | SNP:c.2690A > T (p.Lys897Met) | VCV000200480 | Not Prov.\|Arrhythmia | Uncertain significance(LR: Feb. 25, 2019) |
| 660 | SNP:c.278A > G (p.Lys93Arg) | 30 | SNP:c.1181G > A (p.Arg394His) | VCV000565408 | Long QT Syn.\|Arrhythmia | Uncertain significance(LR: Feb. 25, 2020) |
| 661 | SNP:c.2792C > G (p.Pro931Arg) | 507 | SNP:c.2372G > A (p.Arg791Gln) | VCV000925151 | Long QT Syn.\|Arrhythmia | Uncertain significance(LR: Feb. 25, 2020) |
| 662 | SNP:c.2792C > T (p.Pro931Leu) | 794 | SNP:c.3178A > G (p.Met1060Val) | VCV000924650 | Arrhythmia | Uncertain significance(LR: Feb. 26, 2019) |
| 663 | SNP:c.2794T > C (p.Ser932Pro) | 127 | SNP:c.1496T > G (p.Leu499Arg) | VCV000200346 | not spec.\|Not Prov. | Uncertain significance(LR: Feb. 27, 2020) |
| 664 | SNP:c.2795C > T (p.Ser932Phe) | 885 | SNP:c.416G > C (p.Gly139Ala) | VCV001018296 | Long QT Syn. | Uncertain significance(LR: Feb. 27, 2020) |
| 665 | SNP:c.2803C > G (p.Pro935Ala) | 1012 | SNP:c.877G > A (p.Ala293Thr) | VCV000864669 | Long QT Syn. | Uncertain significance(LR: Feb. 27, 2020) |
| 666 | SNP:c.280G > A (p.Val94Met) | 571 | SNP:c.2600T > C (p.Met867Thr) | VCV000641744 | Arrhythmia\| Long QT Syn. | Uncertain significance(LR: Feb. 3, 2020) |
| 667 | SNP:c.280G > C (p.Val94Leu) | 4 | SNP:c.1009A > G (p.Thr337Ala) | VCV000927557 | Arrhythmia | Uncertain significance(LR: Feb. 6, 2020) |
| 668 | SNP:c.2810G > A (p.Ser937Asn) | 957 | SNP:c.707G > A (p.Gly236Asp) | VCV000952259 | Long QT Syn. | Uncertain significance(LR: Feb. 6, 2020) |
| 669 | SNP:c.2819G > T (p.Ser940Ile) | 350 | SNP:c.1904A > G (p.Asn635Ser) | VCV000200393 | Long QT Syn. | Uncertain significance(LR: Feb. 7, 2018) |
| 670 | SNP:c.281T > G (p.Val94Gly) | 656 | SNP:c.2783G > A (p.Gly928Glu) | VCV000850359 | Long QT Syn. | Uncertain significance(LR: Feb. 7, 2020) |
| 671 | SNP:c.2832G > C (p.Glu944Asp) | 282 | SNP:c.1814C > A (p.Pro605His) | VCV000858913 | Long QT Syn. | Uncertain significance(LR: Feb. 8, 2019) |
| 672 | SNP:c.2832G > T (p.Glu944Asp) | 1037 | SNP:c.959C > G (p.Ser320Trp) | VCV000200312 | Arrhythmia\|Not Prov. | Uncertain significance(LR: Feb. 8, 2021) |
| 673 | SNP:c.2833G > T (p.Gly945Cys) | 411 | SNP:c.2036G > A (p.Arg679Gln) | VCV000922598 | Arrhythmia | Uncertain significance(LR: Jan. 1, 2020) |
| 674 | SNP:c.2837C > T (p.Pro946Leu) | 630 | SNP:c.2746G > A (p.Gly916Arg) | VCV000924836 | Arrhythmia | Uncertain significance(LR: Jan. 1, 2020) |
| 675 | SNP:c.2842C > A (p.Arg948Ser) | 25 | SNP:c.1126C > G (p.Gln376Glu) | VCV000909783 | Long QT Syn. 2 | Uncertain significance(LR: Jan. 13, 2018) |
| 676 | SNP:c.2842C > T (p.Arg948Cys) | 94 | SNP:c.1397A > G (p.Asp466Gly) | VCV000909781 | Long QT Syn. 2 | Uncertain significance(LR: Jan. 13, 2018) |
| 677 | SNP:c.2843G > A (p.Arg948His) | 995 | SNP:c.825C > G (p.Ser275Arg) | VCV000911914 | Long QT Syn. 2 | Uncertain significance(LR: Jan. 13, 2018) |
| 678 | SNP:c.284A > C (p.Glu95Ala) | 694 | SNP:c.2887C > A (p.Pro963Thr) | VCV000067449 | Congenital long QT Syn.\|Not Prov.\|Arrhythm [symbol] | Uncertain significance(LR: Jan. 13, 2020) |
| 679 | SNP:c.2853C > A (p.Ser951Arg) | 860 | SNP:c.3457C > T (p.His1153Tyr) | VCV000067497 | Arrhythmia\|Not Prov.\|Long QT Syn. 2\|Short [symbol] | Uncertain significance(LR: Jan. 13, 2021) |
| 680 | SNP:c.2854C > T (p.Pro952Ser) | 834 | SNP:c.3346G > A (p.Ala1116Thr) | VCV000918904 | Arrhythmia | Uncertain significance(LR: Jan. 14, 2020) |
| 681 | SNP:c.2855C > G (p.Pro952Arg) | 711 | SNP:c.2931C > G (p.Cys977Trp) | VCV000919282 | Arrhythmia | Uncertain significance(LR: Jan. 15, 2019) |
| 682 | SNP:c.2855C > T (p.Pro952Leu) | 569 | SNP:c.2591A > G (p.Asp864Gly) | VCV000067417 | Long QT Syn.\|Congenital long QT Syn. | Uncertain significance(LR: Jan. 15, 2020) |
| 683 | SNP:c.2857C > T (p.Leu953Phe) | 789 | SNP:c.3163C > T (p.Arg1055Trp) | VCV000405340 | Long QT Syn. 2\|Long QT Syn. | Uncertain significance(LR: Jan. 15, 2020) |
| 684 | SNP:c.2860C > T (p.Arg954Cys) | 40 | SNP:c.1226T > A (p.Val409Glu) | VCV000200329 | Not Prov.\|Cardiovas. pheno. | Uncertain significance(LR: Jan. 16, 2020) |
| 685 | SNP:c.2861G > A (p.Arg954His) | 472 | SNP:c.2257G > T (p.Ala753Ser) | VCV000067380 | Congenital long QT Syn.\|Arrhythmia | Uncertain significance(LR: Jan. 17, 2020) |
| 686 | SNP:c.2863C > G (p.Leu955Val) | 705 | SNP:c.2908G > A (p.Gly970Arg) | VCV000926177 | Arrhythmia | Uncertain significance(LR: Jan. 17, 2020) |
| 687 | SNP:c.286A > G (p.Ile96Val) | 875 | SNP:c.377T > A (p.Ile 126Asn) | VCV000859531 | Long QT Syn. | Uncertain significance(LR: Jan. 19, 2019) |
| 688 | SNP:c.2870C > T (p.Pro957Leu) | 60 | SNP:c.1283C > T (p.Ser428Leu) | VCV000067180 | Not Prov.\|Congenital long QT Syn. | Uncertain significance(LR: Jan. 19, 2021) |
| 689 | SNP:c.2875T > A (p.Ser959Thr) | 861 | SNP:c.3460G > A (p.Gly1154Ser) | VCV000067498 | Not Prov.\|Arrhythmia\|Long QT Syn. | Uncertain significance(LR: Jan. 2, 2020) |
| 690 | SNP:c.2876C > G (p.Ser959Cys) | 631 | SNP:c.274C > T (p.Arg92Cys) | VCV000200573 | Arrhythmia\|Not Prov.\|Long QT Syn.\|Long Q [symbol] | Uncertain significance(LR: Jan. 20, 2021) |
| 691 | SNP:c.2876C > T (p.Ser959Phe) | 768 | SNP:c.3103C > T (p.Arg1035Trp) | VCV000067468 | Arrhythmia\|Long QT Syn.\|Not Prov. | Uncertain significance(LR: Jan. 20, 2021) |
| 692 | SNP:c.2879G > A (p.Ser960Asn) | 439 | SNP:c.2128G > A (p.Gly710Ser) | VCV000664978 | Long QT Syn. | Uncertain significance(LR: Jan. 21, 2019) |
| 693 | SNP:c.287T > C (p.Ile96Thr) | 996 | SNP:c.829G > T (p.Ala277Ser) | VCV000834430 | Long QT Syn. | Uncertain significance(LR: Jan. 22, 2019) |
| 694 | SNP:c.2887C > A (p.Pro963Thr) | 915 | SNP:c.527G > A (p.Arg176Gln) | VCV001010337 | Long QT Syn. | Uncertain significance(LR: Jan. 23, 2020) |
| 695 | SNP:c.2890C > G (p.Pro964Ala) | 577 | SNP:c.2624C > G (p.Thr875Arg) | VCV000849676 | Long QT Syn. | Uncertain significance(LR: Jan. 26, 2019) |
| 696 | SNP:c.2891C > G (p.Pro964Arg) | 262 | SNP:c.1780G > C (p.Gly594Arg) | VCV001026973 | Long QT Syn. | Uncertain significance(LR: Jan. 27, 2020) |
| 697 | SNP:c.2891C > T (p.Pro964Leu) | 704 | SNP:c.2906G > T (p.Gly969Val) | VCV000926647 | Arrhythmia | Uncertain significance(LR: Jan. 27, 2020) |
| 698 | SNP:c.2893G > A (p.Gly965Arg) | 782 | SNP:c.3138G > T (p.Gln1046His) | VCV000926330 | Arrhythmia | Uncertain significance(LR: Jan. 27, 2020) |
| 699 | SNP:c.2899C > T (p.Pro967Ser) | 852 | SNP:c.3410C > A (p.Ser1137Tyr) | VCV000966027 | Long QT Syn. | Uncertain significance(LR: Jan. 27, 2020) |
| 700 | SNP:c.2900C > T (p.Pro967Leu) | 556 | SNP:c.2548G > T (p.Asp850Tyr) | VCV000922966 | Arrhythmia | Uncertain significance(LR: Jan. 28, 2019) |
| 701 | SNP:c.2902C > G (p.Pro968Ala) | 14 | SNP:c.1058C > T (p.Thr353Ile) | VCV001047609 | Long QT Syn. | Uncertain significance(LR: Jan. 28, 2020) |
| 702 | SNP:c.2903C > T (p.Pro968Leu) | 1045 | SNP:c.973G > C (p.Val325Leu) | VCV000856033 | Long QT Syn. | Uncertain significance(LR: Jan. 28, 2020) |
| 703 | SNP:c.2906G > A (p.Gly969Asp [symbol] | 972 | SNP:c.751C > T (p.Pro251Ser) | VCV000067523 | Long QT Syn.\|Congenital long QT Syn. | Uncertain significance(LR: Jan. 30, 2018) |
| 704 | SNP:c.2906G > T (p.Gly969Val) | 811 | SNP:c.322T > C (p.Cys108Arg) | VCV000067482 | Congenital long QT Syn.\|Long QT Syn. | Uncertain significance(LR: Jan. 30, 2019) |
| 705 | SNP:c.2908G > A (p.Gly970Arg) | 530 | SNP:c.2458G > A (p.Gly820Arg) | VCV000067401 | Not Prov.\|Congenital long QT Syn.\|Arrhythm [symbol] | Uncertain significance(LR: Jan. 30, 2020) |
| 706 | SNP:c.290C > G (p.Ala97Gly) | 467 | SNP:c.223C > G (p.Gln75Glu) | VCV001023341 | Long QT Syn. | Uncertain significance(LR: Jan. 31, 2020) |
| 707 | SNP:c.2913G > T (p.Glu971Asp) | 164 | SNP:c.1622G > A (p.Arg541His) | VCV000960653 | Long QT Syn.\|Arrhythmia | Uncertain significance(LR: Jan. 5, 2021) |
| 708 | SNP:c.2926G > A (p.Asp976Asn [symbol] | 586 | SNP:c.2648G > A (p.Arg883Gln) | VCV001171663 | Arrhythmia | Uncertain significance(LR: Jan. 5, 2021) |
| 709 | SNP:c.2930G > T (p.Cys977Phe) | 616 | SNP:c.2710G > A (p.Glu904Lys) | VCV001171262 | Arrhythmia | Uncertain significance(LR: Jan. 5, 2021) |
| 710 | SNP:c.2931C > A (p.Cys977Ter) | 662 | SNP:c.2792C > T (p.Pro931Leu) | VCV000654837 | Arrhythmia\|Long QT Syn. | Uncertain significance(LR: Jan. 5, 2021) |
| 711 | SNP:c.2931C > G (p.Cys977Trp) | 92 | SNP:c.1394T > C (p.Val465 Ala) | VCV000374073 | Arrhythmia\|Hypertrophic cardiomyopathy | Uncertain significance(LR: Jan. 8, 2014) |
| 712 | SNP:c.2932G > A (p.Glu978Lys) | 667 | SNP:c.280G > C (p.Val94Leu) | VCV001052852 | Long QT Syn. | Uncertain significance(LR: Jan. 9, 2020) |
| 713 | SNP:c.2932G > C (p.Glu978Gln) | 673 | SNP:c.2833G > T (p.Gly945Cys) | VCV001063652 | Long QT Syn. | Uncertain significance(LR: Jan. 9, 2020) |
| 714 | SNP:c.2932G > T (p.Glu978Ter) | 740 | SNP:c.3019C > T (p.Arg1007Cys) | VCV000918739 | Arrhythmia | Uncertain significance(LR: Jan. 9, 2020) |
| 715 | SNP:c.293T > G (p.Phe98Cys) | 27 | SNP:c.115T > C (p.Cys39Arg) | VCV000456883 | Long QT Syn. | Uncertain significance(LR: Jul. 10, 2017) |
| 716 | SNP:c.2941A > G (p.Ser981Gly) | 796 | SNP:c.3185C > T (p.Thr1062Ile) | VCV000586073 | Long QT Syn.\|Not Prov. | Uncertain significance(LR: Jul. 10, 2018) |
| 717 | SNP:c.2944G > A (p.Asp982Asn | 537 | SNP:c.247G > T (p.Ala83Ser) | VCV000643651 | Long QT Syn. | Uncertain significance(LR: Jul. 11, 2018) |
| 718 | SNP:c.2948C > T (p.Thr983Ile) | 615 | SNP:c.2707G > C (p.Gly903Arg) | VCV000960253 | Long QT Syn. | Uncertain significance(LR: Jul. 11, 2019) |
| 719 | SNP:c.2952C > A (p.Cys984Ter) | 468 | SNP:c.2245G > T (p.Gly749Cys) | VCV000405350 | Long QT Syn. | Uncertain significance(LR: Jul. 12, 2017) |
| 720 | SNP:c.2954A > G (p.Asn985Ser) | 120 | SNP:c.1477T > C (p.Tyr493His) | VCV000658590 | Long QT Syn. | Uncertain significance(LR: Jul. 12, 2018) |
| 721 | SNP:c.2956C > A (p.Pro986Thr) | 964 | SNP:c.724C > T (p.Arg242Cys) | VCV000652662 | Long QT Syn. | Uncertain significance(LR: Jul. 12, 2019) |
| 722 | SNP:c.2962T > G (p.Ser988Ala) | 722 | SNP:c.2962T > G (p.Ser988Ala) | VCV000859417 | Long QT Syn. | Uncertain significance(LR: Jul. 13, 2020) |
| 723 | SNP:c.2968G > A (p.Ala990Thr) | 1021 | SNP:c.908C > G (p.Ala303Gly) | VCV000957218 | Long QT Syn. | Uncertain significance(LR: Jul. 14, 2019) |
| 724 | SNP:c.296A > C (p.Tyr99Ser) | 621 | SNP:c.2719G > T (p.Ala907Ser) | VCV000834753 | Long QT Syn.\|Arrhythmia | Uncertain significance(LR: Jul. 14, 2020) |
| 725 | SNP:c.296A > G (p.Tyr99Cys) | 413 | SNP:c.2042G > A (p.Arg681Gln) | VCV000957302 | Long QT Syn. | Uncertain significance(LR: Jul. 15, 2019) |
| 726 | SNP:c.2987A > T (p.Asn996Ile) | 633 | SNP:c.2753G > A (p.Ser918Asn) | VCV000939122 | Long QT Syn. | Uncertain significance(LR: Jul. 15, 2019) |
| 727 | SNP:c.298C > G (p.Arg100Gly) | 492 | SNP:c.233C > T (p.Ala78Val) | VCV000957483 | Long QT Syn. | Uncertain significance(LR: Jul. 16, 2019) |
| 728 | SNP:c.298C > T (p.Arg100Trp) | 609 | SNP:c.2696C > G (p.Thr899Arg) | VCV000456916 | Long QT Syn.\|Cardiovas. pheno. | Uncertain significance(LR: Jul. 17, 2019) |
| 729 | SNP:c.2996G > A (p.Ser999Asn) | 929 | SNP:c.578C > T (p.Ala193Val) | VCV001304544 | Not Prov. | Uncertain significance(LR: Jul. 17, 2019) |
| 730 | SNP:c.299G > A (p.Arg100Gln) | 1010 | SNP:c.872T > G (p.Met291Arg) | VCV000374955 | Not Prov.\|Long QT Syn.\|Long QT Syn. 2\|Sho [symbol] | Uncertain significance(LR: Jul. 17, 2020) |
| 731 | SNP:c.299G > T (p.Arg100Leu) | 314 | SNP:c.1870A > T (p.Ser624Cys) | VCV000644725 | Long QT Syn. | Uncertain significance(LR: Jul. 19, 2019) |
| 732 | SNP:c.29C > T (p.Pro10Leu) | 703 | SNP:c.2906G > A (p.Gly969Asp) | VCV000918705 | Arrhythmia | Uncertain significance(LR: Jul. 19, 2019) |
| 733 | SNP:c.3002G > A (p.Trp1001Ter [symbol] | 901 | SNP:c.451C > T (p.Pro151Ser) | VCV001026596 | Long QT Syn. | Uncertain significance(LR: Jul. 20, 2020) |
| 734 | SNP:c.3003G > A (p.Trp 1001Ter [symbol] | 85 | SNP:c.1372A > T (p.Ile458Phe) | VCV000456887 | Long QT Syn. | Uncertain significance(LR: Jul. 21, 2017) |
| 735 | SNP:c.3003G > C (p.Trp1001Cy [symbol] | 1051 | SNP:c.983G > A (p.Arg328His) | VCV000200315 | Long QT Syn.\|Not Prov.\|Arrhythmia | Uncertain significance(LR: Jul. 21, 2020) |
| 736 | SNP:c.3007G > A (p.Asp1003As [symbol] | 671 | SNP:c.2832G > C (p.Glu944Asp) | VCV000628923 | Arrhythmia | Uncertain significance(LR: Jul. 22, 2018) |
| 737 | SNP:c.3007G > T (p.Asp1003Ty [symbol] | 207 | SNP:c.169G > C (p.Ala57Pro) | VCV000067240 | Congenital long QT Syn.\|Long QT Syn. | Uncertain significance(LR: Jul. 22, 2019) |
| 738 | SNP:c.3013C > T (p.Arg1005Tr [symbol] | 442 | SNP:c.2144C > T (p.Ala715Val) | VCV000200413 | Arrhythmia\|Long QT Syn.\|not spec.\|Cardiova [symbol] | Uncertain significance(LR: Jul. 22, 2020) |
| 739 | SNP:c.3014G > A (p.Arg1005Gl [symbol] | 340 | SNP:c.1892C > T (p.Ser631Phe) | VCV000456898 | Long QT Syn.\|Not Prov. | Uncertain significance(LR: Jul. 24, 2019) |
| 740 | SNP:c.3019C > T (p.Arg1007Cy [symbol] | 868 | SNP:c.352G > C (p.Glu118Gln) | VCV001000649 | Long QT Syn. | Uncertain significance(LR: Jul. 24, 2020) |
| 741 | SNP:c.301A > G (p.Lys101Glu) | 961 | SNP:c.719C > T (p.Pro240Leu) | VCV000200299 | Not Prov.\|Long QT Syn. | Uncertain significance(LR: Jul. 24, 2020) |
| 742 | SNP:c.301A > T (p.Lys101Ter) | 73 | SNP:c.1332G > C (p.Glu444Asp) | VCV000927767 | Arrhythmia | Uncertain significance(LR: Jul. 25, 2019) |
| 743 | SNP:c.3020G > A (p.Arg1007Hi [symbol] | 649 | SNP:c.2774G > A (p.Gly925Glu) | VCV000921867 | Long QT Syn.\|Arrhythmia | Uncertain significance(LR: Jul. 25, 2020) |
| 744 | SNP:c.3027C > G (p.Tyr1009Te [symbol] | 969 | SNP:c.740A > G (p.Gln247Arg) | VCV001057001 | Long QT Syn. | Uncertain significance(LR: Jul. 25, 2020) |
| 745 | SNP:c.302A > G (p.Lys101Arg) | 581 | SNP:c.2634G > T (p.Glu878Asp) | VCV001304037 | Not Prov. | Uncertain significance(LR: Jul. 26, 2018) |
| 746 | SNP:c.3032A > G (p.Glu1011G [symbol] | 765 | SNP:c.3097C > T (p.Arg1033Trp) | VCV000067467 | Long QT Syn. 1\|Long QT Syn.\|Congenital lo [symbol] | Uncertain significance(LR: Jul. 27, 2021) |
| 747 | SNP:c.303A > T (p.Lys101Asn) | 775 | SNP:c.3119G > A (p.Ser1040Asn) | VCV000200526 | Not Prov. | Uncertain significance(LR: Jul. 29, 2014) |
| 748 | SNP:c.3040C > T (p.Arg1014Ter [symbol] | 857 | SNP:c.3448C > A (p.Leu1150Met) | VCV000456931 | Arrhythmia\|Not Prov.\|Long QT Syn. | Uncertain significance(LR: Jul. 29, 2020) |
| 749 | SNP:c.3041G > A (p.Arg1014Gl [symbol] | 888 | SNP:c.424G > A (p.Ala142Thr) | VCV001025220 | Long QT Syn. | Uncertain significance(LR: Jul. 29, 2020) |
| 750 | SNP:c.3049G > T (p.Ala1017Ser [symbol] | 632 | SNP:c.2750C > T (p.Pro917Leu) | VCV000067432 | Not Prov.\|not spec.\|Arrhythmia\|Long QT Syn [symbol] | Uncertain significance(LR: Jul. 29, 2021) |
| 751 | SNP:c.3052C > G (p.Pro1018Ala [symbol] | 842 | SNP:c.3365C > G (p.Pro1122Arg) | VCV000234998 | not spec. | Uncertain significance(LR: Jul. 3, 2014) |
| 752 | SNP:c.3053C > T (p.Pro1018Leu [symbol] | 947 | SNP:c.670G > A (p.Gly224Arg) | VCV000200297 | Not Prov. | Uncertain significance(LR: Jul. 3, 2019) |
| 753 | SNP:c.3058C > T (p.Pro1020Ser [symbol] | 931 | SNP:c.589G > A (p.Asp197Asn) | VCV000952715 | Long QT Syn. | Uncertain significance(LR: Jul. 31, 2019) |
| 754 | SNP:c.305A > C (p.Asp102Ala) | 943 | SNP:c.656A > T (p.Asp219Val) | VCV000157662 | Long QT Syn.\|Long QT Syn. 2 | Uncertain significance(LR: Jul. 5, 2019) |
| 755 | SNP:c.305A > T (p.Asp102Val) | 1009 | SNP:c.872T > C (p.Met291Thr) | VCV000067537 | Long QT Syn.\|Congenital long QT Syn. | Uncertain significance(LR: Jul. 6, 2018) |
| 756 | SNP:c.3061A > G (p.Ser1021Gly [symbol] | 1052 | SNP:c.985A > G (p.Thr329Ala) | VCV000640482 | Long QT Syn. | Uncertain significance(LR: Jul. 6, 2018) |
| 757 | SNP:c.3070A > T (p.Asn1024Ty [symbol] | 570 | SNP:c.2594C > T (p.Thr865Ile) | VCV000957208 | Long QT Syn. | Uncertain significance(LR: Jul. 6, 2019) |
| 758 | SNP:c.3079C > A (p.Leu1027Ile [symbol] | 787 | SNP:c.3153G > T (p.Arg1051Ser) | VCV000952274 | Long QT Syn. | Uncertain significance(LR: Jul. 6, 2019) |
| 759 | SNP:c.3089C > G (p.Pro1030Arg [symbol] | 990 | SNP:c.812G > A (p.Arg271His) | VCV000200304 | Not Prov. | Uncertain significance(LR: Jul. 7, 2014) |
| 760 | SNP:c.3089C > T (p.Pro 1030Leu [symbol] | 870 | SNP:c.362C > T (p.Ala121Val) | VCV001054947 | Long QT Syn. | Uncertain significance(LR: Jul. 8, 2020) |
| 761 | SNP:c.3092G > A (p.Gly1031As [symbol] | 126 | SNP:c.148G > C (p.Glu50Gln) | VCV000935728 | Long QT Syn. | Uncertain significance(LR: Jul. 9, 2019) |
| 762 | SNP:c.3094C > T (p.Arg1032Trp [symbol] | 551 | SNP:c.2536C > G (p.Pro846Ala) | VCV000161254 | Long QT Syn. 2 | Uncertain significance(LR: Jun. 1, 2014) |
| 763 | SNP:c.3095G > A (p.Arg1032Gl [symbol] | 867 | SNP:c.352G > A (p.Glu118Lys) | VCV000810212 | Not Prov. | Uncertain significance(LR: Jun. 1, 2017) |
| 764 | SNP:c.3095G > C (p.Arg1032Pr [symbol] | 461 | SNP:c.2221A > C (p.Lys741Gln) | VCV000923298 | Arrhythmia | Uncertain significance(LR: Jun. 11, 2019) |
| 765 | SNP:c.3097C > T (p.Arg1033Trp [symbol] | 663 | SNP:c.2794T > C (p.Ser932Pro) | VCV000942612 | Long QT Syn. | Uncertain significance(LR: Jun. 13, 2019) |
| 766 | SNP:c.3098G > A (p.Arg1033Gl [symbol] | 162 | SNP:c.1612A > G (p.Lys538Glu) | VCV000359311 | Long QT Syn. | Uncertain significance(LR: Jun. 14, 2016) |
| 767 | SNP:c.3098G > T (p.Arg1033Le [symbol] | 753 | SNP:c.3058C > T (p.Pro 1020Ser) | VCV000359306 | Long QT Syn. | Uncertain significance(LR: Jun. 14, 2016) |
| 768 | SNP:c.3103C > T (p.Arg1035Trp [symbol] | 853 | SNP:c.3416C > T (p.Pro1139Leu) | VCV000359302 | Long QT Syn. | Uncertain significance(LR: Jun. 14, 2016) |
| 769 | SNP:c.3104G > A (p.Arg1035Gl [symbol] | 1003 | SNP:c.853G > T (p.Ala285Ser) | VCV000359315 | Long QT Syn. | Uncertain significance(LR: Jun. 14, 2016) |
| 770 | SNP:c.3107G > A (p.Gly1036As [symbol] | 1007 | SNP:c.868G > T (p.Ala290Ser) | VCV000359314 | Long QT Syn. | Uncertain significance(LR: Jun. 14, 2016) |
| 771 | SNP:c.3109G > A (p.Asp1037As [symbol] | 119 | SNP:c.1475A > T (p.His492Leu) | VCV000581371 | Long QT Syn. | Uncertain significance(LR: Jun. 14, 2018) |
| 772 | SNP:c.3112G > A (p.Val1038Me [symbol] | 158 | SNP:c.1603G > T (p.Val535Leu) | VCV000570842 | Long QT Syn. | Uncertain significance(LR: Jun. 14, 2018) |
| 773 | SNP:c.3112G > T (p.Val1038Le [symbol] | 462 | SNP:c.2222A > G (p.Lys741Arg) | VCV000566154 | Long QT Syn. | Uncertain significance(LR: Jun. 14, 2018) |
| 774 | SNP:c.3118A > G (p.Ser1040Gly [symbol] | 597 | SNP:c.2675G > A (p.Arg892His) | VCV001054268 | Long QT Syn.\|Not Prov. | Uncertain significance(LR: Jun. 16, 2020) |
| 775 | SNP:c.3119G > A (p.Ser1040As [symbol] | 695 | SNP:c.2890C > G (p.Pro964Ala) | VCV000359307 | Long QT Syn.\|Long QT Syn. 2 | Uncertain significance(LR: Jun. 16, 2020) |
| 776 | SNP:c.3124C > G (p.Leu1042Va [symbol] | 29 | SNP:c.1180C > T (p.Arg394Cys) | VCV000855813 | Long QT Syn. | Uncertain significance(LR: Jun. 18, 2020) |
| 777 | SNP:c.3125T > C (p.Leu1042Pro [symbol] | 22 | SNP:c.1097G > A (p.Arg366Gln) | VCV000918732 | Arrhythmia Not Prov. | Uncertain significance(LR: Jun. 18, 2021) |
| 778 | SNP:c.312C > G (p.Ser104Arg) | 19 | SNP:c.1076T > A (p.Ile359Lys) | VCV000456877 | Long QT Syn. | Uncertain significance(LR: Jun. 19, 2017) |
| 779 | SNP:c.3133C > T (p.Leu1045Phe [symbol] | 410 | SNP:c.2035C > T (p.Arg679Trp) | VCV000581266 | Long QT Syn. | Uncertain significance(LR: Jun. 2, 2018) |
| 780 | SNP:c.3134T > G (p.Leu1045Arg [symbol] | 548 | SNP:c.2525T > C (p.Leu842Pro) | VCV000519212 | Cardiovas. pheno. | Uncertain significance(LR: Jun. 22, 2017) |
| 781 | SNP:c.3137A > G (p.Gln1046Arg [symbol] | 445 | SNP:c.215C > G (p.Pro72Arg) | VCV000067369 | Long QT Syn.\|Congenital long QT Syn. | Uncertain significance(LR: Jun. 22, 2019) |
| 782 | SNP:c.3138G > T (p.Gl1046His [symbol] | 865 | SNP:c.3470C > T (p.Pro1157Leu) | VCV000067499 | Arrhythmia\|SUDDEN INFANT DEATH Syn [symbol] | Uncertain significance(LR: Jun. 22, 2021) |
| 783 | SNP:c.3139C > T (p.Arg1047Cys [symbol] | 107 | SNP:c.1447G > T (p.Val483Phe) | VCV000949825 | Long QT Syn. | Uncertain significance(LR: Jun. 24, 2019) |
| 784 | SNP:c.3140G > A (p.Arg1047His [symbol] | 920 | SNP:c.545C > G (p.Ser182Trp) | VCV000405351 | Not Prov.\|Long QT Syn. | Uncertain significance(LR: Jun. 24, 2019) |
| 785 | SNP:c.3140G > T (p.Arg1047Leu [symbol] | 743 | SNP:c.3020G > A (p.Arg1007His) | VCV000067463 | Arrhythmia\|Congenital long QT Syn.\|Long Q [symbol] | Uncertain significance(LR: Jun. 24, 2020) |
| 786 | SNP:c.3146T > C (p.Leu1049Pro [symbol] | 638 | SNP:c.275G > T (p.Arg92Leu) | VCV000020057 | Not Prov. | Uncertain significance(LR: Jun. 25, 2019) |
| 787 | SNP:c.3153G > T (p.Arg1051Ser [symbol] | 930 | SNP:c.580G > A (p.Val194Met) | VCV000640808 | Long QT Syn.\|Not Prov. | Uncertain significance(LR: Jun. 25, 2019) |
| 788 | SNP:c.3161C > T (p.Thr1054Ile) | 936 | SNP:c.614C > T (p.Pro205Leu) | VCV000829864 | Short QT Syn. 1 | Uncertain significance(LR: Jun. 25, 2019) |
| 789 | SNP:c.3163C > T (p.Arg1055Trp [symbol] | 591 | SNP:c.2659C > T (p.Arg887Cys) | VCV000193802 | Long QT Syn.\|Not Prov.\|Arrhythmia | Uncertain significance(LR: Jun. 25, 2020) |
| 790 | SNP:c.3164G > A (p.Arg1055Gln [symbol] | 637 | SNP:c.275G > C (p.Arg92Pro) | VCV000947667 | Long QT Syn. | Uncertain significance(LR: Jun. 26, 2019) |
| 791 | SNP:c.3170G > A (p.Ser1057Asn [symbol] | 651 | SNP:c.2774G > T (p.Gly925Val) | VCV000200497 | Long QT Syn.\|Sudden unexplained death\|Not [symbol] | Uncertain significance(LR: Jun. 26, 2019) |
| 792 | SNP:c.3172G > A (p.Ala1058Thr [symbol] | 927 | SNP:c.56T > G (p.Ile19Ser) | VCV000949641 | Long QT Syn. | Uncertain significance(LR: Jun. 27, 2019) |
| 793 | SNP:c.3173C > A (p.Ala1058Gln [symbol] | 843 | SNP:c.3365C > T (p.Pro112Leu) | VCV000200534 | Arrhythmia\|Long QT Syn.\|Not Prov. | Uncertain significance(LR: Jun. 30, 2020) |
| 794 | SNP:c.3178A > G (p.Met1060Val [symbol] | 799 | SNP:c.3191T > G (p.Leu1064Arg) | VCV000845095 | Long QT Syn. | Uncertain significance(LR: Jun. 4, 2019) |
| 795 | SNP:c.317T > A (p.Phe106Tyr) | 79 | SNP:c.134A > C (p.Asn45Thr) | VCV000949254 | Long QT Syn. | Uncertain significance(LR: Jun. 5, 2019) |
| 796 | SNP:c.3185C > T (p.Thr1062Ile) | 6 | SNP:c.1017C > G (p.Asn339Lys) | VCV000042831 | Long QT Syn. | Uncertain significance(LR: Jun. 7, 2019) |
| 797 | SNP:c.3187G > C (p.Val1063Leu [symbol] | 290 | SNP:c.1826A > G (p.Asp609Gly) | VCV000067289 | Congenital long QT Syn.\|Long QT Syn. | Uncertain significance(LR: Jun. 7, 2019) |
| 798 | SNP:c.318C > A (p.Phe106Leu) | 838 | SNP:c.3352G > A (p.Glu1118Lys) | VCV000855130 | Long QT Syn. | Uncertain significance(LR: Jun. 7, 2020) |
| 799 | SNP:c.3191T > G (p.Leu1064Arg [symbol] | 18 | SNP:c.1073T > A (p.Ile358Asn) | VCV001172314 | Arrhythmia | Uncertain significance(LR: Jun. 8, 2020) |
| 800 | SNP:c.3193C > T (p.Gln1065Ter [symbol] | 900 | SNP:c.451C > G (p.Pro151Ala) | VCV000405361 | Arrhythmia\|Not Prov.\|Short QT Syn. 1\|Long [symbol] | Uncertain significance(LR: Jun. 8, 2020) |
| 801 | SNP:c.3196C > G (p.Leu1066Val [symbol] | 422 | SNP:c.2080C > T (p.Arg694Cys) | VCV000651990 | Arrhythmia\|Long QT Syn. | Uncertain significance(LR: Jun. 9, 2019) |
| 802 | SNP:c.31C > T (p.Gln11Ter) | 908 | SNP:c.491G > A (p.Arg164His) | VCV000067508 | Long QT Syn.\|Congenital long QT Syn.\|Lon [symbol] | Uncertain significance(LR: Mar. 1, 2020) |
| 803 | SNP:c.3202C > T (p.Gln106Ter8 [symbol] | 546 | SNP:c.2515C > A (p.Leu839Met) | VCV000920490 | Long QT Syn.\|Arrhythmia | Uncertain significance(LR: Mar. 10, 2020) |
| 804 | SNP:c.3205A > G (p.Gln1068Arg [symbol] | 657 | SNP:c.2785G > C (p.Glu929Gln) | VCV000926191 | Arrhythmia | Uncertain significance(LR: Mar. 11, 2020) |
| 805 | SNP:c.3209A > T (p.Gln1070Leu [symbol] | 736 | SNP:c.3007G > A (p.Asp1003Asn) | VCV000373622 | not spec.\|Long QT Syn. | Uncertain significance(LR: Mar. 11, 2020) |
| 806 | SNP:c.3211A > G (p.Met1071Val [symbol] | 773 | SNP:c.3112G > T (p.Val1038Leu) | VCV000405360 | Arrhythmia\|Long QT Syn. | Uncertain significance(LR: Mar. 12, 2019) |
| 807 | SNP:c.3215C > T (p.Thr1072Met [symbol] | 909 | SNP:c.499C > G (p.Leu167Val) | VCV000929250 | not spec. | Uncertain significance(LR: Mar. 12, 2019) |
| 808 | SNP:c.3224C > A (p.Pro1075Gln [symbol] | 312 | SNP:c.1864C > T (p.Leu622Phe) | VCV000037301 | Congenital long QT Syn.\|Long QT Syn. | Uncertain significance(LR: Mar. 15, 2017) |
| 809 | SNP:c.3224C > T (p.Pro1075Leu [symbol] | 538 | SNP:c.2482T > C (p.Cys828Arg) | VCV000842229 | Long QT Syn. | Uncertain significance(LR: Mar. 15, 2019) |
| 810 | SNP:c.3229G > A (p.Ala1077Thr [symbol] | 720 | SNP:c.2954A > G (p.Asn985Ser) | VCV000067456 | Arrhythmia Not Prov.\|Long QT Syn. | Uncertain significance(LR: Mar. 16, 2019) |
| 811 | SNP:c.322T > C (p.Cys108Arg) | 884 | SNP:c.409A > G (p.Met137Val) | VCV000930960 | Short QT Syn. 1 | Uncertain significance(LR: Mar. 16, 2020) |
| 812 | SNP:c.3233A > G (p.Tyr1078Cys [symbol] | 428 | SNP:c.2092G > A (p.Glu698Lys) | VCV000945957 | Not Prov.\|Long QT Syn. | Uncertain significance(LR: Mar. 16, 2021) |
| 813 | SNP:c.3247A > G (p.Thr1083Ala [symbol] | 182 | SNP:c.1678A > G (p.Ile560Val) | VCV001055024 | Long QT Syn. | Uncertain significance(LR: Mar. 17, 2020) |
| 814 | SNP:c.3251C > T (p.Pro1084Leu [symbol] | 642 | SNP:c.2768C > A (p.Pro925Gln) | VCV001008348 | Long QT Syn. | Uncertain significance(LR: Mar. 17, 2020) |
| 815 | SNP:c.3263C > G (p.Pro1088Arg [symbol] | 655 | SNP:c.2781G > T (p.Trp927Cys) | VCV001037100 | Not Prov.\|Long QT Syn. | Uncertain significance(LR: Mar. 17, 2020) |
| 816 | SNP:c.326T > G (p.Leu109Arg) | 639 | SNP:c.2764C > T (p.Arg922Trp) | VCV000067435 | Long QT Syn.\|Congenital long QT Syn. | Uncertain significance(LR: Mar. 18, 2020) |
| 817 | SNP:c.3278C > T (p.Pro1093Leu [symbol] | 598 | SNP:c.2678G > A (p.Arg893Lys) | VCV001025677 | Long QT Syn. | Uncertain significance(LR: Mar. 2, 2020) |
| 818 | SNP:c.3286C > A (p.Pro1096Thr [symbol] | 898 | SNP:c.44T > A (p.Leu15Gln) | VCV000200594 | Not Prov. | Uncertain significance(LR: Mar. 20, 2018) |
| 819 | SNP:c.3286C > T (p.Pro1096Ser [symbol] | 729 | SNP:c.2996G > A (p.Ser999Asn) | VCV000919130 | Arrhythmia | Uncertain significance(LR: Mar. 20, 2020) |
| 820 | SNP:c.3289G > A (p.Val1097Ile [symbol] | 812 | SNP:c.3233A > G (p.Tyr1078Cys) | VCV000067483 | Long QT Syn.\|Congenital long QT Syn.\|not [symbol] | Uncertain significance(LR: Mar. 22, 2019) |
| 821 | SNP:c.3292A > C (p.Ser1098Arg [symbol] | 465 | SNP:c.2231G > C (p.Arg744Pro) | VCV001017667 | Long QT Syn. | Uncertain significance(LR: Mar. 22, 2020) |
| 822 | SNP:c.3294C > G (p.Ser1098Arg [symbol] | 500 | SNP:c.235G > T (p.Ala79Ser) | VCV000456907 | Long QT Syn. | Uncertain significance(LR: Mar. 23, 2017) |
| 823 | SNP:c.3296C > T (p.Pro1099Leu [symbol] | 879 | SNP:c.388G > A (p.Glu130Lys) | VCV000067503 | Arrhythmia\|Long QT Syn.\|Congenital long Q [symbol] | Uncertain significance(LR: Mar. 23, 2019) |
| 824 | SNP:c.32A > G (p.Gln11Arg) | 81 | SNP:c.1357G > A (p.Ala453Thr) | VCV000919895 | Arrhythmia | Uncertain significance(LR: Mar. 24, 2020) |
| 825 | SNP:c.3301C > T (p.Pro1101Ser [symbol] | 160 | SNP:c.160T > C (p.Tyr54His) | VCV000067223 | Sudden cardiac death\|Prolonged QT interval\| [symbol] | Uncertain significance(LR: Mar. 25, 2019) |
| 826 | SNP:c.3302C > T (p.Pro1101Leu [symbol] | 243 | SNP:c.1749C > G (p.Ile583Met) | VCV001023474 | Long QT Syn. | Uncertain significance(LR: Mar. 25, 2020) |
| 827 | SNP:c.3305C > T (p.Thr1102Ile) | 923 | SNP:c.562G > A (p.Ala188Thr) | VCV001035380 | Long QT Syn. | Uncertain significance(LR: Mar. 25, 2020) |
| 828 | SNP:c.3315G > C (p.Leu1105Ph [symbol] | 87 | SNP:c.137A > G (p.Asp46Gly) | VCV001303967 | Not Prov. | Uncertain significance(LR: Mar. 25, 2021) |
| 829 | SNP:c.331G > A (p.Asp111Asn) | 983 | SNP:c.779C > T (p.Ala260Val) | VCV000571094 | Long QT Syn. | Uncertain significance(LR: Mar. 26, 2018) |
| 830 | SNP:c.3320C > T (p.Ser1107Leu [symbol] | 623 | SNP:c.2731G > C (p.Gly911Arg) | VCV000918838 | Arrhythmia | Uncertain significance(LR: Mar. 27, 2019) |
| 831 | SNP:c.3322C > G (p.Leu1108Va [symbol] | 715 | SNP:c.293T > G (p.Phe98Cys) | VCV000946662 | Long QT Syn. | Uncertain significance(LR: Mar. 29, 2019) |
| 832 | SNP:c.332A > T (p.Asp111Val) | 450 | SNP:c.2168G > A (p.Cys723Tyr) | VCV000200763 | Not Prov. | Uncertain significance(LR: Mar. 3, 2016) |
| 833 | SNP:c.3343A > G (p.Met1115Va [symbol] | 36 | SNP:c.1205A > G (p.His402Arg) | VCV000067166 | Long QT Syn.\|Congenital long QT Syn. | Uncertain significance(LR: Mar. 3, 2017) |
| 834 | SNP:c.3346G > A (p.Ala1116Th [symbol] | 603 | SNP:c.2684C > G (p.Thr895Arg) | VCV000919273 | Arrhythmia | Uncertain significance(LR: Mar. 4, 2019) |
| 835 | SNP:c.3347C > T (p.Ala1116Val [symbol] | 1042 | SNP:c.961G > T (p.Asp321Tyr) | VCV000359312 | Long QT Syn. 2\|Not Prov. | Uncertain significance(LR: Mar. 4, 2019) |
| 836 | SNP:c.3350G > A (p.Cys1117Ty [symbol] | 449 | SNP:c.2167T > G (p.Cys723Gly) | VCV000922895 | Arrhythmia | Uncertain significance(LR: Mar. 4, 2020) |
| 837 | SNP:c.3350G > T (p.Cys1117Ph [symbol] | 455 | SNP:c.2204C > T (p.Ser735Leu) | VCV000067374 | Long QT Syn.\|Congenital long QT Syn.\|Not [symbol] | Uncertain significance(LR: Mar. 4, 2020) |
| 838 | SNP:c.3352G > A (p.Glu1118Ly [symbol] | 886 | SNP:c.421C > T (p.Pro141Ser) | VCV001045443 | Long QT Syn. | Uncertain significance(LR: Mar. 4, 2020) |
| 839 | SNP:c.3355G > C (p.Glu1119Gl [symbol] | 810 | SNP:c.3229G > A (p.Ala1077Thr) | VCV000526983 | Long QT Syn.\|Arrhythmia | Uncertain significance(LR: Mar. 5, 2020) |
| 840 | SNP:c.3358C > G (p.Leu1120Va [symbol] | 303 | SNP:c.1849T > C (p.Phe617Leu) | VCV000207940 | Long QT Syn. | Uncertain significance(LR: Mar. 6, 2019) |
| 841 | SNP:c.3361C > T (p.Pro1121Ser [symbol] | 527 | SNP:c.243G > C (p.Gln81His) | VCV000067399 | Congenital long QT Syn.\|Long QT Syn.\|Long [symbol] | Uncertain significance(LR: Mar. 7, 2018) |
| 842 | SNP:c.3365C > G (p.Pro1122Ar [symbol] | 47 | SNP:c.1240A > G (p.Ile414Val) | VCV000924916 | Arrhythmia | Uncertain significance(LR: Mar. 7, 2019) |
| 843 | SNP:c.3365C > T (p.Pro1122Leu [symbol] | 289 | SNP:c.1826A > C (p.Asp609Ala) | VCV000456895 | Long QT Syn. | Uncertain significance(LR: Mar. 9, 2017) |
| 844 | SNP:c.3379C > T (p.Leu1127Phe [symbol] | 818 | SNP:c.3286C > A (p.Pro1096Thr) | VCV000456927 | Long QT Syn. | Uncertain significance(LR: Mar. 9, 2017) |
| 845 | SNP:c.3392G > T (p.Gly1131Val [symbol] | 822 | SNP:c.3294C > G (p.Ser1098Arg) | VCV000928123 | Arrhythmia | Uncertain significance(LR: Mar. 9, 2019) |
| 846 | SNP:c.3394C > G (p.Pro1132Ala [symbol] | 252 | SNP:c.1756C > G (p.Leu586Val) | VCV000993664 | none provided | Uncertain significance(LR: Mar. 9, 2020) |
| 847 | SNP:c.3400C > T (p.Arg1134Ter [symbol] | 1026 | SNP:c.927C > G (p.His309Gln) | VCV000810210 | Not Prov. | Uncertain significance(LR: May 1, 2018) |
| 848 | SNP:c.3403C > T (p.Arg1135Cys [symbol] | 232 | SNP:c.1733A > C (p.His578Pro) | VCV000200378 | Not Prov. | Uncertain significance(LR: May 10, 2014) |
| 849 | SNP:c.3404G > A (p.Arg1135Hi [symbol] | 309 | SNP:c.185G > A (p.Arg62Gln) | VCV000067298 | Congenital long QT Syn.\|Long QT Syn. | Uncertain significance(LR: May 10, 2019) |
| 850 | SNP:c.3406C > T (p.Leu1136Ph [symbol] | 110 | SNP:c.1462C > T (p.Arg488Cys) | VCV001018981 | Long QT Syn. | Uncertain significance(LR: May 12, 2020) |
| 851 | SNP:c.340C > T (p.Pro114Ser) | 658 | SNP:c.2788A > C (p.Ser930Arg) | VCV000200503 | Not Prov. | Uncertain significance(LR: May 14, 2014) |
| 852 | SNP:c.3410C > A (p.Ser1137Tyr [symbol] | 505 | SNP:c.2369T > C (p.Leu790Pro) | VCV001027323 | Long QT Syn. | Uncertain significance(LR: May 15, 2020) |
| 853 | SNP:c.3416C > T (p.Pro1139Leu [symbol] | 847 | SNP:c.3400C > T (p.Arg1134Ter) | VCV000923242 | Long QT Syn.\|Arrhythmia | Uncertain significance(LR: May 15, 2020) |
| 854 | SNP:c.3430G > A (p.Ala1144Th [symbol] | 706 | SNP:c.290C > G (p.Ala97Gly) | VCV000200580 | Not Prov. | Uncertain significance(LR: May 16, 2012) |
| 855 | SNP:c.3436A > T (p.Thr1146Ser [symbol] | 628 | SNP:c.273G > T (p.Glu91Asp) | VCV001305882 | Not Prov. | Uncertain significance(LR: May 16, 2019) |
| 856 | SNP:c.343G > A (p.Val115Met) | 20 | SNP:c.1081C > T (p.Pro361Ser) | VCV000456878 | Long QT Syn. | Uncertain significance(LR: May 18, 2017) |
| 857 | SNP:c.3448C > A (p.Leu1150Me [symbol] | 1001 | SNP:c.838C > T (p.Arg280Cys) | VCV000943502 | Long QT Syn. | Uncertain significance(LR: May 18, 2019) |
| 858 | SNP:c.344T > G (p.Val115Gly) | 28 | SNP:c.1178C > T (p.Pro393Leu) | VCV000933401 | Long QT Syn. | Uncertain significance(LR: May 19, 2019) |
| 859 | SNP:c.3453C > A (p.His1151Gln [symbol] | 756 | SNP:c.3061A > G (p.Ser1021Gly) | VCV000572915 | Long QT Syn. | Uncertain significance(LR: May 2, 2018) |
| 860 | SNP:c.3457C > T (p.His1153Ty [symbol] | 732 | SNP:c.29C > T (p.Pro10Leu) | VCV000946979 | Long QT Syn. | Uncertain significance(LR: May 2, 2019) |
| 861 | SNP:c.3460G > A (p.Gly1154Se [symbol] | 981 | SNP:c.775G > A (p.Asp259Asn) | VCV000067527 | Congenital long QT Syn.\|Long QT Syn.\|Not [symbol] | Uncertain significance(LR: May 20, 2020) |
| 862 | SNP:c.3464C > T (p.Ser1155Leu [symbol] | 835 | SNP:c.3347C > T (p.Ala1116Val) | VCV000067491 | Arrhythmia\|Congenital long QT Syn.\|Long Q [symbol] | Uncertain significance(LR: May 21, 2019) |
| 863 | SNP:c.3467A > G (p.Asp1156G [symbol] | 717 | SNP:c.2944G > A (p.Asp982Asn) | VCV000237299 | Arrhythmia\|Long QT Syn.\|Long QT Syn. 2 | Uncertain significance(LR: May 21, 2020) |
| 864 | SNP:c.3469C > T (p.Pro1157Ser [symbol] | 893 | SNP:c.443G > A (p.Arg148Gln) | VCV000567306 | Long QT Syn.\|Not Prov.\|Arrhythmia | Uncertain significance(LR: May 21, 2020) |
| 865 | SNP:c.3470C > T (p.Pro1157Leu [symbol] | 454 | SNP:c.2200C > T (p.Arg734Cys) | VCV000200765 | Arrhythmia\| Long QT Syn.\|Not Prov. | Uncertain significance(LR: May 21, 2021) |
| 866 | SNP:c.3473G > C (p.Gly1158Al [symbol] | 665 | SNP:c.2803C > G (p.Pro935Ala) | VCV000922520 | Arrhythmia | Uncertain significance(LR: May 23, 2019) |
| 867 | SNP:c.352G > A (p.Glu118Lys) | 408 | SNP:c.2030T > C (p.Met677Thr) | VCV000939911 | Long QT Syn. | Uncertain significance(LR: May 27, 2019) |
| 868 | SNP:c.352G > C (p.Glu118Gln) | 809 | SNP:c.3224C > T (p.Pro1075Leu) | VCV000067481 | Long QT Syn. 2\|Congenital long QT Syn.\|Lo [symbol] | Uncertain significance(LR: May 28, 2019) |
| 869 | SNP:c.355G > C (p.Asp119His) | 954 | SNP:c.697G > A (p.Ala233Thr) | VCV000848897 | Long QT Syn. | Uncertain significance(LR: May 28, 2019) |
| 870 | SNP:c.362C > T (p.Ala121Val) | 579 | SNP:c.2626G > A (p.Glu876Lys) | VCV000456914 | Long QT Syn.\|Not Prov. | Uncertain significance(LR: May 3, 2017) |
| 871 | SNP:c.371T > C (p.Met124Thr) | 90 | SNP:c.138C > G (p.Asp46Glu) | VCV000921751 | Arrhythmia | Uncertain significance(LR: May 30, 2019) |
| 872 | SNP:c.371T > G (p.Met124Arg) | 873 | SNP:c.373T > C (p.Phe125Leu) | VCV000934591 | Long QT Syn. | Uncertain significance(LR: May 30, 2019) |
| 873 | SNP:c.373T > C (p.Phe125Leu) | 792 | SNP:c.3172G > A (p.Ala1058Thr) | VCV000456924 | Long QT Syn. | Uncertain significance(LR: May 31, 2017) |
| 874 | SNP:c.374T > G (p.Phe125Cys) | 382 | SNP:c.1946C > T (p.Ser649Phe) | VCV000067346 | Long QT Syn.\|Congenital long QT Syn. | Uncertain significance(LR: May 31, 2019) |
| 875 | SNP:c.377T > A (p.Ile126Asn) | 233 | SNP:c.1736T > C (p.Met579Thr) | VCV000067255 | Long QT Syn.\|Congenital long QT Syn. | Uncertain significance(LR: May 31, 2020) |
| 876 | SNP:c.379C > T (p.Leu127Phe) | 526 | SNP:c.2437G > A (p.Ala813Thr) | VCV000928527 | not spec. | Uncertain significance(LR: May 6, 2019) |
| 877 | SNP:c.383A > G (p.Asn128Ser) | 836 | SNP:c.3350G > A (p.Cys1117Tyr) | VCV000180385 | Ventricular tachycardia | Uncertain significance(LR: May 7, 2014) |
| 878 | SNP:c.387C > G (p.Phe129Leu) | 1049 | SNP:c.980A > G (p.Tyr327Cys) | VCV000264025 | Cardiovas. pheno. | Uncertain significance(LR: May 8, 2015) |
| 879 | SNP:c.388G > A (p.Glu130Lys) | 620 | SNP:c.2719G > A (p.Ala907Thr) | VCV000200486 | Long QT Syn.\|Not Prov. | Uncertain significance(LR: May 8, 2019) |
| 880 | SNP:c.38C > A (p.Thr13Asn) | 137 | SNP:c.1537T > C (p.Phe513Leu) | VCV000567702 | Long QT Syn. | Uncertain significance(LR: May 9, 2019) |
| 881 | SNP:c.391G > A (p.Val131Met) | 679 | SNP:c.2853C > A (p.Ser951Arg) | VCV000840645 | Long QT Syn. | Uncertain significance(LR: May 9, 2019) |
| 882 | SNP:c.391G > T (p.Val131Leu) | 231 | SNP:c.1730C > A (p.Pro577Gln) | VCV000872354 | Not Prov. | Uncertain significance(LR: Nov. 1, 2019) |
| 883 | SNP:c.398T > C (p.Met133Thr) | 595 | SNP:c.2668T > C (p.Ser890Pro) | VCV000926306 | Arrhythmia | Uncertain significance(LR: Nov. 1, 2019) |
| 884 | SNP:c.409A > G (p.Met137Val) | 763 | SNP:c.3095G > A (p.Arg1032Gln) | VCV000067466 | Long QT Syn.\|Congenital long QT Syn.\|Not [symbol] | Uncertain significance(LR: Nov. 1, 2020) |
| 885 | SNP:c.416G > C (p.Gly139Ala) | 723 | SNP:c.2968G > A (p.Ala990Thr) | VCV000968306 | Arrhythmia\| Long QT Syn. | Uncertain significance(LR: Nov. 10, 2020) |
| 886 | SNP:c.421C > T (p.Pro141Ser) | 906 | SNP:c.478G > T (p.Ala160Ser) | VCV000955775 | Long QT Syn. | Uncertain significance(LR: Nov. 11, 2019) |
| 887 | SNP:c.422C > T (p.Pro141Leu) | 769 | SNP:c.3104G > A (p.Arg1035Gln) | VCV000456922 | Arrhythmia\|Long QT Syn. | Uncertain significance(LR: Nov. 11, 2020) |
| 888 | SNP:c.424G > A (p.Ala142Thr) | 977 | SNP:c.769A > C (p.Asn257His) | VCV000067526 | Not Prov. | Uncertain significance(LR: Nov. 12, 2018) |
| 889 | SNP:c.431A > T (p.Asp144Val) | 821 | SNP:c.3292A > C (p.Ser1098Arg) | VCV000966117 | Long QT Syn. | Uncertain significance(LR: Nov. 12, 2019) |
| 890 | SNP:c.434C > T (p.Thr145Ile) | 1025 | SNP:c.925C > T (p.His309Tyr) | VCV000526915 | Long QT Syn. | Uncertain significance(LR: Nov. 13, 2017) |
| 891 | SNP:c.440A > G (p.His 147Arg) | 721 | SNP:c.2956C > A (p.Pro986Thr) | VCV000640120 | Arrhythmia\| Long QT Syn. | Uncertain significance(LR: Nov. 14, 2019) |
| 892 | SNP:c.442C > T (p.Arg148Trp) | 12 | SNP:c.1054C > T (p.Pro352Ser) | VCV000918184 | Arrhythmia | Uncertain significance(LR: Nov. 16, 2018) |
| 893 | SNP:c.443G > A (p.Arg148Gln) | 617 | SNP:c.2711A > G (p.Glu904Gly) | VCV000642118 | Long QT Syn. | Uncertain significance(LR: Nov. 16, 2018) |
| 894 | SNP:c.446G > A (p.Gly149Asp) | 689 | SNP:c.2875T > A (p.Ser959Thr) | VCV000921152 | Arrhythmia | Uncertain significance(LR: Nov. 16, 2018) |
| 895 | SNP:c.446G > C (p.Gly149Ala) | 953 | SNP:c.695G > T (p.Arg232Leu) | VCV000264446 | Cardiovas. pheno. | Uncertain significance(LR: Nov. 18, 2015) |
| 896 | SNP:c.448C > T (p.Pro150Ser) | 778 | SNP:c.312C > G (p.Ser104Arg) | VCV000527024 | Long QT Syn. | Uncertain significance(LR: Nov. 18, 2017) |
| 897 | SNP:c.449C > T (p.Pro150Leu) | 509 | SNP:c.2380G > A (p.Val794Ile) | VCV000200434 | Long QT Syn.\|Arrhythmia\|Not Prov. | Uncertain significance(LR: Nov. 18, 2020) |
| 898 | SNP:c.44T > A (p.Leu15Gln) | 978 | SNP:c.76A > G (p.Ser26Gly) | VCV000928116 | Arrhythmia | Uncertain significance(LR: Nov. 18, 2020) |
| 899 | SNP:c.44T > G (p.Leu15Arg) | 922 | SNP:c.55A > T (p.Ile 19Phe) | VCV000527023 | Long QT Syn. | Uncertain significance(LR: Nov. 19, 2018) |
| 900 | SNP:c.451C > G (p.Pro151Ala) | 690 | SNP:c.2876C > G (p.Ser959Cys) | VCV000662474 | Long QT Syn. | Uncertain significance(LR: Nov. 2, 2018) |
| 901 | SNP:c.451C > T (p.Pro151Ser) | 764 | SNP:c.3095G > C (p.Arg1032Pro) | VCV001171150 | Arrhythmia | Uncertain significance(LR: Nov. 2, 2020) |
| 902 | SNP:c.455C > G (p.Thr152Ser) | 896 | SNP:c.448C > T (p.Pro150Ser) | VCV000222667 | Ventricular tachycardia | Uncertain significance(LR: Nov. 20, 2015) |
| 903 | SNP:c.455C > T (p.Thr152Ile) | 513 | SNP:c.2387T > G (p.Val796Gly) | VCV000518748 | Cardiovas. pheno. | Uncertain significance(LR: Nov. 20, 2017) |
| 904 | SNP:c.460T > C (p.Trp154Arg) | 574 | SNP:c.2612C > G (p.Ser871Cys) | VCV000921315 | Arrhythmia | Uncertain significance(LR: Nov. 20, 2018) |
| 905 | SNP:c.461G > A (p.Trp154Ter) | 828 | SNP:c.3315G > C (p.Leu1105Phe) | VCV000926697 | Arrhythmia | Uncertain significance(LR: Nov. 20, 2018) |
| 906 | SNP:c.478G > T (p.Ala160Ser) | 8 | SNP:c.1036G > A (p.Asp346Asn) | VCV000841013 | Long QT Syn. | Uncertain significance(LR: Nov. 22, 2019) |
| 907 | SNP:c.47A > C (p.Asp 16Ala) | 169 | SNP:c.1645G > A (p.Val549Met) | VCV000919780 | Arrhythmia | Uncertain significance(LR: Nov. 24, 2019) |
| 908 | SNP:c.491G > A (p.Arg164His) | 685 | SNP:c.2861G > A (p.Arg954His) | VCV000456917 | Arrhythmia\| Long QT Syn. | Uncertain significance(LR: Nov. 24, 2019) |
| 909 | SNP:c.499C > G (p.Leu167Val) | 414 | SNP:c.2046G > C (p.Glu682Asp) | VCV000487626 | Wolff-Parkinson-White pattern\|Not Prov.\|Ar [symbol] | Uncertain significance(LR: Nov. 25, 2020) |
| 910 | SNP:c.515C > T (p.Ala172Val) | 589 | SNP:c.2654G > A (p.Arg885His) | VCV000402995 | not spec.\|Arrhythmia\|Not Prov.\|Long QT Syn [symbol] | Uncertain significance(LR: Nov. 26, 2019) |
| 911 | SNP:c.523G > A (p.Ala175Thr) | 1054 | SNP:c.995A > G (p.Lys332Arg) | VCV000847270 | Long QT Syn. | Uncertain significance(LR: Nov. 26, 2019) |
| 912 | SNP:c.523G > T (p.Ala175Ser) | 788 | SNP:c.3161C > T (p.Thr1054Ile) | VCV000527001 | Long QT Syn. | Uncertain significance(LR: Nov. 27, 2017) |
| 913 | SNP:c.524C > A (p.Ala175Asp) | 132 | SNP:c.1516A > G (p.Ile506Val) | VCV000645833 | Long QT Syn. | Uncertain significance(LR: Nov. 28, 2018) |
| 914 | SNP:c.526C > T (p.Arg176Trp) | 425 | SNP:c.2086C > T (p.Arg696Cys) | VCV000067360 | Long QT Syn.\|Congenital long QT Syn. | Uncertain significance(LR: Nov. 28, 2018) |
| 915 | SNP:c.527G > A (p.Arg176Gln) | 582 | SNP:c.2635G > A (p.Gly879Ser) | VCV000924749 | Arrhythmia | Uncertain significance(LR: Nov. 29, 2018) |
| 916 | SNP:c.530A > C (p.Glu177Ala) | 498 | SNP:c.235G > A (p.Ala79Thr) | VCV000987798 | not spec. | Uncertain significance(LR: Nov. 30, 2020) |
| 917 | SNP:c.535T > G (p.Ser179Ala) | 76 | SNP:c.1342G > A (p.Ala448Thr) | VCV000924051 | Arrhythmia | Uncertain significance(LR: Nov. 4, 2019) |
| 918 | SNP:c.542G > A (p.Arg181Gln) | 641 | SNP:c.2765G > T (p.Arg922Leu) | VCV000924058 | Arrhythmia | Uncertain significance(LR: Nov. 4, 2019) |
| 919 | SNP:c.545C > A (p.Ser182Ter) | 659 | SNP:c.2788A > G (p.Ser930Gly) | VCV000924230 | Arrhythmia | Uncertain significance(LR: Nov. 4, 2019) |
| 920 | SNP:c.545C > G (p.Ser182Trp) | 1024 | SNP:c.923T > G (p.Met308Arg) | VCV000923222 | Arrhythmia\| Long QT Syn. | Uncertain significance(LR: Nov. 4, 2020) |
| 921 | SNP:c.559G > A (p.Gly187Ser) | 910 | SNP:c.515C > T (p.Ala172Val) | VCV000200290 | Not Prov. | Uncertain significance(LR: Nov. 5, 2013) |
| 922 | SNP:c.55A > T (p.Ile 19Phe) | 587 | SNP:c.2651A > G (p.Gln884Arg) | VCV000633279 | not spec. | Uncertain significance(LR: Nov. 6, 2017) |
| 923 | SNP:c.562G > A (p.Ala188Thr) | 82 | SNP:c.135C > A (p.Asn45Lys) | VCV000569898 | Long QT Syn. | Uncertain significance(LR: Nov. 6, 2018) |
| 924 | SNP:c.563C > T (p.Ala188Val) | 966 | SNP:c.731C > A (p.Ala244Glu) | VCV000969507 | Long QT Syn. | Uncertain significance(LR: Nov. 6, 2019) |
| 925 | SNP:c.566G > T (p.Gly189Val) | 402 | SNP:c.2006G > C (p.Gly669Ala) | VCV000647535 | Long QT Syn. | Uncertain significance(LR: Nov. 7, 2018) |
| 926 | SNP:c.568G > A (p.Ala190Thr) | 959 | SNP:c.710C > A (p.Pro237His) | VCV000526973 | Long QT Syn. | Uncertain significance(LR: Nov. 8, 2018) |
| 927 | SNP:c.56T > G (p.Ile 19Ser) | 485 | SNP:c.2312A > C (p.His771Pro) | VCV000964746 | Long QT Syn. | Uncertain significance(LR: Nov. 8, 2019) |
| 928 | SNP:c.572C > T (p.Pro191Leu) | 26 | SNP:c.1149C > A (p.Asp383Glu) | VCV000925167 | Arrhythmia | Uncertain significance(LR: Nov. 9, 2018) |
| 929 | SNP:c.578C > T (p.Ala193Val) | 761 | SNP:c.3092G > A (p.Gly1031Asp) | VCV000919480 | Arrhythmia | Uncertain significance(LR: Nov. 9, 2018) |
| 930 | SNP:c.580G > A (p.Val194Met) | 940 | SNP:c.647C > T (p.Thr216Ile) | VCV000582107 | Long QT Syn. | Uncertain significance(LR: Nov. 9, 2018) |
| 931 | SNP:c.589G > A (p.Asp197Asn) | 458 | SNP:c.2216A > G (p.His739Arg) | VCV000222670 | Long QT Syn. | Uncertain significance(LR: Oct. 1, 2015) |
| 932 | SNP:c.58C > G (p.Arg20Gly) | 135 | SNP:c.1520C > T (p.Pro507Leu) | VCV000200352 | Not Prov. | Uncertain significance(LR: Oct. 1, 2020) |
| 933 | SNP:c.602C > T (p.Thr201Met) | 866 | SNP:c.3473G > C (p.Gly1158Ala) | VCV000939464 | Long QT Syn. | Uncertain significance(LR: Oct. 10, 2019) |
| 934 | SNP:c.607G > A (p.Ala203Thr) | 553 | SNP:c.2537C > T (p.Pro846Leu) | VCV000405353 | Long QT Syn. | Uncertain significance(LR: Oct. 11, 2017) |
| 935 | SNP:c.613C > T (p.Pro205Ser) | 377 | SNP:c.1935G > A (p.Met645Ile) | VCV000067343 | Congenital long QT Syn.\|Not Prov. | Uncertain significance(LR: Oct. 11, 2018) |
| 936 | SNP:c.614C > T (p.Pro205Leu) | 806 | SNP:c.3211A > G (p.Met1071 Val) | VCV000629473 | Arrhythmia | Uncertain significance(LR: Oct. 11, 2018) |
| 937 | SNP:c.629T > C (p.Leu210Pro) | 859 | SNP:c.3453C > A (p.His1151Gln) | VCV000629472 | Arrhythmia | Uncertain significance(LR: Oct. 11, 2018) |
| 938 | SNP:c.638A > G (p.Asp213Gly) | 674 | SNP:c.2837C > T (p.Pro946Leu) | VCV001008413 | Long QT Syn. | Uncertain significance(LR: Oct. 12, 2020) |
| 939 | SNP:c.644T > G (p.Val215Gly) | 634 | SNP:c.2758C > G (p.Arg920Gly) | VCV000200490 | Arrhythmia\| Not Prov.\|Long QT Syn. | Uncertain significance(LR: Oct. 13, 2020) |
| 940 | SNP:c.647C > T (p.Thr216Ile) | 738 | SNP:c.3013C > T (p.Arg1005Trp) | VCV001019746 | Long QT Syn. | Uncertain significance(LR: Oct. 13, 2020) |
| 941 | SNP:c.652A > G (p.Met218Val) | 883 | SNP:c.398T > C (p.Met133Thr) | VCV000200282 | Not Prov.\|Long QT Syn. 2\|Long QT Syn. | Uncertain significance(LR: Oct. 14, 2019) |
| 942 | SNP:c.655G > A (p.Asp219Asn) | 549 | SNP:c.2530A > G (p.Met844Val) | VCV000658202 | Arrhythmia\|Not Prov.\|Long QT Syn. | Uncertain significance(LR: Oct. 14, 2020) |
| 943 | SNP:c.656A > T (p.Asp219Val) | 600 | SNP:c.2681G > A (p.Arg894His) | VCV000448972 | Inborn genetic diseases\|Long QT Syn. 2\|Arrh [symbol] | Uncertain significance(LR: Oct. 14, 2020) |
| 944 | SNP:c.65T > C (p.Phe22Ser) | 654 | SNP:c.2780G > T (p.Trp927Leu) | VCV000200501 | Arrhythmia\|Long QT Syn.\|Long QT Syn. 2\|N [symbol] | Uncertain significance(LR: Oct. 14, 2020) |
| 945 | SNP:c.663C > G (p.His221Gln) | 937 | SNP:c.629T > C (p.Leu210Pro) | VCV000938315 | Long QT Syn. | Uncertain significance(LR: Oct. 15, 2019) |
| 946 | SNP:c.664G > A (p.Val222Met) | 143 | SNP:c.1576A > G (p.Thr526Ala) | VCV001038284 | Long QT Syn. | Uncertain significance(LR: Oct. 15, 2020) |
| 947 | SNP:c.670G > A (p.Gly224Arg) | 624 | SNP:c.2734C > T (p.Arg912Trp) | VCV000180384 | Arrhythmia\|Not Prov.\|Long QT Syn. | Uncertain significance(LR: Oct. 15, 2020) |
| 948 | SNP:c.682G > C (p.Ala228Pro) | 678 | SNP:c.284A > C (p.Glu95Ala) | VCV000200578 | Long QT Syn.\|Not Prov. | Uncertain significance(LR: Oct. 15, 2020) |
| 949 | SNP:c.683C > T (p.Ala228Val) | 982 | SNP:c.778G > C (p.Ala260Pro) | VCV000427970 | Hypertrophic cardiomyopathy\|Long QT Syn. [symbol] | Uncertain significance(LR: Oct. 17, 2018) |
| 950 | SNP:c.685G > T (p.Glu229Ter) | 412 | SNP:c.203T > G (p.Phe68Cys) | VCV000940257 | Long QT Syn. | Uncertain significance(LR: Oct. 18, 2019) |
| 951 | SNP:c.692G > A (p.Arg231Gln) | 669 | SNP:c.2819G > T (p.Ser940Ile) | VCV000923239 | Arrhythmia | Uncertain significance(LR: Oct. 18, 2019) |
| 952 | SNP:c.694C > T (p.Arg232Cys) | 839 | SNP:c.3355G > C (p.Glu1119Gln) | VCV000067492 | Long QT Syn.\|Not Prov.\|Arrhythmia | Uncertain significance(LR: Oct. 18, 2019) |
| 953 | SNP:c.695G > T (p.Arg232Leu) | 848 | SNP:c.3403C > T (p.Arg1135Cys) | VCV000920427 | Not Prov.\|Arrhythmia | Uncertain significance(LR: Oct. 18, 2019) |
| 954 | SNP:c.697G > A (p.Ala233Thr) | 965 | SNP:c.729C > G (p.Ser243Arg) | VCV000648410 | Long QT Syn. | Uncertain significance(LR: Oct. 19, 2018) |
| 955 | SNP:c.697G > T (p.Ala233Ser) | 108 | SNP:c.1459G > A (p.Gly487Ser) | VCV000200342 | not spec.\|Arrhythmia\|Not Prov.\|Long QT Syn [symbol] | Uncertain significance(LR: Oct. 19, 2020) |
| 956 | SNP:c.704T > C (p.Val235Ala) | 172 | SNP:c.1652T > C (p.Phe551Ser) | VCV000392546 | Long QT Syn.\|Not Prov. | Uncertain significance(LR: Oct. 20, 2020) |
| 957 | SNP:c.707G > A (p.Gly236Asp) | 466 | SNP:c.2236G > T (p.Ala746Ser) | VCV000222671 | Not Prov.\|Long QT Syn. | Uncertain significance(LR: Oct. 20, 2020) |
| 958 | SNP:c.707G > T (p.Gly236Val) | 817 | SNP:c.3278C > T (p.Pro1093Leu) | VCV000067485 | Congenital long QT Syn.\|not spec.\|Long QT [symbol] | Uncertain significance(LR: Oct. 20, 2020) |
| 959 | SNP:c.710C > A (p.Pro237His) | 588 | SNP:c.2653C > T (p.Arg885Cys) | VCV000067422 | Congenital long QT Syn.\|not spec.\|Arrhythm [symbol] | Uncertain significance(LR: Oct. 21, 2020) |
| 960 | SNP:c.712G > A (p.Gly238Ser) | 699 | SNP:c.2899C > T (p.Pro967Ser) | VCV000923330 | Arrhythmia\|Long QT Syn. | Uncertain significance(LR: Oct. 22, 2019) |
| 961 | SNP:c.719C > T (p.Pro240Leu) | 486 | SNP:c.2312A > G (p.His771 Arg) | VCV000405338 | Long QT Syn. | Uncertain significance(LR: Oct. 24, 2018) |
| 962 | SNP:c.722C > T (p.Pro241Leu) | 430 | SNP:c.2097G > T (p.Glu699Asp) | VCV001001725 | Long QT Syn. | Uncertain significance(LR: Oct. 24, 2020) |
| 963 | SNP:c.724C > G (p.Arg242Gly) | 348 | SNP:c.1901C > T (p.Thr634Ile) | VCV000067325 | Congenital long QT Syn.\|Long QT Syn. | Uncertain significance(LR: Oct. 25, 2020) |
| 964 | SNP:c.724C > T (p.Arg242Cys) | 813 | SNP:c.3247A > G (p.Thr1083Ala) | VCV000200529 | Long QT Syn.\|Not Prov.\|Arrhythmia | Uncertain significance(LR: Oct. 26, 2020) |
| 965 | SNP:c.729C > G (p.Ser243 Arg) | 975 | SNP:c.758C > G (p.Ala253Gly) | VCV000200723 | Not Prov. | Uncertain significance(LR: Oct. 27, 2014) |
| 966 | SNP:c.731C > A (p.Ala244Glu) | 39 | SNP:c.1225G > A (p.Val409Met) | VCV000456884 | Arrhythmia\|Long QT Syn.\|Wolff-Parkinson- [symbol] | Uncertain significance(LR: Oct. 27, 2020) |
| 967 | SNP:c.731C > T (p.Ala244Val) | 952 | SNP:c.694C > T (p.Arg232Cys) | VCV000855032 | Long QT Syn. | Uncertain significance(LR: Oct. 27, 2020) |
| 968 | SNP:c.736G > T (p.Gly246Cys) | 991 | SNP:c.817C > G (p.Arg273Gly) | VCV001044178 | Long QT Syn. | Uncertain significance(LR: Oct. 27, 2020) |
| 969 | SNP:c.740A > G (p.Gln247Arg) | 31 | SNP:c.1189C > T (p.Arg397Cys) | VCV000405343 | Arrhythmia\|Cardiovas. pheno.\|Long QT Syn. [symbol] | Uncertain significance(LR: Oct. 28, 2018) |
| 970 | SNP:c.749C > A (p.Ser250Ter) | 774 | SNP:c.3118A > G (p.Ser1040Gly) | VCV000067472 | SUDDEN INFANT DEATH Syn.\|Long QT [symbol] | Uncertain significance(LR: Oct. 28, 2019) |
| 971 | SNP:c.751C > G (p.Pro251Ala) | 938 | SNP:c.638A > G (p.Asp213Gly) | VCV000971664 | Long QT Syn. | Uncertain significance(LR: Oct. 28, 2019) |
| 972 | SNP:c.751C > T (p.Pro251Ser) | 88 | SNP:c.1384A > G (p.Met462Val) | VCV001002624 | Long QT Syn. | Uncertain significance(LR: Oct. 28, 2020) |
| 973 | SNP:c.754C > G (p.Arg252Gly) | 824 | SNP:c.32A > G (p.Gln11Arg) | VCV001063296 | Long QT Syn. | Uncertain significance(LR: Oct. 28, 2020) |
| 974 | SNP:c.755G > A (p.Arg252Gln) | 837 | SNP:c.3350G > T (p.Cys1117Phe) | VCV000582288 | Long QT Syn. | Uncertain significance(LR: Oct. 29, 2018) |
| 975 | SNP:c.758C > G (p.Ala253Gly) | 945 | SNP:c.663C > G (p.His221Gln) | VCV000647893 | Long QT Syn. | Uncertain significance(LR: Oct. 29, 2018) |
| 976 | SNP:c.762C > G (p.His254Gln) | 728 | SNP:c.298C > T (p.Arg100Trp) | VCV000067459 | Congenital long QT Syn.\|Long QT Syn. | Uncertain significance(LR: Oct. 3, 2019) |
| 977 | SNP:c.769A > C (p.Asn257His) | 912 | SNP:c.523G > T (p.Ala175Ser) | VCV000937283 | Long QT Syn. | Uncertain significance(LR: Oct. 3, 2019) |
| 978 | SNP:c.76A > G (p.Ser26Gly) | 701 | SNP:c.2902C > G (p.Pro968Ala) | VCV000237298 | Not Prov.\|Long QT Syn.\|Arrhythmia | Uncertain significance(LR: Oct. 3, 2020) |
| 979 | SNP:c.772C > T (p.Pro258Ser) | 146 | SNP:c.1582C > T (p.Arg528Trp) | VCV000220162 | Long QT Syn.\|Arrhythmia | Uncertain significance(LR: Oct. 30, 2018) |
| 980 | SNP:c.773C > T (p.Pro258Leu) | 478 | SNP:c.227G > T (p.Arg76Leu) | VCV000629614 | Arrhythmia | Uncertain significance(LR: Oct. 30, 2018) |
| 981 | SNP:c.775G > A (p.Asp259Asn) | 948 | SNP:c.682G > C (p.Ala228Pro) | VCV000526974 | Long QT Syn. | Uncertain significance(LR: Oct. 30, 2020) |
| 982 | SNP:c.778G > C (p.Ala260Pro) | 1006 | SNP:c.868G > C (p.Ala290Pro) | VCV000200306 | Not Prov. | Uncertain significance(LR: Oct. 31, 2016) |
| 983 | SNP:c.779C > T (p.Ala260Val) | 895 | SNP:c.446G > C (p.Gly149Ala) | VCV000067506 | Long QT Syn. 2\|Short QT Syn. 1\|Long QT S [symbol] | Uncertain significance(LR: Oct. 31, 2018) |
| 984 | SNP:c.77G > T (p.Ser26Ile) | 869 | SNP:c.355G > C (p.Asp119His) | VCV000405352 | Long QT Syn.\|Not Prov. | Uncertain significance(LR: Oct. 31, 2019) |
| 985 | SNP:c.797G > T (p.Ser266Ile) | 1018 | SNP:c.896C > T (p.Pro299Leu) | VCV000641100 | Long QT Syn. | Uncertain significance(LR: Oct. 4, 2018) |
| 986 | SNP:c.803C > A (p.Ala268Asp) | 611 | SNP:c.26C > T (p.Ala9Val) | VCV000200592 | Arrhythmia\|Not Prov.\|Long QT Syn. | Uncertain significance(LR: Oct. 4, 2019) |
| 987 | SNP:c.805C > T (p.Arg269Trp) | 558 | SNP:c.2566C > G (p.Leu856Val) | VCV000629380 | Arrhythmia | Uncertain significance(LR: Oct. 5, 2018) |
| 988 | SNP:c.80G > A (p.Arg27His) | 585 | SNP:c.2647C > T (p.Arg883Trp) | VCV000925591 | Arrhythmia\| Long QT Syn.\|Not Prov. | Uncertain significance(LR: Oct. 5, 2020) |
| 989 | SNP:c.80G > C (p.Arg27Pro) | 766 | SNP:c.3098G > A (p.Arg1033Gln) | VCV000456920 | Long QT Syn. | Uncertain significance(LR: Oct. 5, 2020) |
| 990 | SNP:c.812G > A (p.Arg271His) | 784 | SNP:c.3140G > A (p.Arg1047His) | VCV000628410 | Long QT Syn.\|Arrhythmia | Uncertain significance(LR: Oct. 5, 2020) |
| 991 | SNP:c.817C > G (p.Arg273Gly) | 1036 | SNP:c.94G > A (p.Ala32Thr) | VCV000067549 | Congenital long QT Syn.\|Arrhythmia | Uncertain significance(LR: Oct. 6, 2020) |
| 992 | SNP:c.817C > T (p.Arg273Ter) | 547 | SNP:c.251A > G (p.Gln84Arg) | VCV001299593 | Long QT Syn. 2 | Uncertain significance(LR: Oct. 6, 2021) |
| 993 | SNP:c.818G > A (p.Arg273Gln) | 163 | SNP:c.1621C > T (p.Arg541Cys) | VCV000937094 | Long QT Syn.\|Arrhythmia | Uncertain significance(LR: Oct. 7, 2020) |
| 994 | SNP:c.823A > C (p.Ser275Arg) | 626 | SNP:c.2737G > A (p.Ala913Thr) | VCV001188698 | Not Prov. | Uncertain significance(LR: Oct. 7, 2020) |
| 995 | SNP:c.825C > G (p.Ser275Arg) | 1044 | SNP:c.973G > A (p.Val325Met) | VCV000526931 | Long QT Syn. | Uncertain significance(LR: Oct. 8, 2017) |
| 996 | SNP:c.829G > T (p.Ala277Ser) | 504 | SNP:c.2366T > C (p.Ile789Thr) | VCV000200431 | Cardiovas. pheno.\|Long QT Syn. | Uncertain significance(LR: Oct. 9, 2019) |
| 997 | SNP:c.82A > G (p.Lys28Glu) | 661 | SNP:c.2792C > G (p.Pro931Arg) | VCV000928265 | Arrhythmia | Uncertain significance(LR: Oct. 9, 2019) |
| 998 | SNP:c.830C > A (p.Ala277Asp) | 814 | SNP:c.3251C > T (p.Pro1084Leu) | VCV000456925 | Cardiovas. pheno.\|Long QT Syn.\|Arrhythmia [symbol] | Uncertain significance(LR: Oct. 9, 2019) |
| 999 | SNP:c.832A > T (p.Ser278Cys) | 23 | SNP:c.1099A > G (p.Thr367Ala) | VCV001047434 | Long QT Syn. | Uncertain significance(LR: Oct. 9, 2020) |
| 1000 | SNP:c.835G > A (p.Val279Met) | 167 | SNP:c.1639G > A (p.Ala547Thr) | VCV000663436 | Arrhythmia\| Long QT Syn. | Uncertain significance(LR: Oct. 9, 2020) |
| 1001 | SNP:c.838C > T (p.Arg280Cys) | 403 | SNP:c.200A > G (p.Asp67Gly) | VCV001047548 | Long QT Syn. | Uncertain significance(LR: Oct. 9, 2020) |
| 1002 | SNP:c.853G > A (p.Ala285Thr) | 783 | SNP:c.3139C > T (p.Arg1047Cys) | VCV000161255 | Not Prov.\|Long QT Syn. | Uncertain significance(LR: Oct. 9, 2020) |
| 1003 | SNP:c.853G > T (p.Ala285Ser) | 827 | SNP:c.3305C > T (p.Thr1102Ile) | VCV000200531 | Long QT Syn.\|Arrhythmia\|Not Prov. | Uncertain significance(LR: Oct. 9, 2020) |
| 1004 | SNP:c.863T > C (p.Ile288Thr) | 985 | SNP:c.797G > T (p.Ser266Ile) | VCV001060485 | Long QT Syn. | Uncertain significance(LR: Oct. 9, 2020) |
| 1005 | SNP:c.865G > A (p.Glu289Lys) | 670 | SNP:c.281T > G (p.Val94Gly) | VCV000067441 | Congenital long QT Syn.\|Long QT Syn. | Uncertain significance(LR: Sep. 10, 2018) |
| 1006 | SNP:c.868G > C (p.Ala290Pro) | 825 | SNP:c.3301C > T (p.Pro1101Ser) | VCV000456928 | Long QT Syn.\|Arrhythmia | Uncertain significance(LR: Sep. 10, 2018) |
| 1007 | SNP:c.868G > T (p.Ala290Ser) | 664 | SNP:c.2795C > T (p.Ser932Phe) | VCV000925842 | Arrhythmia | Uncertain significance(LR: Sep. 10, 2019) |
| 1008 | SNP:c.86T > C (p.Phe29Ser) | 1035 | SNP:c.941G > A (p.Gly314Asp) | VCV000925690 | Arrhythmia | Uncertain significance(LR: Sep. 10, 2019) |
| 1009 | SNP:c.872T > C (p.Met291Thr) | 141 | SNP:c.156C > G (p.Cys52Trp) | VCV000972150 | Long QT Syn. | Uncertain significance(LR: Sep. 10, 2020) |
| 1010 | SNP:c.872T > G (p.Met291Arg) | 575 | SNP:c.2612C > T (p.Ser871Phe) | VCV000954476 | Long QT Syn. | Uncertain significance(LR: Sep. 11, 2019) |
| 1011 | SNP:c.875G > A (p.Arg292His) | 708 | SNP:c.2926G > A (p.Asp976Asn) | VCV000928384 | Arrhythmia\|Long QT Syn. | Uncertain significance(LR: Sep. 11, 2019) |
| 1012 | SNP:c.877G > A (p.Ala293Thr) | 16 | SNP:c.1067G > A (p.Arg356His) | VCV000180382 | Not Prov.\|Long QT Syn.\|Cardiovas. pheno.\|A [symbol] | Uncertain significance(LR: Sep. 11, 2020) |
| 1013 | SNP:c.877G > T (p.Ala293Ser) | 1004 | SNP:c.863T > C (p.Ile288Thr) | VCV000598780 | Long QT Syn. 2 | Uncertain significance(LR: Sep. 12, 2018) |
| 1014 | SNP:c.87C > A (p.Phe29Leu) | 584 | SNP:c.2641T > A (p.Phe881Ile) | VCV000855339 | Long QT Syn | Uncertain significance(LR: Sep. 12, 2020) |
| 1015 | SNP:c.880G > A (p.Gly294Arg) | 820 | SNP:c.3289G > A (p.Val1097Ile) | VCV000067486 | Long QT Syn.\|Not Prov.\|Cardiovas. pheno.\|n [symbol] | Uncertain significance(LR: Sep. 13, 2021) |
| 1016 | SNP:c.881G > T (p.Gly294Val) | 691 | SNP:c.2876C > T (p.Ser959Phe) | VCV000657772 | Long QT Syn. | Uncertain significance(LR: Sep. 14, 2018) |
| 1017 | SNP:c.889C > T (p.Pro297Ser) | 619 | SNP:c.2717C > T (p.Ser906Leu) | VCV000067429 | Long QT Syn.\|not spec.\|Long QT Syn. 2\| Sho [symbol] | Uncertain significance(LR: Sep. 15, 2020) |
| 1018 | SNP:c.896C > T (p.Pro299Leu) | 1048 | SNP:c.979T > C (p.Tyr327His) | VCV000629260 | Arrhythmia | Uncertain significance(LR: Sep. 16, 2018) |
| 1019 | SNP:c.89T > C (p.Ile30Thr) | 106 | SNP:c.1447G > A (p.Val483Ile) | VCV000858924 | Long QT Syn.\|Arrhythmia | Uncertain significance(LR: Sep. 16, 2020) |
| 1020 | SNP:c.902G > T (p.Arg301Leu) | 899 | SNP:c.44T > G (p.Leu15Arg) | VCV001206671 | Not Prov. | Uncertain significance(LR: Sep. 16, 2020) |
| 1021 | SNP:c.908C > G (p.Ala303Gly) | 752 | SNP:c.3053C > T (p.Pro1018Leu) | VCV000651422 | Long QT Syn. | Uncertain significance(LR: Sep. 17, 2018) |
| 1022 | SNP:c.916G > C (p.Gly306Arg) | 645 | SNP:c.2770G > T (p.Gly924Trp) | VCV000519287 | Long QT Syn.\|Arrhythmia\|Cardiovas. pheno. [symbol] | Uncertain significance(LR: Sep. 17, 2019) |
| 1023 | SNP:c.916G > T (p.Gly306Trp) | 216 | SNP:c.1708G > A (p.Ala570Thr) | VCV001043586 | Long QT Syn. | Uncertain significance(LR: Sep. 17, 2020) |
| 1024 | SNP:c.923T > G (p.Met308Arg) | 451 | SNP:c.2171T > C (p.Leu724Pro) | VCV000527007 | Long QT Syn.\|Not Prov. | Uncertain significance(LR: Sep. 19, 2019) |
| 1025 | SNP:c.925C > T (p.His309Tyr) | 479 | SNP:c.2291C > G (p.Pro764Arg) | VCV000955346 | Long QT Syn. | Uncertain significance(LR: Sep. 19, 2019) |
| 1026 | SNP:c.927C > G (p.His309Gln) | 481 | SNP:c.2296G > A (p.Gly766Arg) | VCV000519498 | Cardiovas. pheno. | Uncertain significance(LR: Sep. 2, 2017) |
| 1027 | SNP:c.928C > A (p.Pro310Thr) | 1017 | SNP:c.889C > T (p.Pro297Ser) | VCV000067540 | Not Prov.\|Congenital long QT Syn.\|Long QT [symbol] | Uncertain significance(LR: Sep. 2, 2020) |
| 1028 | SNP:c.92T > A (p.Ile31Asn) | 5 | SNP:c.1010C > G (p.Thr337Ser) | VCV001043131 | Long QT Syn. | Uncertain significance(LR: Sep. 20, 2020) |
| 1029 | SNP:c.92T > C (p.Ile31Thr) | 363 | SNP:c.1919T > G (p.Phe640Cys) | VCV001045742 | Long QT Syn. | Uncertain significance(LR: Sep. 20, 2020) |
| 1030 | SNP:c.92T > G (p.Ile31Ser) | 696 | SNP:c.2891C > G (p.Pro964Arg) | VCV001021720 | Long QT Syn. | Uncertain significance(LR: Sep. 20, 2020) |
| 1031 | SNP:c.934C > T (p.Arg312Cys) | 206 | SNP:c.169G > A (p.Ala57Thr) | VCV000654924 | Long QT Syn. | Uncertain significance(LR: Sep. 21, 2018) |
| 1032 | SNP:c.935G > A (p.Arg312His) | 819 | SNP:c.3286C > T (p.Pro1096Ser) | VCV000921691 | Arrhythmia | Uncertain significance(LR: Sep. 23, 2019) |
| 1033 | SNP:c.93C > G (p.Ile31Met) | 1005 | SNP:c.865G > A (p.Glu289Lys) | VCV000067535 | Not Prov.\|Long QT Syn.\|Long QT Syn. 2\|not [symbol] | Uncertain significance(LR: Sep. 23, 2021) |
| 1034 | SNP:c.940G > A (p.Gly314Ser) | 903 | SNP:c.455C > T (p.Thr152Ile) | VCV000940899 | Long QT Syn. | Uncertain significance(LR: Sep. 24, 2019) |
| 1035 | SNP:c.941G > A (p.Gly314Asp) | 341 | SNP:c.1894C > G (p.Pro632Ala) | VCV001054005 | Long QT Syn. | Uncertain significance(LR: Sep. 24, 2020) |
| 1036 | SNP:c.94G > A (p.Ala32Thr) | 457 | SNP:c.220A > G (p.Thr74Ala) | VCV001040732 | Long QT Syn. | Uncertain significance(LR: Sep. 24, 2020) |
| 1037 | SNP:c.950A > G (p.Asn317Ser) | 511 | SNP:c.2386G > C (p.Val796Leu) | VCV000200438 | Long QT Syn. | Uncertain significance(LR: Sep. 24, 2020) |
| 1038 | SNP:c.959C > A (p.Ser320Ter) | 590 | SNP:c.2659C > G (p.Arg887Gly) | VCV000924438 | Arrhythmia Long QT Syn. | Uncertain significance(LR: Sep. 24, 2020) |
| 1039 | SNP:c.959C > G (p.Ser320Trp) | 757 | SNP:c.3070A > T (p.Asn1024Tyr) | VCV001022039 | Long QT Syn. | Uncertain significance(LR: Sep. 24, 2020) |
| 1040 | SNP:c.959C > T (p.Ser320Leu) | 890 | SNP:c.434C > T (p.Thr145Ile) | VCV001047559 | Long QT Syn. | Uncertain significance(LR: Sep. 24, 2020) |
| 1041 | SNP:c.95C > T (p.Ala32Val) | 750 | SNP:c.3049G > T (p.Ala1017Ser) | VCV000565852 | Long QT Syn.\|Arrhythmia | Uncertain significance(LR: Sep. 25, 2020) |
| 1042 | SNP:c.961G > T (p.Asp321Tyr) | 856 | SNP:c.343G > A (p.Val115Met) | VCV000067496 | Long QT Syn.\|Long QT Syn. 2\|Congenital lo [symbol] | Uncertain significance(LR: Sep. 25, 2020) |
| 1043 | SNP:c.967G > A (p.Asp323Asn) | 917 | SNP:c.535T > G (p.Ser179Ala) | VCV001059858 | Long QT Syn. | Uncertain significance(LR: Sep. 25, 2020) |
| 1044 | SNP:c.973G > A (p.Val325Met) | 644 | SNP:c.2770G > A (p.Gly924Arg) | VCV000200492 | Not Prov.\|Long QT Syn. | Uncertain significance(LR: Sep. 26, 2018) |
| 1045 | SNP:c.973G > C (p.Val325Leu) | 672 | SNP:c.2832G > T (p.Glu944Asp) | VCV000526953 | Long QT Syn. | Uncertain significance(LR: Sep. 27, 2017) |
| 1046 | SNP:c.976C > T (p.Arg326Cys) | 435 | SNP:c.211G > A (p.Gly71Arg) | VCV000948713 | Long QT Syn. | Uncertain significance(LR: Sep. 30, 2019) |
| 1047 | SNP:c.977G > A (p.Arg326His) | 713 | SNP:c.2932G > C (p.Glu978Gln) | VCV001042802 | Long QT Syn. | Uncertain significance(LR: Sep. 30, 2020) |
| 1048 | SNP:c.979T > C (p.Tyr327His) | 986 | SNP:c.803C > A (p.Ala268Asp) | VCV000941477 | Long QT Syn. | Uncertain significance(LR: Sep. 4, 2019) |
| 1049 | SNP:c.980A > G (p.Tyr327Cys) | 10 | SNP:c.1043T > A (p.Phe348Tyr) | VCV000200319 | Long QT Syn.\|Not Prov. | Uncertain significance(LR: Sep. 4, 2020) |
| 1050 | SNP:c.982C > T (p.Arg328Cys) | 935 | SNP:c.613C > T (p.Pro205Ser) | VCV000662184 | Long QT Syn. | Uncertain significance(LR: Sep. 6, 2018) |
| 1051 | SNP:c.983G > A (p.Arg328His) | 709 | SNP:c.2930G > T (p.Cys977Phe) | VCV000405354 | Long QT Syn. | Uncertain significance(LR: Sep. 7, 2016) |
| 1052 | SNP:c.985A > G (p.Thr329Ala) | 780 | SNP:c.3134T > G (p.Leu1045Arg) | VCV001025586 | Long QT Syn. | Uncertain significance(LR: Sep. 7, 2020) |
| 1053 | SNP:c.98A > C (p.Asn33Thr) | 681 | SNP:c.2855C > G (p.Pro952Arg) | VCV001036276 | Long QT Syn. | Uncertain significance(LR: Sep. 9, 2020) |
| 1054 | SNP:c.995A > G (p.Lys332Arg) | 805 | SNP:c.3209A > T (p.Gln1070Leu) | VCV001043117 | Long QT Syn. | Uncertain significance(LR: Sep. 9, 2020) |

| | |
|---|---|
| Not. Prov. | not provided |
| Syn. | syndrome |
| Not. Spec. | not specified |
| Cardiovas. | cardiovascular |
| Pheno. | phenotype |
| Conf. Interp. of Patho | conflicting interpretations of pathogenicity |

[symbol]

indicates data missing or illegible when filed

TABLE 2
LQT Black Box Labeled Drugs for Testing by the
Methods of the Disclosure (PREDICT PLATFORM)

| | Molecule | | Revenue | | | |
|---|---|---|---|---|---|---|
| Use | Type | Generic name | 2020* | | Therapy Area | Indication |
| Acute | Small | Clarithromycin | 21 | | Gastrointestinal | Duodenal Ulcer, |
| | Molecule | | | | | Gastric Ulcers; |
| | | | | | | Zollinger-Ellison |
| | | | | | | Syndrome |
| | | | | | | (Gastrinoma) |
| | | Levofloxacin | 119 | | Ear Nose Throat | Acute Bacterial |
| | | | | | Disorders | Sinusitis |
| | | Azithromycin | 276 | | Ear Nose Throat | Acute Bacterial |
| | | | | | Disorders | Sinusitis; Otitis Media; |
| | | | | | | Tonsillitis |
| | | Ciprofloxacin | <1 | | Ear Nose Throat | Otitis Externa; Otitis |
| | | | | | Disorders | Media |
| | | Ondansetron | <1 | | Toxicology | Chemotherapy Induced |
| | | | | | | Nausea and Vomiting; |
| | | | | | | Radiation Induced |
| | | | | | | Nausea and Vomiting |
| | | | | | | (RINV) |
| | | Sevoflurane | 278** | | Central Nervous | General Anesthetic |
| | | | | | System | Effect |
| Chronic | Small | Oxaliplatin | 226 | (1) | Oncology | Endometrial Cancer; |
| | Molecule | | | | | Head And Neck Cancer |
| | | | | | | Squamous Cell |
| | | | | | | Carcinoma; Hodgkin |
| | | | | | | Lymphoma (B-Cell |
| | | | | | | Hodgkin Lymphoma); |
| | | | | | | Metastatic Melanoma; |
| | | | | | | Non-Small Cell Lung |
| | | | | | | Cancer; Primary |
| | | | | | | Mediastinal B-Cell |
| | | | | | | Lymphoma; |
| | | | | | | Transitional Cell |
| | | | | | | Carcinoma (Urothelial |
| | | | | | | Cell Carcinoma) |
| | | Methadone | 38 | | Central Nervous | Cancer Pain; Opium |
| | | | | | System | (Opioid) Addiction |
| | | Cilostazol | 92 | | Cardiovascular | Intermittent |
| | | | | | | Claudication |
| | | Donepezil | 248 | | Central Nervous | Alzheimer's Disease: |
| | | | | | System | Dementia Associated |
| | | | | | | With Alzheimer's |
| | | | | | | Disease |
| | | Meglumine | 1288 | (613) | Metabolic Disorders | Familial Amyloid |
| | | antimoniate | | | | Cardiomyopathy; |
| | | | | | | Familial Amyloid |
| | | | | | | Neuropathies |
| | | Quinidine | 224 | (224) | Central Nervous | Amyotrophic Lateral |
| | | | | | System | Sclerosis |
| | | Citalopram | 364 | (19) | Central Nervous | Agoraphobia; |
| | | | | | System | Generalized Anxiety |
| | | | | | | Disorder (GAD); Major |
| | | | | | | Depressive Disorder; |
| | | | | | | Panic Disorders; Social |
| | | | | | | Anxiety Disorder |
| | | | | | | (SAD/Social Phobia) |
| | | Escitalopram | 364 | (19) | Central Nervous | Agoraphobia; |
| | | | | | System | Generalized Anxiety |
| | | | | | | Disorder (GAD); Major |
| | | | | | | Depressive Disorder; |
| | | | | | | Obsessive-Compulsive |
| | | | | | | Disorder; Social |
| | | | | | | Anxiety Disorder |
| | | | | | | (SAD/Social Phobia) |
| | | Dronedarone | 365 | (312) | Cardiovascular | Atrial Fibrillation |
| | Synthetic | Terlipressin | 39** | | Gastrointestinal | Esophageal |
| | Peptide | | | | | Hemorrhage; |
| | | | | | | Hepatorenal Syndrome |

TABLE 3
Torsade de Pointes (TdP) Drugs to Avoid (source CredibleMeds)

| Brand name | Generic Name | Risk |
|---|---|---|
| Zytiga and others | Abiraterone | (CR) |
| Symmetrel and others | Amantadine | (CR) |
| Barhemsys and others | Amisulpride | (CR) |
| Elavil (Discontinued | Amitriptyline | (CR) |
| 6/13) and others | | |
| Fungilin and others | Amphotericin | (CR) |
| Amsidine | Amsacrine | (CR) |
| Reyataz and others | Atazanavir | (CR) |
| Aprinox and others | Bendroflumethiazide | (CR) |
| Aquachloral and others | Chloral | (CR) |
| Tagamet | Cimetidine | (CR) |
| Anafranil | Clomipramine | (CR) |
| Cardizem | Diltiazem | (CR) |
| Benadryl and others | Diphenhydramine | (CR) |
| Sinequan and others | Doxepin | (CR) |
| Myonal and others | Eperisone | (CR) |
| Nexium and others | Esomeprazole | (CR) |
| Pepcid and others | Famotidine | (CR) |
| Prozac and others | Fluoxetine | (CR) |
| Faverin and others | Fluvoxamine | (CR) |
| Lasix and others | Furosemide | (CR) |
| Reminyl and others | Galantamine | (CR) |
| Geninax | Garenoxacin | (CR) |
| Apo-Hydro and others | Hydrochlorothiazide | (CR) |
| Atarax and others | Hydroxyzine | (CR) |
| Lozol and others | Indapamide | (CR) |
| Sporanox and others | Itraconazole | (CR) |
| Procoralan and others | Ivabradine | (CR) |
| Nizoral and others | Ketoconazole | (CR) |
| Prevacid and others | Lansoprazole | (CR) |
| Imodium | Loperamide | (CR) |
| Reglan and others | Metoclopramide | (CR) |
| Zytanix and others | Metolazone | (CR) |
| Flagyl and others | Metronidazole | (CR) |
| Viracept | Nelfinavir | (CR) |
| Zyprexa and others | Olanzapine | (CR) |
| Losec and others | Omeprazole | (CR) |
| Protonix and others | Pantoprazole | (CR) |
| Paxil and others | Paroxetine | (CR) |
| Tazosyn and others | Piperacillin/Tazobactam | (CR) |
| Noxafil and others | Posaconazole | (CR) |
| Rythmol SR and others | Propafenone | (CR) |
| Seroquel | Quetiapine | (CR) |
| Qualaquin and others | Quinine | (CR) |
| Ranexa and others | Ranolazine | (CR) |
| Risperdal | Risperidone | (CR) |
| Zoloft and others | Sertraline | (CR) |
| Vesicare | Solifenacin | (CR) |
| Incivo and others | Telaprevir | (CR) |
| Demadex and others | Torsemide | (CR) |
| Desyrel and others | Trazodone | (CR) |
| VFend | Voriconazole | (CR) |
| Geodon and others | Ziprasidone | (CR) |
| Aclacin and others | Aclarubicin | (KR) |
| Cordarone and others | Amiodarone | (KR) |
| Agrylin and others | Anagrelide | (KR) |
| Trisenox | Arsenic | (KR) |
| Hismanal | Astemizole | (KR) |
| Zithromax and others | Azithromycin | (KR) |
| Vascor | Bepridil | (KR) |
| Energy Catalyst | Cesium | (KR) |
| Aralen | Chloroquine | (KR) |
| Thorazine and others | Chlorpromazine | (KR) |
| Truxal | Chlorprothixene | (KR) |
| Pletal | Cilostazol | (KR) |
| Cipro and others | Ciprofloxacin | (KR) |
| Propulsid | Cisapride | (KR) |
| Celexa and others | Citalopram | (KR) |
| Biaxin and others | Clarithromycin | (KR) |
| Cocaine | Cocaine | (KR) |
| Norpace | Disopyramide | (KR) |
| Tikosyn | Dofetilide | (KR) |
| Motilium and others | Domperidone | (KR) |
| Aricept | Donepezil | (KR) |
| Multaq | Dronedarone | (KR) |
| Inapsine and others | Droperidol | (KR) |
| E.E.S. and others | Erythromycin | (KR) |
| Cipralex and others | Escitalopram | (KR) |
| Tambocor and others | Flecainide | (KR) |
| Diflucan and others | Fluconazole | (KR) |
| Tequin | Gatifloxacin | (KR) |
| Raxar | Grepafloxacin | (KR) |
| Halfan | Halofantrine | (KR) |
| Haldol and others | Haloperidol | (KR) |
| Serecor | Hydroquinidine | (KR) |
| Plaquenil and others | Hydroxychloroquine | (KR) |
| | Ibogaine | (KR) |
| Corvert | Ibutilide | (KR) |
| Levaquin and others | Levofloxacin | (KR) |
| Nosinan and others | Levomepromazine | (KR) |
| Orlaam | Levomethadyl | (KR) |
| Lesuride and others | Levosulpiride | (KR) |
| Glucantime | Meglumine | (KR) |
| Serentil | Mesoridazine | (KR) |
| Dolophine and others | Methadone | (KR) |
| Avelox and others | Moxifloxacin | (KR) |
| Shinbit | Nifekalant | (KR) |
| Zofran and others | Ondansetron | (KR) |
| Eloxatin | Oxaliplatin | (KR) |
| | Papaverine | (KR) |
| Pentam | Pentamidine | (KR) |
| Orap | Pimozide | (KR) |
| Lorelco | Probucol | (KR) |
| Pronestyl and others | Procainamide | (KR) |
| Diprivan and others | Propofol | (KR) |
| Quinaglute and others | Quinidine | (KR) |
| Rulide and others | Roxithromycin | (KR) |
| Serdolect and others | Sertindole | (KR) |
| Ultane and others | Sevoflurane | (KR) |
| Betapace and others | Sotalol | (KR) |
| Zagam | Sparfloxacin | (KR) |
| Dogmatil and others | Sulpiride | (KR) |
| Barnetil and others | Sultopride | (KR) |
| Seldane | Terfenadine | (KR) |
| Teripress and others | Terlipressin | (KR) |
| Micturin and others | Terodiline | (KR) |
| Mellaril and others | Thioridazine | (KR) |
| Caprelsa | Vandetanib | (KR) |
| Uroxatral | Alfuzosin | (PR) |
| Nedeltran and others | Alimemazine | (PR) |
| Erleada | Apalutamide | (PR) |
| Apokyn and others | Apomorphine | (PR) |
| Abilify and others | Aripiprazole | (PR) |
| Coartem | Artemether/Lumefantrine | (PR) |
| Eurartesim | Artenimol/piperaquine | (PR) |
| Saphris and others | Asenapine | (PR) |
| Strattera | Atomoxetine | (PR) |
| Sirturo | Bedaquiline | (PR) |
| Treanda and others | Bendamustine | (PR) |
| Bevyxxa | Betrixaban | (PR) |
| Casodex | Bicalutamide | (PR) |
| Velcade and others | Bortezomib | (PR) |
| Bosulif | Bosutinib | (PR) |
| Butrans and others | Buprenorphine | (PR) |
| Cometriq | Cabozantinib | (PR) |
| Xeloda | Capecitabine | (PR) |
| Pabal and others | Carbetocin | (PR) |
| Zykadia | Ceritinib | (PR) |
| Lamprene | Clofazimine | (PR) |
| Entumine | Clotiapine | (PR) |
| Clozaril and others | Clozapine | (PR) |
| Cotellic | Cobimetinib | (PR) |
| Xalkori | Crizotinib | (PR) |
| Tercian | Cyamemazine | (PR) |
| Tafinlar | Dabrafenib | (PR) |
| Sprycel | Dasatinib | (PR) |
| Firmagon and others | Degarelix | (PR) |
| Deltyba | Delamanid | (PR) |
| Pertofrane and others | Desipramine | (PR) |
| Austedo | Deutetrabenazine | (PR) |
| Precedex and others | Dexmedetomidine | (PR) |
| Nuedexta | Dextromethorphan/Quinidine | (PR) |
| Anzemet | Dolasetron | (PR) |
| Sustiva | Efavirenz | (PR) |
| Cerdelga | Eliglustat | (PR) |
| Braftovi | Encorafenib | (PR) |
| Rozlytrek | Entrectinib | (PR) |
| Ellence and others | Epirubicin | (PR) |
| Halaven | Eribulin | (PR) |
| Potiga and others | Ezogabine | (PR) |
| Felbatol | Felbamate | (PR) |
| Gilenya | Fingolimod | (PR) |
| Adrucil and others | Fluorouracil | (PR) |
| Depixol and others | Flupentixol | (PR) |
| Factive | Gemifloxacin | (PR) |
| Xospata | Gilteritinib | (PR) |
| Daurismo | Glasdegib | (PR) |
| Kytril and others | Granisetron | (PR) |
| Hysingla ™ ER and others | Hydrocodone | (PR) |
| Fanapt and others | Iloperidone | (PR) |
| Tofranil | Imipramine | (PR) |
| Besponsa | Inotuzumab | (PR) |
| Dynacirc | Isradipine | (PR) |
| Tibsovo | Ivosidenib | (PR) |
| Sufrexal | Ketanserin | (PR) |
| Lacipil and others | Lacidipine | (PR) |
| Tykerb and others | Lapatinib | (PR) |
| Xenleta | Lefamulin | (PR) |
| Lenvima | Lenvatinib | (PR) |
| Lupron and others | Leuprolide | (PR) |
| Keppra | Levetiracetam | (PR) |
| | Levomethadone | (PR) |
| Zyvox and others | Linezolid | (PR) |
| Eskalith and others | Lithium | (PR) |
| Lucemyra | Lofexidine | (PR) |
| Kaletra and others | Lopinavir/Ritonavir | (PR) |
| Latuda | Lurasidone | (PR) |
| Ludiomil | Maprotiline | (PR) |
| Bunil and others | Melperone | (PR) |
| Tolvon | Mianserin | (PR) |
| Rydapt | Midostaurin | (PR) |
| Korlym and others | Mifepristone | (PR) |
| Myrbetriq | Mirabegron | (PR) |
| Remeron | Mirtazapine | (PR) |
| Portrazza | Necitumumab | (PR) |
| Cardene | Nicardipine | (PR) |
| Tasigna | Nilotinib | (PR) |
| Noroxin and others | Norfloxacin | (PR) |
| Pamelor and others | Nortriptyline | (PR) |
| Spinraza | Nusinersen | (PR) |
| Floxin | Ofloxacin | (PR) |
| Olinvyk | Oliceridine | (PR) |
| Isturisa | Osilodrostat | (PR) |
| Tagrisso | Osimertinib | (PR) |
| Pitocin and others | Oxytocin | (PR) |
| Zeposia | Ozanimod | (PR) |
| Invega and others | Paliperidone | (PR) |
| Aloxi | Palonosetron | (PR) |
| Farydak | Panobinostat | (PR) |
| Signifor | Pasireotide | (PR) |
| Votrient | Pazopanib | (PR) |
| Definity and others | Perflutren | (PR) |
| Trilafon and others | Perphenazine | (PR) |
| Sunrythm | Pilsicainide | (PR) |
| Nuplazid | Pimavanserin | (PR) |
| Dipiperon and others | Pipamperone | (PR) |
| Wakix | Pitolisant | (PR) |
| Ponvory | Ponesimod | (PR) |
| | Pretomanid | (PR) |
| | Primaquine | (PR) |
| Phenergan | Promethazine | (PR) |
| Dominal and others | Prothipendyl | (PR) |
| Orgovyx and others | Relugolix | (PR) |
| Byfavo | Remimazolam | (PR) |
| Kisqali | Ribociclib | (PR) |
| Edurant and others | Rilpivirine | (PR) |
| Istodax | Romidepsin | (PR) |
| Rubraca | Rucaparib | (PR) |
| Invirase(combo) | Saquinavir | (PR) |
| Retevmo | Selpercatinib | (PR) |
| Mayzent | Siponimod | (PR) |
| Nexavar | Sorafenib | (PR) |
| Sutent | Sunitinib | (PR) |
| Prograf and others | Tacrolimus | (PR) |
| Nolvadex and others | Tamoxifen | (PR) |
| Tazverik | Tazemetostat | (PR) |
| Vibativ | Telavancin | (PR) |
| Ketek | Telithromycin | (PR) |
| Nitoman and others | Tetrabenazine | (PR) |
| Tiapridal and others | Tiapride | (PR) |
| Lonsurf | Tipiracil/Trifluridine | (PR) |
| Zanaflex and others | Tizanidine | (PR) |
| Detrol and others | Tolterodine | (PR) |
| Fareston | Toremifene | (PR) |
| Crispin and others | Tramadol | (PR) |
| Surmontil and others | Trimipramine | (PR) |
| Navoban and others | Tropisetron | (PR) |
| Ingrezza | Valbenazine | (PR) |
| Levitra | Vardenafil | (PR) |
| Zelboraf | Vemurafenib | (PR) |
| Effexor and others | Venlafaxine | (PR) |
| Lupkynis | Voclosporin | (PR) |
| Zolinza | Vorinostat | (PR) |
| Losizopilon and others | Zotepine | (PR) |
| Cisordinol and others | Zuclopenthixol | (PR) |
| Proventil and others | Albuterol | (SR) |
| Adderal-XR and others | Amphetamine | (SR) |
| Brovana | Arformoterol | (SR) |
| Didrex and others | Benzphetamine | (SR) |
| Focalin and others | Dexmethylphenidate | (SR) |
| Dexedrine and others | Dextroamphetamine | (SR) |
| Tenuate and others | Diethylpropion | (SR) |
| Dobutrex | Dobutamine | (SR) |
| Intropine | Dopamine | (SR) |
| Northera | Droxidopa | (SR) |
| Rynatuss and others | Ephedrine | (SR) |
| Primatene and others | Epinephrine | (SR) |
| Fintepla | Fenfluramine | (SR) |
| Berotec and others | Fenoterol | (SR) |
| Advair and others | Fluticasone | (SR) |
| Foradil and others | Formoterol | (SR) |
| Arcapta Neohaler and others | Indacaterol | (SR) |
| Medihaler-Iso and others | Isoproterenol | (SR) |
| Xopenex and others | Levalbuterol | (SR) |
| Sinu Inhaler and others | Levomethamphetamine | (SR) |
| Vyvanse | Lisdexamfetamine | (SR) |
| Metaprel and others | Metaproterenol | (SR) |
| Desoxyn and others | Methamphetamine | (SR) |
| Ritalin and others | Methylphenidate | (SR) |
| ProAmatine and others | Midodrine | (SR) |
| Levophed | Norepinephrine | (SR) |
| Striverdi Respimat | Olodaterol | (SR) |
| Afrin and others | Oxymetazoline | (SR) |
| Bontril and others | Phendimetrazine | (SR) |
| Adipex P and others | Phentermine | (SR) |
| Neosynephrine | Phenylephrine | (SR) |
| Acutrim and others | Phenylpropanolamine | (SR) |
| PediaCare and others | Pseudoephedrine | (SR) |
| Yutopar | Ritodrine | (SR) |
| Serevent and others | Salmeterol | (SR) |
| Meridia | Sibutramine | (SR) |
| Septra and others | Sulfamethoxazole | (SR) |
| Brethine and others | Terbutaline | (SR) |
| Breo Ellipta | Vilanterol/fluticasone | (SR) |
| Sinosil and others | Xylometazoline | (SR) |

### Abbreviations

[0243] (CR) Conditional Risk
[0244] (KR) Known Risk
[0245] (PR) Possible Risk
[0246] (SR) Special Risk

TABLE 4
DNA sequences coding the respective gRNAs and related target sequences in
the KCNH2 gene for CRISPRi

| | | SEQ | | | SEQ |
|---|---|---|---|---|---|
| | | ID | Genomic | | ID |
| Rank | Target sequence 5′-3′ | NO: | location | gRNA Sequence 5′-3′ | NO: |
| 1 | CATCCCGGCCGCCTACAAGC | 1055 | chr7:150978576 | CATCCCGGCCGCCTAC | 1116 |
| | CGG | | | AAGC | |
| 2 | GCATTAACCCTTCCGCGGCCG | 1056 | chr7:150978304 | GCATTAACCCTTCCGC | 1117 |
| | GG | | | GGCC | |
| 3 | CGCGCGCCCGACCTTCCCATT | 1057 | chr7:150978426 | CGCGCGCCCGACCTTC | 1118 |
| | GG | | | CCAT | |
| 9 | GCGCCGCATTAACCCTTCCGC | 1058 | chr7:150978309 | GCGCCGCATTAACCCT | 1119 |
| | GG | | | TCCG | |
| 10 | TCTGGGCGCGCGAGTCCCAG | 1059 | chr7:150978501 | TCTGGGCGCGCGAGTC | 1120 |
| | GGG | | | CCAG | |
| 11 | TTAGTCGCTAATCTGGGGTGG | 1060 | chr7:150978615 | TTAGTCGCTAATCTGG | 1121 |
| | GG | | | GGTG | |
| 15 | ACTCGCGCGCCCAGAAGAGG | 1061 | chr7:150978509 | ACTCGCGCGCCCAGAA | 1122 |
| | GGG | | | GAGG | |
| 17 | ACTCGGCGCGGCTCAGCCAA | 1062 | chr7:150978442 | ACTCGGCGCGGCTCAG | 1123 |
| | TGG | | | CCAA | |
| 18 | GGTTTCTTAGTCGCTAATCTG | 1063 | chr7:150978621 | GGTTTCTTAGTCGCTA | 1124 |
| | GG | | | ATCT | |
| 21 | CGTTGGGGGAGCACTCGGCG | 1064 | chr7:150978454 | CGTTGGGGGAGCACTC | 1125 |
| | CGG | | | GGCG | |
| 22 | TAGTCGCTAATCTGGGGTGG | 1065 | chr7:150978614 | TAGTCGCTAATCTGGG | 1126 |
| | GGG | | | GTGG | |
| 23 | CGGCCGCGGAAGGGTTAATG | 1066 | chr7:150978306 | CGGCCGCGGAAGGGT | 1127 |
| | CGG | | | TAATG | |
| 26 | GTTTCTTAGTCGCTAATCTGG | 1067 | chr7:150978620 | GTTTCTTAGTCGCTAA | 1128 |
| | GG | | | TCTG | |
| 29 | ATGGGAAGGTCGGGCGCGCG | 1068 | chr7:150978423 | ATGGGAAGGTCGGGC | 1129 |
| | CGG | | | GCGCG | |
| 33 | TGCCATGGCCGGCTTGTAGG | 1069 | chr7:150978568 | TGCCATGGCCGGCTTG | 1130 |
| | CGG | | | TAGG | |
| 36 | AAGGTCGGGCGCGCGCGGTG | 1070 | chr7:150978418 | AAGGTCGGGCGCGCG | 1131 |
| | GGG | | | CGGTG | |
| 37 | GCGCGGCTCAGCCAATGGGA | 1071 | chr7:150978437 | GCGCGGCTCAGCCAAT | 1132 |
| | AGG | | | GGGA | |
| 39 | GCAGGGGAAACCGTGAGGAC | 1072 | chr7:150978545 | GCAGGGGAAACCGTG | 1133 |
| | AGG | | | AGGAC | |
| 40 | GACAGCCGCTCCAGCGCCCG | 1073 | chr7:150978258 | GACAGCCGCTCCAGCG | 1134 |
| | CGG | | | CCCG | |
| 42 | CGCTCTGCCAAGGAGCCCCT | 1074 | chr7:150978486 | CGCTCTGCCAAGGAGC | 1135 |
| | GGG | | | CCCT | |
| 44 | AAGAGGGGGAAGGGACCCTT | 1075 | chr7:150978523 | AAGAGGGGGAAGGGA | 1136 |
| | AGG | | | CCCTT | |
| 46 | AACCGTGAGGACAGGTGCCA | 1076 | chr7:150978553 | AACCGTGAGGACAGG | 1137 |
| | TGG | | | TGCCA | |
| 47 | GCTGTCGGCGCGGTGGCAGG | 1077 | chr7:150978241 | GCTGTCGGCGCGGTGG | 1138 |
| | CGG | | | CAGG | |
| 48 | CGCGAGTCCCAGGGGCTCCT | 1078 | chr7:150978493 | CGCGAGTCCCAGGGG | 1139 |
| | TGG | | | CTCCT | |
| 53 | CAGAGCGAGGGGCTGGCGTT | 1079 | chr7:150978470 | CAGAGCGAGGGGCTG | 1140 |
| | GGG | | | GCGTT | |
| 54 | TGGAGCGGCTGTCGGCGCGG | 1080 | chr7:150978248 | TGGAGCGGCTGTCGGC | 1141 |
| | TGG | | | GCGG | |
| 57 | CTTAGGCAGGGGAAACCGTG | 1081 | chr7:150978540 | CTTAGGCAGGGGAAA | 1142 |
| | AGG | | | CCGTG | |
| 60 | GCCAGCCCCTCGCTCTGCCAA | 1082 | chr7:150978476 | GCCAGCCCCTCGCTCT | 1143 |
| | GG | | | GCCA | |
| 66 | CTCGGGCAGCGCCTGCGGCT | 1083 | chr7:150978281 | CTCGGGCAGCGCCTGC | 1144 |
| | CGG | | | GGCT | |
| 69 | TGGAATCCCTTCCCCCATCCC | 1084 | chr7:150978591 | TGGAATCCCTTCCCCC | 1145 |
| | GG | | | ATCC | |
| 70 | GGGAAGGGACCCTTAGGCAG | 1085 | chr7:150978529 | GGGAAGGGACCCTTA | 1146 |
| | GGG | | | GGCAG | |
| 71 | CAGGAGTCCGGGGCTCGGGC | 1086 | chr7:150978214 | CAGGAGTCCGGGGCTC | 1147 |
| | GGG | | | GGGC | |
| 72 | GAGCGAGGGGCTGGCGTTGG | 1087 | chr7:150978468 | GAGCGAGGGGCTGGC | 1148 |
| | GGG | | | GTTGG | |
| 74 | AGGCGGCCGGGATGGGGGAA | 1088 | chr7:150978585 | AGGCGGCCGGGATGG | 1149 |
| | GGG | | | GGGAA | |
| 77 | AGGCGGGAGCCAGGAGTCCG | 1089 | chr7:150978224 | AGGCGGGAGCCAGGA | 1150 |
| | GGG | | | GTCCG | |
| 79 | GGGTCCCTTCCCCCTCTTCTG | 1090 | chr7:150978518 | GGGTCCCTTCCCCCTC | 1151 |
| | GG | | | TTCT | |
| 83 | GAGCCAGGAGTCCGGGGCTC | 1091 | chr7:150978218 | GAGCCAGGAGTCCGG | 1152 |
| | GGG | | | GGCTC | |
| 85 | GGGGGAGAGGGCGGTGCTGC | 1092 | chr7:150978385 | GGGGGAGAGGGCGGT | 1153 |
| | GGG | | | GCTGC | |
| 88 | GGCGGGATGGGGGGGGGAG | 1093 | chr7:150978397 | GGCGGGATGGGGGGG | 1154 |
| | AGGG | | | GGAGA | |
| 89 | GGGATGGGGGGGGGAGAGG | 1094 | chr7:150978394 | GGGATGGGGGGGGGA | 1155 |
| | GCGG | | | GAGGG | |

We claim:

1. A prime editing guide RNA (pegRNA) designed for prime editing of a target gene that is hypothesized as having an association with arrhythmia and/or drug-induced toxicity to cardiomyocytes, preferably wherein the cardiomyocytes are derived from induced pluripotent stem cells (iPSC), and preferably wherein the pegRNA is barcoded.

2. The pegRNA of claim 1, comprising a spacer sequence and a DNA synthesis template, wherein the spacer sequence comprises a region of complementarity to a target strand of a double stranded target gene DNA sequence to be edited and the DNA synthesis template comprises a region of complementarity to the non-target strand of the double-stranded target gene DNA sequence and one or more nucleotide edits compared to the target strand double-stranded target gene DNA sequence.

3. The pegRNA of any one of claims 1 and 2, comprising a guide RNA (gRNA) core, and an extension arm comprising a DNA synthesis template and a primer binding site (PBS),
wherein the gRNA core associates with a nucleic acid programmable DNA binding protein (napDNAbp), which is fused to a domain comprising polymerase (preferably, RNA-dependent DNA polymerase) activity,
wherein the primer binding site comprises a region of complementarity to a non-target strand of the double-stranded target gene DNA sequence.

4. The pegRNA of any one of claims 1 to 3, wherein the DNA synthesis template is designed to edit the target gene in at least one site.

5. The pegRNA of claim 4, wherein the DNA synthesis template introduces random edits into the target gene.

6. The pegRNA of claim 4, wherein the DNA synthesis template introduces pre-selected edits into the target gene.

7. The pegRNA of any one of claims 1 to 7, wherein the target gene is selected from genes that encode potassium channels or potassium-channel related genes, sodium channels or sodium channels related genes, calcium channels and calcium channel related genes, and cardiomyocyte structural genes.

8. The pegRNA of claim 7, wherein the target gene is selected from potassium channel/related genes selected from human ether-a-go-go related gene (hERG)/KCNH2, Hyperpolarization-activated cyclic nucleotide-gated (HCN) channels; transient outward potassium current channel; Slowly activating delayed rectifier potassium current channels; Rapidly activating delayed rectifier potassium current channels; Inwardly rectifying potassium (Kir) channels; Inwardly rectifying potassium channels; G protein-coupled, inwardly rectifying potassium channels; ATP-sensitive potassium channels; sodium channel/related genes selected from SCN5A, ACN1B, SCN2B, SCN3B, SCN4B, GPD1L, RANGRF, SCN10A; calcium channel/related genes selected from CACNA1C, CACNB2, CACNA2D1, RYR2, CASQ2, TRDN, CALM1-3; and other genes selected from KCNQ1, SCNA5, KCNE1, KCNE2, KvLQT1, Nav1.5, ankyrin-B, MinK, MiRP1, Kir2.1, Cav1.2, caveolin-3, Nav.beta.4 genes, SNTAI, SLMAP, PKP2, ANK2, CAV3, SLC4A3, TRPM4, DPP6, IRX3, GNAI2, ADORAI, GNAS, KCNQ1, SCNA5, KCNE1, KCNE2, KvLQT1, Nav1.5, ankyrin-B, MinK, MiRP1, Kir2.1, Cav1.2, caveolin-3, Nav.beta.4 ATP-binding cassette (ABC) transporters involved in drug transport (e.g., ABCB1, ABCB4, ABCCI, ABCC2, SLC10A2, SLC28A3, SLC22A7, SLC22A17), Carbonyl reductases in drug metabolism (e.g., CBR3), Hyaluronan synthase 3 involved in oxidative stress response (e.g., HAS3), Hereditary hemochromatosis protein in iron metabolism (e.g., HFE), Retinoic acid receptor gamma and DNA topoisomerases in topoisomerase-induced DNA damage (e.g., RARG, TOP2B), CUGBP Elav-like family member 4 in splicing of sarcomere genes (e.g., CELF4), DNA polymerase gamma in mitochondrial replication (e.g., DPOG2), and chaperones involved in ion channel trafficking (e.g., Hsp70 and Hsp90).

9. The pegRNA of any one of claims 1 to 8, wherein the prime editing introduces one or more genetic variations into the gene, where the genetic variations have been previously identified as benign, likely benign, pathogenic, or likely pathogenic to cardiac function.

10. The pegRNA of any one of claims 1 to 6, wherein the drug has not been previously identified as a drug capable of inducing cardiomyocyte toxicity.

11. The pegRNA of any one of claims 1 to 6, wherein the drug is selected from a list of blackbox labeled drugs (currently marketed drugs that contain a label to indicate that Long QT patients should avoid using this drug; including Table 2), ii) drugs withdrawn from the US market due to cardiotoxicity events, iii) drugs that failed clinical trials due to cardiotoxicity events-(some may be marketed in other countries; iv) drugs associated with cardiotoxicity for particular SNPs as documented in the literature (e.g., ClinVar; antiarrhythmics, class i and iii; cisapride, amiodarone, dofetilide, clarithromycin, hydroxyzine, quinidine and disopyramide), and v) TdP associated drugs (including Table 3).

12. The pegRNA of any one of claims 1 to 11, wherein the pegRNA is designed to introduce a mutation into the human KCNH2 gene, wherein the mutation is selected from a SNP, preferably wherein the SNP is selected from the SNPs identified in Table 1 and/or SEQ ID Nos. 2-1054.

13. The pegRNA of claim 12, wherein the SNP causes a V476I mutation in the KCNH2 protein as in SEQ ID NO. 105.

14. The pegRNA of any one of claims 1 through 13, wherein the pegRNA is encoded by the DNA sequence of any one of SEQ ID Nos.: 1100 to 1113.

15. A gRNA designed for the regulation of expression of a target gene by CRISPR interference, wherein the target gene is being tested for their role in cardiomyocyte function, proliferation, viability, survival, morphology, the expression of markers and receptors, and “heart beats” in vitro (which can model arrhythmias), preferably wherein the target gene is selected from: potassium channel/related genes selected from human ether-a-go-go related gene (hERG), Hyperpolarization-activated cyclic nucleotide-gated (HCN) channels; transient outward potassium current channel; Slowly activating delayed rectifier potassium current channels; Rapidly activating delayed rectifier potassium current channels; Inwardly rectifying potassium (Kir) channels; Inwardly rectifying potassium channels; G protein-coupled, inwardly rectifying potassium channels; ATP-sensitive potassium channels; sodium channel/related genes selected from SCN5A, ACN1B, SCN2B, SCN3B, SCN4B, GPD1L, RANGRF, SCN10A; calcium channel/related genes selected from CACNA1C, CACNB2, CACNA2D1, RYR2, CASQ2, TRDN, CALM1-3; and other genes selected from KCNQ1, SCNA5, KCNE1, KCNE2, KvLQT1, Nav1.5, ankyrin-B, MinK, MiRP1, Kir2.1, Cav1.2, caveolin-3, Nav.beta.4 genes, SNTAI, SLMAP, PKP2, ANK2, CAV3, SLC4A3, TRPM4, DPP6, IRX3, GNAI2, ADORAI, GNAS, KCNQ1, SCNA5, KCNE1, KCNE2, KvLQT1, Nav1.5, ankyrin-B, MinK, MiRP1, Kir2.1, Cav1.2, caveolin-3, Nav.beta.4 ATP-binding cassette (ABC) transporters involved in drug transport (e.g., ABCB1, ABCB4, ABCCI, ABCC2, SLC10A2, SLC28A3, SLC22A7, SLC22A17), Carbonyl reductases in drug metabolism (e.g., CBR3), Hyaluronan synthase 3 involved in oxidative stress response (e.g., HAS3), Hereditary hemochromatosis protein in iron metabolism (e.g., HFE), Retinoic acid receptor gamma and DNA topoisomerases in topoisomerase-induced DNA damage (e.g., RARG, TOP2B), CUGBP Elav-like family member 4 in splicing of sarcomere genes (e.g., CELF4), DNA polymerase gamma in mitochondrial replication (e.g., DPOG2), and chaperones involved in ion channel trafficking (e.g., Hsp70 and Hsp90).

16. The gRNA of claim 15, wherein the gRNA target sequence is selected from those of SEQ ID NO. 1116 to 1155 and described in Table 4.

17. A composition comprising a pegRNA nucleic acid according to any one of claims 1 to 14, and, optionally, a prime editor comprising nucleic acid programmable DNA binding protein (napDNAbp), which is fused to or bound to a domain comprising polymerase (preferably, RNA-dependent DNA polymerase) activity, a sgRNA, an iPSC, and a cardiomyocyte.

18. A composition comprising a library of two or more pegRNA nucleic acids according to any one of claims 1 to 11, wherein all of the pegRNA nucleic acids are designed for prime editing of one or more (cardiomyocyte) genes at one or more multiple sites, and, optionally, a prime editor comprising nucleic acid programmable DNA binding protein (napDNAbp), which is fused to or bound to a domain comprising polymerase (preferably, RNA-dependent DNA polymerase) activity, a sgRNA, an iPSC, and a cardiomyocyte.

19. The composition of claim 12, wherein each of the pegRNA nucleic acids are designed for prime editing of a single (cardiomyocyte) gene.

20. The composition of any one of claims 12 and 13, further comprising one or more negative controls each comprising a pegRNA that does not introduce any edits into one or more genes.

21. A composition comprising the gRNA of claim 15 and, optionally, a nuclease.

22. A cell modified by CRISPR interference with a DNA polynucleotide coding for the gRNA of claim 15.

23. A cell genetically engineered to carry one or more specific mutations in one or more target genes, wherein the target genes are being tested for their role in cardiomyocyte function, proliferation, viability, survival, morphology, the expression of markers and receptors, and “heart beats” in vitro (which can model arrhythmias), preferably wherein the cell is a iPSC or a cardiomyocyte derived from a iPSC.

24. The cell of claim 23, wherein the cell is genetically engineered using CRISPR, base editing, or prime editing, preferably prime editing, more preferably with a pegRNA of any one of claims 1 through 14.

25. The cell of any one of claims 23 and 24, wherein the target gene is selected from KCNH2/hERG, KCNQ1, SCNA5, KCNE1, KCNE2, KvLQT1, Nav1.5, ankyrin-B, MinK, MiRP1, Kir2.1, Cav1.2, caveolin-3, and Nav.beta.4 genes; genes encoding other channels, a sodium channel/related gene selected from SCN5A, ACN1B, SCN2B, SCN3B, SCN4B, GPD1L, RANGRF, SCN10A; a potassium channel/related gene selected from human ether-a-go-go related gene (hERG), Hyperpolarization-activated cyclic nucleotide-gated (HCN) channels; transient outward potassium current channel; Slowly activating delayed rectifier potassium current channels; Rapidly activating delayed rectifier potassium current channels; Inwardly rectifying potassium (Kir) channels; Inwardly rectifying potassium channels; G protein-coupled, inwardly rectifying potassium channels; ATP-sensitive potassium channels; a calcium channel/related gene selected from CACNA1C, CACNB2, CACNA2D1, RYR2, CASQ2, TRDN, CALM1-3; other genes selected from SNTA1, SLMAP, PKP2, ANK2, CAV3, SLC4A3, TRPM4, DPP6, IRX3, GNAI2, ADORAI, GNAS, KCNQ1, SCNA5, KCNE1, KCNE2, KvLQT1, Nav1.5, ankyrin-B, MinK, MiRP1, Kir2.1, Cav1.2, caveolin-3, Nav.beta.4 ATP-binding cassette (ABC) transporters involved in drug transport (e.g., ABCB1, ABCB4, ABCCI, ABCC2, SLC10A2, SLC28A3, SLC22A7, SLC22A17), Carbonyl reductases in drug metabolism (e.g., CBR3), Hyaluronan synthase 3 involved in oxidative stress response (e.g., HAS3), Hereditary hemochromatosis protein in iron metabolism (e.g., HFE), Retinoic acid receptor gamma and DNA topoisomerases in topoisomerase-induced DNA damage (e.g., RARG, TOP2B), CUGBP Elav-like family member 4 in splicing of sarcomere genes (e.g., CELF4), DNA polymerase gamma in mitochondrial replication (e.g., DPOG2), and chaperones involved in ion channel trafficking (e.g., Hsp70 and Hsp90)

26. The cell of claim 25, wherein the mutation replicates one or more SNPs listed in Table 1 of SEQ ID NO.2 to 1054, preferably SEQ ID NO.105.

27. The cell of any one of claims 23 to 26, wherein the cell carries a V476I mutation in the KCNH2 gene.

28. The cell of any one of claims 23 to 27, wherein the mutation was known to be or is being tested as associated with heart disease.

29. The cell of claim 28, wherein the heart disease is an arrhythmia, hypertrophic cardiomyopathy, sudden unexplained death, obesity-related cardiac disease, primary dilated cardiomyopathy, primary familial hypertrophic cardiomyopathy, or seizure, preferably an arrhythmia selected from Long QT syndrome (including Congenital long QT syndrome, Long QT syndrome 2, and bradycardia-induced Long QT syndrome), Brugada syndrome, Short QT syndrome 1, Sudden Infant Death Syndrome, Acquired long QT syndrome, ventricular tachycardia, Wolff-Parkinson-White pattern arrhythmia, Arrhythmogenic right ventricular cardiomyopathy, Atrial fibrillation, Catecholaminergic polymorphic ventricular tachycardia type 1, Prolonged QT interval, Paroxysmal familial ventricular fibrillation 1, Sudden cardiac arrest/death, and Torsades de pointes.

30. The cell of any one of claims 23 to 29, wherein the cell expresses an mRNA having a sequence comprising SEQ ID NOs.: 2-1054 from Table 1, preferably SEQ ID NO.: 105.

31. A composition comprising a library of two or more iPS cells and/or cardiomyocytes wherein each iPS cell/cardiomyocyte has been modified to comprise one or more pegRNA molecules according to any one of claims 1 to 11 or is a cell of any one of claims 23 to 30.

32. The composition of claim 31 further comprising iPS cells and/or cardiomyocytes that have not been exposed to a pegRNA and/or iPS cells that have been exposed to one or more pegRNAs that do not edit one or more of the genes.

33. A method of identifying a target gene or gene mutation as associated with or cause for cardiotoxicity, comprising:
(i) obtaining one or more iPSC-derived cardiomyocytes carrying one or more (e.g., library) of wild-type and target gene editing mutations in one or more (cardiomyocyte) genes; or
obtaining one or more iPSC-derived cardiomyocytes wherein expression of one or more target genes has been altered; and
(ii) identifying the target gene or gene mutation and/or altered gene expression level as associated with or a cause for cardiotoxicity if the mutation and/or gene expression level has a negative effect on cardiomyocytes' function, proliferation, viability, survival, morphology, the expression of certain markers and receptors, or “heart beats” in vitro (which can model arrhythmias) relative to wild-type (e.g., isogenic) cells.

34. A method of identifying a target gene mutation as a mutation associated with drug-induced cardiotoxicity, comprising:
(i) obtaining one or more iPSC-derived cardiomyocytes carrying one or more (e.g., library) wild-type and target gene editing mutations in one or more (cardiomyocyte) genes; or
obtaining one or more iPSC-derived cardiomyocytes wherein expression of one or more genes has been altered; and
(ii) exposing the cardiomyocytes to a drug;
(ii) identifying the target gene or gene mutation as associated with drug-induced cardiotoxicity if exposure of the cardiomyocytes carrying the mutation and/or the altered gene expression level to the drug has a negative effect on cardiomyocytes' function, proliferation, viability, survival, morphology, the expression of certain markers and receptors, or “heart beats” in vitro (which can model arrhythmias) relative to wild-type (e.g., isogenic) cells exposed and to cells not exposed to the drug.

35. A method of assessing whether a drug is cardiotoxic to a wild-type subject comprising:
(i) obtaining one or more iPSC-derived wild-type cardiomyocytes;
(ii) exposing the cardiomyocytes to a drug; and
(ii) identifying the drug as cardiotoxic to a wild-type subject if exposure of the wild-type cardiomyocytes to the drug has a negative effect on cardiomyocytes' function, proliferation, viability, survival, morphology, the expression of certain markers and receptors, or “heart beats” in vitro (which can model arrhythmias) relative to wild-type (e.g., isogenic) cardiomyocytes not exposed to the drug.

36. A method for identifying a drug as causing cardiotoxicity in a subject due to the presence of a target gene mutation and/or due to the altered expression of a gene comprising:
(i) obtaining one or more iPSC-derived cardiomyocytes carrying one or more (e.g. library) of wild-type and target gene editing mutations in a target gene; or
obtaining one or more iPSC-derived cardiomyocytes wherein expression of one or more target genes has been altered; and
(ii) exposing the cardiomyocytes to the drug;
(iii) identifying the drug as causing cardiotoxicity due to the presence of the target gene mutation and/or due to the altered target gene expression when the cardiomyocytes carrying the mutation or altered target gene expression exhibit signs of cardiotoxicity in response to exposure to the drug in a cardiotoxicity assay but the wild-type cardiomyocytes do not;
wherein signs of cardiotoxicity comprise a negative effect on cardiomyocytes' function, proliferation, viability, survival, morphology, the expression of certain markers and receptors, or “heart beats” in vitro (which can model arrhythmias) relative to wild-type (e.g., isogenic) cells not exposed to the drug; wherein sequencing of the gene or portion of the gene to determine the identity of the mutation takes place before or after the cardiotoxicity assay.

37. The method of any one of claims 33 through 36, wherein the mutation is introduced in the target gene by gene editing (including CRISPR, base editing, prime editing).

38. The method of claim 37, wherein the mutation is introduced in the target gene by prime editing, preferably prime editing with any one of the pegRNAs of any one of claims 1 through 14 and/or the target gene expression is altered by CRISPR interference, preferably using a gRNA of any one of claims 15 and 16.

39. The method of any one of claims 33 to 38, wherein at least one of the target genes that is edited or has its expression altered is selected from the KONH2 hERG, KCNQ1, SCNA5, KONE1, KCNE2, KvLQT1, Nav1.5, ankyrin-B, MinK, MiRP1, Kir2.1, Cav1.2, caveolin-3, and Nav.beta.4 genes; genes encoding other channels, a sodium channel/related gene selected from SCN5A, ACN1B, SCN2B, SCN3B, SCN4B, GPD1L, RANGRF, SCN10A; a potassium channel/related gene selected from human ether-a-go-go related gene (hERG), Hyperpolarization-activated cyclic nucleotide-gated (HCN) channels; transient outward potassium current channel; Slowly activating delayed rectifier potassium current channels; Rapidly activating delayed rectifier potassium current channels; Inwardly rectifying potassium (Kir) channels; Inwardly rectifying potassium channels; G protein-coupled, inwardly rectifying potassium channels; ATP-sensitive potassium channels; a calcium channel/related gene selected from CACNA1C, CACNB2, CACNA2D1, RYR2, CASQ2, TRDN, CALM1-3; other genes selected from SNTA1, SLMAP, PKP2, ANK2, CAV3, SLC4A3, TRPM4, DPP6, IRX3, GNAI2, ADORAI, GNAS, KCNQ1, SCNA5, KCNE1, KCNE2, KvLQT1, Nav1.5, ankyrin-B, MinK, MiRP1, Kir2.1, Cav1.2, caveolin-3, Nav.beta.4 ATP-binding cassette (ABC) transporters involved in drug transport (e.g., ABCB1, ABCB4, ABCCI, ABCC2, SLC10A2, SLC28A3, SLC22A7, SLC22A17), Carbonyl reductases in drug metabolism (e.g., CBR3), Hyaluronan synthase 3 involved in oxidative stress response (e.g., HAS3), Hereditary hemochromatosis protein in iron metabolism (e.g., HFE), Retinoic acid receptor gamma and DNA topoisomerases in topoisomerase-induced DNA damage (e.g., RARG, TOP2B), CUGBP Elav-like family member 4 in splicing of sarcomere genes (e.g., CELF4), DNA polymerase gamma in mitochondrial replication (e.g., DPOG2), and chaperones involved in ion channel trafficking (e.g., Hsp70 and Hsp90).

40. The method of claim 39, wherein the target gene is the KONH2 hERG gene.

41. The method of claim 40, wherein the mutation is selected from those that may result from the SNPs of Table 1 and SEQ ID NOs.: 2-1054, preferably V476I, preferably SEQ ID NO: 105.

42. A method for identifying a subject in need of treatment with a drug as being sensitive to said drug-induced cardiotoxicity comprising testing a DNA sample from the subject (e.g., collected from a tissue comprising cardiomyocytes and/or from cardiomyocytes derived from iPSC isolated from the subject) for the presence of one or more target gene mutations or altered expression levels that have been identified as associated with said drug-induced cardiotoxicity by the method of any one of claims 33 to 41 and, optionally, choosing a different drug for treating the subject than the drug that induces cardiotoxicity.

43. The method of claim 42, wherein the subject is identified as suffering from, or being susceptible to, an arrhythmia, hypertrophic cardiomyopathy, sudden unexplained death, obesity-related cardiac disease, primary dilated cardiomyopathy, primary familial hypertrophic cardiomyopathy, or seizure, preferably an arrhythmia selected from Long QT syndrome (including Congenital long QT syndrome, Long QT syndrome 2, and bradycardia-induced Long QT syndrome), Brugada syndrome, Short QT syndrome 1, Sudden Infant Death Syndrome, Acquired long QT syndrome, ventricular tachycardia, Wolff-Parkinson-White pattern arrhythmia, Arrhythmogenic right ventricular cardiomyopathy, Atrial fibrillation, Catecholaminergic polymorphic ventricular tachycardia type 1, Prolonged QT interval, Paroxysmal familial ventricular fibrillation 1, Sudden cardiac arrest/death, and Torsades de pointes, when the subject carries one or more of the gene mutations.

44. The cells of any one of claims 22 to 30, or of the method of any one of claims 33 to 41, wherein the iPSC are prepared from any somatic cell including skin-derived fibroblasts, and peripheral blood mononuclear cells, and reprogrammed by any integrative (i.e. lentiviral) or episomal (i.e. plasmid, Sendai virus) vectors containing any combination of transcriptional factors, including OCT4, SOX2, KLF4 and MYC, or transcriptional factors delivered via RNA (mRNA or miRNA) or combinations of small molecules and growth factors, or direct modulation of gene expression via RNAi or CRISPRi/a.

45. The method of any one of claims 33 to 41, wherein the cardiomyocytes are derived from iPSC by in vitro differentiation using combinations of small molecules, and/or growth factors, including modulation of Wnt pathway followed by glucose starvation for selection of highly purified cardiomyocyte populations, and combinations with nucleic acids (including RNA, miRNA, siRNA).

46. The method of any one of claims 33 to 41, wherein signs of cardiotoxicity comprise changes in cardiomyocyte function, cell viability, survival, morphology, the expression of certain markers and receptors, heart beats in vitro and, and where these signs are measured, preferably, with models arrhythmias, a patch clamp technique, an external recording method, a voltage-sensitive dye, or an intracellular ion-sensitive dye.

47. A method of prime editing an iPS cell or an iPSC-derived cardiomyocyte cell comprising contacting the cell's double stranded target DNA with a pegRNA designed to edit a target gene (e.g., cardiomyocyte), preferably a pegRNA according to any one of claims 1 through 14, and with a prime editor, and optionally a sgRNA, preferably wherein the prime editor comprises a nucleic acid programmable DNA binding protein (napDNAbp), which is fused to a domain comprising polymerase (preferably, RNA-dependent DNA polymerase) activity, wherein the contacting prime edits the cells by installing one or more nucleotide edits in the double stranded target DNA, thereby editing the double stranded target DNA.

48. The method of claim 47, wherein the pegRNA and/or a nucleic acid encoding the napDNAbp fused to a domain comprising RNA-dependent DNA polymerase activity, are introduced into the iPSC or IPSC-derived cardiomyocytes by transfection, viral transduction (lentiviral, AAV, etc.), nanoparticles, or nucleofection.

49. The method of any one of claims 47 and 48, wherein the napDNAbp is selected from the group consisting of Cas9, Cas12e, Cas12d, Cas12a, Cas12b1, Cas13a, Cas12c, Cas12b2, Cas13a, Cas12c, Cas12d, Cas12e, Cas12h, Cas12i, Cas12g, Cas12f (Cas14), Cas12f1, Cas12j (Casǐ), and Argonaute and, optionally, has a nickase activity.

50. The method of any one of claims 47 to 49, wherein the napDNAbp is a nuclease active Cas9 domain, a nuclease inactive Cas9 domain, or a Cas9 nickase domain or variant thereof.

51. The method of any one of claims 47 to 50, wherein the RNA-dependent DNA polymerase is a reverse transcriptase, preferable selected from Moloney Murine Leukemia virus reverse transcriptase (MMLV-RT), optionally wherein the MMLV-RT comprises one or more amino acid substitutions selected from D200N, T306K, W313F, T330P, and L603W compared to a wild type MMLV-RT.

52. The method of any one of claims 29 to 46, wherein the pegRNA and/or the gRNA are designed by PrimeDesign or another commercially or publicly available method known to one of ordinary skill in the art.

53. A polynucleotide comprising a DNA sequence coding for the pegRNA of any one of claims 1 through 14 or coding the gRNA of any one of claims 15 and 16, preferably the sequence of SEQ Nos: 1116 to 1134, or a pegRNA coded by the same.

54. A vector comprising the polynucleotide of claim 53, optionally wherein expression of the pegRNA or gRNA is under the control of a promoter.

55. The method of any one of claims 33 to 52, wherein the iPS cells or iPS cell-derived cardiomyocytes are cultured and/or tested in multi-well (e.g. 96 well) plates.

56. The method of claim 55, wherein each well comprises 1 cell or its progeny.

57. The method of any one of claim 55 or 56, wherein each cell comprises only one type of pegRNA, or nucleic acid encoding the pegRNA, preferably wherein the cells are sorted through the barcodes in each pegRNA and/or wherein the pegRNAs are sorted into each well prior to introduction into the cells.

58. The method of any one of claims 33 to 41, 45, and 46, wherein the drug is a drug that is hypothesized to cause arrhythmia.

59. The method of any one of claims 33 to 41, 45, 46, 55 to 58, wherein the drug is selected from a list of blackbox labeled drugs (currently marketed drugs that contain a label to indicate that Long QT patients should avoid using this drug; including Table 2), ii) drugs withdrawn from the US market due to cardiotoxicity events, iii) drugs that failed clinical trials due to cardiotoxicity events-(some may be marketed in other countries; iv) drugs associated with cardiotoxicity for particular SNPs as documented in the literature (e.g., ClinVar; antiarrhythmics, class i and iii; cisapride, amiodarone, dofetilide, clarithromycin, hydroxyzine, quinidine and disopyramide), and v) TdP associated drugs (including Table 3).

60. A method of treating a subject for arrhythmia and/or preventing arrhythmia in the subject, wherein the subject is identified by the method of claim 42 or 43 as carrying a variant mutation, wherein the treatment comprises genome editing of the genome of at least some of the subject's cardiomyocytes to edit the variant mutation and/or alter the expression of the target gene.

61. An array of cell culture wells or vessels each comprising at least one iPSC or iPSC-derived cardiomyocyte and at least one component of a gene editing system and/or gene expression altering system, wherein the gene editing system is designed to introduce one or more gene edits per iPSC/cardiomyocyte into at least one target gene and the gene expression altering system is designed to alter the expression of at least one target gene, wherein the target gene edit and/or altered expression level is hypothesized to cause cardiotoxicity or drug-induced cardiotoxicity when introduced into or present in the genome of a cardiomyocyte.

62. The array of claim 61, wherein the array comprises a multi-well tissue culture plate.

63. The array of claim 61, wherein each well or vessel carries only cells comprising a single gene edit or a single level of altered gene expression.

64. The array of any one of claims 62 and 63, wherein the array further comprises one or more elements of an in vitro cardiotoxicity assay.

65. The array of any one of claims 61 to 64, wherein the gene editing or gene expression altering system comprises one or more pegRNA according to any one of claims 1 to 14, one or more gRNA according to any one of claims 15 and 16, and/or any composition according to any one of claims 17 to 21.

66. The method, pegRNA, gRNA, polynucleotide, vector, and cell of any one of claims 1-66, wherein the coding DNA sequence coding for the pegRNA comprises any one of SEQ ID NOs: 1100 to 1113 and/or the coding sequence coding for the gRNA comprises any one of SEQ ID Nos 1116-1134 (or where the target is that of anyone one of SEQ ID NOs: 1055 to 1073), and the DNA coding sequence for the mRNA/SNP comprises any one of SEQ ID NOs.: 2 to 1054.

The application's sequence listing, which the Patent Office published only in electronic form, follows.

SEQUENCE LISTING (1160 sequences)

SEQ ID NO: 1 - DNA, 3480 bp, Homo sapiens
  source 1..3480: mol_type = genomic DNA
atgccggtgcggaggggccacgtcgcgccgcagaacaccttcctggacaccatcatccgcaagtttgagggccagagccgtaagttcatcatcgccaacgctcgggtggagaactgcgccgtcatctactgcaacgacggcttctgcgagctgtgcggctactcgcgggccgaggtgatgcagcgaccctgcacctgcgacttcctgcacgggccgcgcacgcagcgccgcgctgccgcgcagatcgcgcaggcactgctgggcgccgaggagcgcaaagtggaaatcgccttctaccggaaagatgggagctgcttcctatgtctggtggatgtggtgcccgtgaagaacgaggatggggctgtcatcatgttcatcctcaatttcgaggtggtgatggagaaggacatggtggggtccccggctcatgacaccaaccaccggggcccccccaccagctggctggccccaggccgcgccaagaccttccgcctgaagctgcccgcgctgctggcgctgacggcccgggagtcgtcggtgcggtcgggcggcgcgggcggcgcgggcgccccgggggccgtggtggtggacgtggacctgacgcccgcggcacccagcagcgagtcgctggccctggacgaagtgacagccatggacaaccacgtggcagggctcgggcccgcggaggagcggcgtgcgctggtgggtcccggctctccgccccgcagcgcgcccggccagctcccatcgccccgggcgcacagcctcaaccccgacgcctcgggctccagctgcagcctggcccggacgcgctcccgagaaagctgcgccagcgtgcgccgcgcctcgtcggccgacgacatcgaggccatgcgcgccggggtgctgcccccgccaccgcgccacgccagcaccggggccatgcacccactgcgcagcggcttgctcaactccacctcggactccgacctcgtgcgctaccgcaccattagcaagattccccaaatcaccctcaactttgtggacctcaagggcgaccccttcttggcttcgcccaccagtgaccgtgagatcatagcacctaagataaaggagcgaacccacaatgtcactgagaaggtcacccaggtcctgtccctgggcgccgacgtgctgcctgagtacaagctgcaggcaccgcgcatccaccgctggaccatcctgcattacagccccttcaaggccgtgtgggactggctcatcctgctgctggtcatctacacggctgtcttcacaccctactcggctgccttcctgctgaaggagacggaagaaggcccgcctgctaccgagtgtggctacgcctgccagccgctggctgtggtggacctcatcgtggacatcatgttcattgtggacatcctcatcaacttccgcaccacctacgtcaatgccaacgaggaggtggtcagccaccccggccgcatcgccgtccactacttcaagggctggttcctcatcgacatggtggccgccatccccttcgacctgctcatcttcggctctggctctgaggagctgatcgggctgctgaagactgcgcggctgctgcggctggtgcgcgtggcgcggaagctggatcgctactcagagtacggcgcggccgtgctgttcttgctcatgtgcacctttgcgctcatcgcgcactggctagcctgcatctggtacgccatcggcaacatggagcagccacacatggactcacgcatcggctggctgcacaacctgggcgaccagataggcaaaccctacaacagcagcggcctgggcggcccctccatcaaggacaagtatgtgacggcgctctacttcaccttcagcagcctcaccagtgtgggcttcggcaacgtctctcccaacaccaactcagagaagatcttctccatctgcgtcatgctcattggctccctcatgtatgctagcatcttcggcaacgtgtcggccatcatccagcggctgtactcgggcacagcccgctaccacacacagatgctgcgggtgcgggagttcatccgcttccaccagatccccaatcccctgcgccagcgcctcgaggagtacttccagcacgcctggtcctacaccaacggcatcgacatgaacgcggtgctgaagggcttccctgagtgcctgcaggctgacatctgcctgcacctgaaccgctcactgctgcagcactgcaaacccttccgaggggccaccaagggctgccttcgggccctggccatgaagttcaagaccacacatgcaccgccaggggacacactggtgcatgctggggacctgctcaccgccctgtacttcatctcccggggctccatcgagatcctgcggggcgacgtcgtcgtggccatcctggggaagaatgacatctttggggagcctctgaacctgtatgcaaggcctggcaagtcgaacggggatgtgcgggccctcacctactgtgacctacacaagatccatcgggacgacctgctggaggtgctggacatgtaccctgagttctccgaccacttctggtccagcctggagatcaccttcaacctgcgagataccaacatgatcccgggctcccccggcagtacggagttagagggtggcttcagtcggcaacgcaagcgcaagttgtccttccgcaggcgcacggacaaggacacggagcagccaggggaggtgtcggccttggggccgggccgggcgggggcagggccgagtagccggggccggccgggggggccgtggggggagagcccgtccagtggcccctccagccctgagagcagtgaggatgagggcccaggccgcagctccagccccctccgcctggtgcccttctccagccccaggccccccggagagccgccgggtggggagcccctgatggaggactgcgagaagagcagcgacacttgcaaccccctgtcaggcgccttctcaggagtgtccaacattttcagcttctggggggacagtcggggccgccagtaccaggagctccctcgatgccccgcccccacccccagcctcctcaacatccccctctccagcccgggtcggcggccccggggcgacgtggagagcaggctggatgccctccagcgccagctcaacaggctggagacccggctgagtgcagacatggccactgtcctgcagctgctacagaggcagatgacgctggtcccgcccgcctacagtgctgtgaccaccccggggcctggccccacttccacatccccgctgttgcccgtcagccccctccccaccctcaccttggactcgctttctcaggtttcccagttcatggcgtgtgaggagctgcccccgggggccccagagcttccccaagaaggccccacacgacgcctctccctaccgggccagctgggggccctcacctcccagcccctgcacagacacggctcggacccgggcagttag

SEQ ID NO: 2 - DNA, 3884 bp, Homo sapiens
  source 1..3884: mol_type = genomic DNA
  misc_feature 1..3884: note = cDNA of KCNH2 gene SNP c.1001C>T (p.Pro334Leu)
atgccggtgcggaggggccacgtcgcgccgcagaacaccttcctggacaccatcatccgcaagtttgagggccagagccgtaagttcatcatcgccaacgctcgggtggagaactgcgccgtcatctactgcaacgacggcttctgcgagctgtgcggctactcgcgggccgaggtgatgcagcgaccctgcacctgcgacttcctgcacgggccgcgcacgcagcgccgcgctgccgcgcagatcgcgcaggcactgctgggcgccgaggagcgcaaagtggaaatcgccttctaccggaaagatgggagctgcttcctatgtctggtggatgtggtgcccgtgaagaacgaggatggggctgtcatcatgttcatcctcaatttcgaggtggtgatggagaaggacatggtggggtccccggctcatgacaccaaccaccggggcccccccaccagctggctggccccaggccgcgccaagaccttccgcctgaagctgcccgcgctgctggcgctgacggcccgggagtcgtcggtgcggtcgggcggcgcgggcggcgcgggcgccccgggggccgtggtggtggacgtggacctgacgcccgcggcacccagcagcgagtcgctggccctggacgaagtgacagccatggacaaccacgtggcagggctcgggcccgcggaggagcggcgtgcgctggtgggtcccggctctccgccccgcagcgcgcccggccagctcccatcgccccgggcgcacagcctcaaccccgacgcctcgggctccagctgcagcctggcccggacgcgctcccgagaaagctgcgccagcgtgcgccgcgcctcgtcggccgacgacatcgaggccatgcgcgccggggtgctgcccccgccaccgcgccacgccagcaccggggccatgcacccactgcgcagcggcttgctcaactccacctcggactccgacctcgtgcgctaccgcaccattagcaagattctccaaatcaccctcaactttgtggacctcaagggcgaccccttcttggcttcgcccaccagtgaccgtgagatcatagcacctaagataaaggagcgaacccacaatgtcactgagaaggtcacccaggtcctgtccctgggcgccgacgtgctgcctgagtacaagctgcaggcaccgcgcatccaccgctggaccatcctgcattacagccccttcaaggccgtgtgggactggctcatcctgctgctggtcatctacacggctgtcttcacaccctactcggctgccttcctgctgaaggagacggaagaaggcccgcctgctaccgagtgtggctacgcctgccagccgctggctgtggtggacctcatcgtggacatcatgttcattgtggacatcctcatcaacttccgcaccacctacgtcaatgccaacgaggaggtggtcagccaccccggccgcatcgccgtccactacttcaagggctggttcctcatcgacatggtggccgccatccccttcgacctgctcatcttcggctctggctctgaggagctgatcgggctgctgaagactgcgcggctgctgcggctggtgcgcgtggcgcggaagctggatcgctactcagagtacggcgcggccgtgctgttcttgctcatgtgcacctttgcgctcatcgcgcactggctagcctgcatctggtacgccatcggcaacatggagcagccacacatggactcacgcatcggctggctgcacaacctgggcgaccagataggcaaaccctacaacagcagcggcctgggcggcccctccatcaaggacaagtatgtgacggcgctctacttcaccttcagcagcctcaccagtgtgggcttcggcaacgtctctcccaacaccaactcagagaagatcttctccatctgcgtcatgctcattggctccctcatgtatgctagcatcttcggcaacgtgtcggccatcatccagcggctgtactcgggcacagcccgctaccacacacagatgctgcgggtgcgggagttcatccgcttccaccagatccccaatcccctgcgccagcgcctcgaggagtacttccagcacgcctggtcctacaccaacggcatcgacatgaacgcggtgctgaagggcttccctgagtgcctgcaggctgacatctgcctgcacctgaaccgctcactgctgcagcactgcaaacccttccgaggggccaccaagggctgccttcgggccctggccatgaagttcaagaccacacatgcaccgccaggggacacactggtgcatgctggggacctgctcaccgccctgtacttcatctcccggggctccatcgagatcctgcggggcgacgtcgtcgtggccatcctggggaagaatgacatctttggggagcctctgaacctgtatgcaaggcctggcaagtcgaacggggatgtgcgggccctcacctactgtgacctacacaagatccatcgggacgacctgctggaggtgctggacatgtaccctgagttctccgaccacttctggtccagcctggagatcaccttcaacctgcgagataccaacatgatcccgggctcccccggcagtacggagttagagggtggcttcagtcggcaacgcaagcgcaagttgtccttccgcaggcgcacggacaaggacacggagcagccaggggaggtgtcggccttggggccgggccgggcgggggcagggccgagtagccggggccggccgggggggccgtggggggagagcccgtccagtggcccctccagccctgagagcagtgaggatgagggcccaggccgcagctccagccccctccgcctggtgcccttctccagccccaggccccccggagagccgccgggtggggagcccctgatggaggactgcgagaagagcagcgacacttgcaaccccctgtcaggcgccttctcaggagtgtccaacattttcagcttctggggggacagtcggggccgccagtaccaggagctccctcgatgccccgcccccacccccagcctcctcaacatccccctctccagcccgggtcggcggccccggggcgacgtggagagcaggctggatgccctccagcgccagctcaacaggctggagacccggctgagtgcagacatggccactgtcctgcagctgctacagaggcagatgacgctggtcccgcccgcctacagtgctgtgaccaccccggggcctggccccacttccacatccccgctgttgcccgtcagccccctccccaccctcaccttggactcgctttctcaggtttcccagttcatggcgtgtgaggagctgcccccgggggccccagagcttccccaagaaggccccacacgacgcctctccctaccgggccagctgggggccctcacctcccagcccctgcacagacacggctcggacccgggcagttagtggggctgcccagtgtggacacgtggctcacccagggatcaaggcgctgctgggccgctccccttggaggccctgctcaggaggccctgaccgtggaaggggagaggaactcgaaagcacagctcctcccccagcccttgggaccatcttctcctgcagtcccctgggccccagtgagaggggcaggggcagggccggcagtaggtggggcctgtggtccccccactgccctgagggcattagctggtctaactgcccggaggcacccggccctgggccttaggcacctcaaggacttttctgctatttactgctcttattgttaaggataataattaaggatcatatgaataattaatgaagatgctgatgactatgaataataaataattatcctgaggaga

SEQ ID NO: 3 - DNA, 3884 bp, Homo sapiens
  source 1..3884: mol_type = genomic DNA
  misc_feature 1..3884: note = cDNA of KCNH2 gene SNP c.1003C>T (p.Gln335Ter)
atgccggtgcggaggggccacgtcgcgccgcagaacaccttcctggacaccatcatccgcaagtttgagggccagagccgtaagttcatcatcgccaacgctcgggtggagaactgcgccgtcatctactgcaacgacggcttctgcgagctgtgcggctactcgcgggccgaggtgatgcagcgaccctgcacctgcgacttcctgcacgggccgcgcacgcagcgccgcgctgccgcgcagatcgcgcaggcactgctgggcgccgaggagcgcaaagtggaaatcgccttctaccggaaagatgggagctgcttcctatgtctggtggatgtggtgcccgtgaagaacgaggatggggctgtcatcatgttcatcctcaatttcgaggtggtgatggagaaggacatggtggggtccccggctcatgacaccaaccaccggggcccccccaccagctggctggccccaggccgcgccaagaccttccgcctgaagctgcccgcgctgctggcgctgacggcccgggagtcgtcggtgcggtcgggcggcgcgggcggcgcgggcgccccgggggccgtggtggtggacgtggacctgacgcccgcggcacccagcagcgagtcgctggccctggacgaagtgacagccatggacaaccacgtggcagggctcgggcccgcggaggagcggcgtgcgctggtgggtcccggctctccgccccgcagcgcgcccggccagctcccatcgccccgggcgcacagcctcaaccccgacgcctcgggctccagctgcagcctggcccggacgcgctcccgagaaagctgcgccagcgtgcgccgcgcctcgtcggccgacgacatcgaggccatgcgcgccggggtgctgcccccgccaccgcgccacgccagcaccggggccatgcacccactgcgcagcggcttgctcaactccacctcggactccgacctcgtgcgctaccgcaccattagcaagattccctaaatcaccctcaactttgtggacctcaagggcgaccccttcttggcttcgcccaccagtgaccgtgagatcatagcacctaagataaaggagcgaacccacaatgtcactgagaaggtcacccaggtcctgtccctgggcgccgacgtgctgcctgagtacaagctgcaggcaccgcgcatccaccgctggaccatcctgcattacagccccttcaaggccgtgtgggactggctcatcctgctgctggtcatctacacggctgtcttcacaccctactcggctgccttcctgctgaaggagacggaagaaggcccgcctgctaccgagtgtggctacgcctgccagccgctggctgtggtggacctcatcgtggacatcatgttcattgtggacatcctcatcaacttccgcaccacctacgtcaatgccaacgaggaggtggtcagccaccccggccgcatcgccgtccactacttcaagggctggttcctcatcgacatggtggccgccatccccttcgacctgctcatcttcggctctggctctgaggagctgatcgggctgctgaagactgcgcggctgctgcggctggtgcgcgtggcgcggaagctggatcgctactcagagtacggcgcggccgtgctgttcttgctcatgtgcacctttgcgctcatcgcgcactggctagcctgcatctggtacgccatcggcaacatggagcagccacacatggactcacgcatcggctggctgcacaacctgggcgaccagataggcaaaccctacaacagcagcggcctgggcggcccctccatcaaggacaagtatgtgacggcgctctacttcaccttcagcagcctcaccagtgtgggcttcggcaacgtctctcccaacaccaactcagagaagatcttctccatctgcgtcatgctcattggctccctcatgtatgctagcatcttcggcaacgtgtcggccatcatccagcggctgtactcgggcacagcccgctaccacacacagatgctgcgggtgcgggagttcatccgcttccaccagatccccaatcccctgcgccagcgcctcgaggagtacttccagcacgcctggtcctacaccaacggcatcgacatgaacgcggtgctgaagggcttccctgagtgcctgcaggctgacatctgcctgcacctgaaccgctcactgctgcagcactgcaaacccttccgaggggccaccaagggctgccttcgggccctggccatgaagttcaagaccacacatgcaccgccaggggacacactggtgcatgctggggacctgctcaccgccctgtacttcatctcccggggctccatcgagatcctgcggggcgacgtcgtcgtggccatcctggggaagaatgacatctttggggagcctctgaacctgtatgcaaggcctggcaagtcgaacggggatgtgcgggccctcacctactgtgacctacacaagatccatcgggacgacctgctggaggtgctggacatgtaccctgagttctccgaccacttctggtccagcctggagatcaccttcaacctgcgagataccaacatgatcccgggctcccccggcagtacggagttagagggtggcttcagtcggcaacgcaagcgcaagttgtccttccgcaggcgcacggacaaggacacggagcagccaggggaggtgtcggccttggggccgggccgggcgggggcagggccgagtagccggggccggccgggggggccgtggggggagagcccgtccagtggcccctccagccctgagagcagtgaggatgagggcccaggccgcagctccagccccctccgcctggtgcccttctccagccccaggccccccggagagccgccgggtggggagcccctgatggaggactgcgagaagagcagcgacacttgcaaccccctgtcaggcgccttctcaggagtgtccaacattttcagcttctggggggacagtcggggccgccagtaccaggagctccctcgatgccccgcccccacccccagcctcctcaacatccccctctccagcccgggtcggcggccccggggcgacgtggagagcaggctggatgccctccagcgccagctcaacaggctggagacccggctgagtgcagacatggccactgtcctgcagctgctacagaggcagatgacgctggtcccgcccgcctacagtgctgtgaccaccccggggcctggccccacttccacatccccgctgttgcccgtcagccccctccccaccctcaccttggactcgctttctcaggtttcccagttcatggcgtgtgaggagctgcccccgggggccccagagcttccccaagaaggccccacacgacgcctctccctaccgggccagctgggggccctcacctcccagcccctgcacagacacggctcggacccgggcagttagtggggctgcccagtgtggacacgtggctcacccagggatcaaggcgctgctgggccgctccccttggaggccctgctcaggaggccctgaccgtggaaggggagaggaactcgaaagcacagctcctcccccagcccttgggaccatcttctcctgcagtcccctgggccccagtgagaggggcaggggcagggccggcagtaggtggggcctgtggtccccccactgccctgagggcattagctggtctaactgcccggaggcacccggccctgggccttaggcacctcaaggacttttctgctatttactgctcttattgttaaggataataattaaggatcatatgaataattaatgaagatgctgatgactatgaataataaataattatcctgaggaga

SEQ ID NO: 4 - DNA, 3884 bp, Homo sapiens
  source 1..3884: mol_type = genomic DNA
  misc_feature 1..3884: note = cDNA of KCNH2 gene SNP c.1009A>G (p.Thr337Ala)
atgccggtgcggaggggccacgtcgcgccgcagaacaccttcctggacaccatcatccgcaagtttgagggccagagccgtaagttcatcatcgccaacgctcgggtggagaactgcgccgtcatctactgcaacgacggcttctgcgagctgtgcggctactcgcgggccgaggtgatgcagcgaccctgcacctgcgacttcctgcacgggccgcgcacgcagcgccgcgctgccgcgcagatcgcgcaggcactgctgggcgccgaggagcgcaaagtggaaatcgccttctaccggaaagatgggagctgcttcctatgtctggtggatgtggtgcccgtgaagaacgaggatggggctgtcatcatgttcatcctcaatttcgaggtggtgatggagaaggacatggtggggtccccggctcatgacaccaaccaccggggcccccccaccagctggctggccccaggccgcgccaagaccttccgcctgaagctgcccgcgctgctggcgctgacggcccgggagtcgtcggtgcggtcgggcggcgcgggcggcgcgggcgccccgggggccgtggtggtggacgtggacctgacgcccgcggcacccagcagcgagtcgctggccctggacgaagtgacagccatggacaaccacgtggcagggctcgggcccgcggaggagcggcgtgcgctggtgggtcccggctctccgccccgcagcgcgcccggccagctcccatcgccccgggcgcacagcctcaaccccgacgcctcgggctccagctgcagcctggcccggacgcgctcccgagaaagctgcgccagcgtgcgccgcgcctcgtcggccgacgacatcgaggccatgcgcgccggggtgctgcccccgccaccgcgccacgccagcaccggggccatgcacccactgcgcagcggcttgctcaactccacctcggactccgacctcgtgcgctaccgcaccattagcaagattccccaaatcgccctcaactttgtggacctcaagggcgaccccttcttggcttcgcccaccagtgaccgtgagatcatagcacctaagataaaggagcgaacccacaatgtcactgagaaggtcacccaggtcctgtccctgggcgccgacgtgctgcctgagtacaagctgcaggcaccgcgcatccaccgctggaccatcctgcattacagccccttcaaggccgtgtgggactggctcatcctgctgctggtcatctacacggctgtcttcacaccctactcggctgccttcctgctgaaggagacggaagaaggcccgcctgctaccgagtgtggctacgcctgccagccgctggctgtggtggacctcatcgtggacatcatgttcattgtggacatcctcatcaacttccgcaccacctacgtcaatgccaacgaggaggtggtcagccaccccggccgcatcgccgtccactacttcaagggctggttcctcatcgacatggtggccgccatccccttcgacctgctcatcttcggctctggctctgaggagctgatcgggctgctgaagactgcgcggctgctgcggctggtgcgcgtggcgcggaagctggatcgctactcagagtacggcgcggccgtgctgttcttgctcatgtgcacctttgcgctcatcgcgcactggctagcctgcatctggtacgccatcggcaacatggagcagccacacatggactcacgcatcggctggctgcacaacctgggcgaccagataggcaaaccctacaacagcagcggcctgggcggcccctccatcaaggacaagtatgtgacggcgctctacttcaccttcagcagcctcaccagtgtgggcttcggcaacgtctctcccaacaccaactcagagaagatcttctccatctgcgtcatgctcattggctccctcatgtatgctagcatcttcggcaacgtgtcggccatcatccagcggctgtactcgggcacagcccgctaccacacacagatgctgcgggtgcgggagttcatccgcttccaccagatccccaatcccctgcgccagcgcctcgaggagtacttccagcacgcctggtcctacaccaacggcatcgacatgaacgcggtgctgaagggcttccctgagtgcctgcaggctgacatctgcctgcacctgaaccgctcactgctgcagcactgcaaacccttccgaggggccaccaagggctgccttcgggccctggccatgaagttcaagaccacacatgcaccgccaggggacacactggtgcatgctggggacctgctcaccgccctgtacttcatctcccggggctccatcgagatcctgcggggcgacgtcgtcgtggccatcctggggaagaatgacatctttggggagcctctgaacctgtatgcaaggcctggcaagtcgaacggggatgtgcgggccctcacctactgtgacctacacaagatccatcgggacgacctgctggaggtgctggacatgtaccctgagttctccgaccacttctggtccagcctggagatcaccttcaacctgcgagataccaacatgatcccgggctcccccggcagtacggagttagagggtggcttcagtcggcaacgcaagcgcaagttgtccttccgcaggcgcacggacaaggacacggagcagccaggggaggtgtcggccttggggccgggccgggcgggggcagggccgagtagccggggccggccgggggggccgtggggggagagcccgtccagtggcccctccagccctgagagcagtgaggatgagggcccaggccgcagctccagccccctccgcctggtgcccttctccagccccaggccccccggagagccgccgggtggggagcccctgatggaggactgcgagaagagcagcgacacttgcaaccccctgtcaggcgccttctcaggagtgtccaacattttcagcttctggggggacagtcggggccgccagtaccaggagctccctcgatgccccgcccccacccccagcctcctcaacatccccctctccagcccgggtcggcggccccggggcgacgtggagagcaggctggatgccctccagcgccagctcaacaggctggagacccggctgagtgcagacatggccactgtcctgcagctgctacagaggcagatgacgctggtcccgcccgcctacagtgctgtgaccaccccggggcctggccccacttccacatccccgctgttgcccgtcagccccctccccaccctcaccttggactcgctttctcaggtttcccagttcatggcgtgtgaggagctgcccccgggggccccagagcttccccaagaaggccccacacgacgcctctccctaccgggccagctgggggccctcacctcccagcccctgcacagacacggctcggacccgggcagttagtggggctgcccagtgtggacacgtggctcacccagggatcaaggcgctgctgggccgctccccttggaggccctgctcaggaggccctgaccgtggaaggggagaggaactcgaaagcacagctcctcccccagcccttgggaccatcttctcctgcagtcccctgggccccagtgagaggggcaggggcagggccggcagtaggtggggcctgtggtccccccactgccctgagggcattagctggtctaactgcccggaggcacccggccctgggccttaggcacctcaaggacttttctgctatttactgctcttattgttaaggataataattaaggatcatatgaataattaatgaagatgctgatgactatgaataataaataattatcctgaggaga

SEQ ID NO: 5 - DNA, 3884 bp, Homo sapiens
  source 1..3884: mol_type = genomic DNA
  misc_feature 1..3884: note = cDNA of KCNH2 gene SNP c.1010C>G (p.Thr337Ser)
atgccggtgcggaggggccacgtcgcgccgcagaacaccttcctggacaccatcatccgcaagtttgagggccagagccgtaagttcatcatcgccaacgctcgggtggagaactgcgccgtcatctactgcaacgacggcttctgcgagctgtgcggctactcgcgggccgaggtgatgcagcgaccctgcacctgcgacttcctgcacgggccgcgcacgcagcgccgcgctgccgcgcagatcgcgcaggcactgctgggcgccgaggagcgcaaagtggaaatcgccttctaccggaaagatgggagctgcttcctatgtctggtggatgtggtgcccgtgaagaacgaggatggggctgtcatcatgttcatcctcaatttcgaggtggtgatggagaaggacatggtggggtccccggctcatgacaccaaccaccggggcccccccaccagctggctggccccaggccgcgccaagaccttccgcctgaagctgcccgcgctgctggcgctgacggcccgggagtcgtcggtgcggtcgggcggcgcgggcggcgcgggcgccccgggggccgtggtggtggacgtggacctgacgcccgcggcacccagcagcgagtcgctggccctggacgaagtgacagccatggacaaccacgtggcagggctcgggcccgcggaggagcggcgtgcgctggtgggtcccggctctccgccccgcagcgcgcccggccagctcccatcgccccgggcgcacagcctcaaccccgacgcctcgggctccagctgcagcctggcccggacgcgctcccgagaaagctgcgccagcgtgcgccgcgcctcgtcggccgacgacatcgaggccatgcgcgccggggtgctgcccccgccaccgcgccacgccagcaccggggccatgcacccactgcgcagcggcttgctcaactccacctcggactccgacctcgtgcgctaccgcaccattagcaagattccccaaatcagcctcaactttgtggacctcaagggcgaccccttcttggcttcgcccaccagtgaccgtgagatcatagcacctaagataaaggagcgaacccacaatgtcactgagaaggtcacccaggtcctgtccctgggcgccgacgtgctgcctgagtacaagctgcaggcaccgcgcatccaccgctggaccatcctgcattacagccccttcaaggccgtgtgggactggctcatcctgctgctggtcatctacacggctgtcttcacaccctactcggctgccttcctgctgaaggagacggaagaaggcccgcctgctaccgagtgtggctacgcctgccagccgctggctgtggtggacctcatcgtggacatcatgttcattgtggacatcctcatcaacttccgcaccacctacgtcaatgccaacgaggaggtggtcagccaccccggccgcatcgccgtccactacttcaagggctggttcctcatcgacatggtggccgccatccccttcgacctgctcatcttcggctctggctctgaggagctgatcgggctgctgaagactgcgcggctgctgcggctggtgcgcgtggcgcggaagctggatcgctactcagagtacggcgcggccgtgctgttcttgctcatgtgcacctttgcgctcatcgcgcactggctagcctgcatctggtacgccatcggcaacatggagcagccacacatggactcacgcatcggctggctgcacaacctgggcgaccagataggcaaaccctacaacagcagcggcctgggcggcccctccatcaaggacaagtatgtgacggcgctctacttcaccttcagcagcctcaccagtgtgggcttcggcaacgtctctcccaacaccaactcagagaagatcttctccatctgcgtcatgctcattggctccctcatgtatgctagcatcttcggcaacgtgtcggccatcatccagcggctgtactcgggcacagcccgctaccacacacagatgctgcgggtgcgggagttcatccgcttccaccagatccccaatcccctgcgccagcgcctcgaggagtacttccagcacgcctggtcctacaccaacggcatcgacatgaacgcggtgctgaagggcttccctgagtgcctgcaggctgacatctgcctgcacctgaaccgctcactgctgcagcactgcaaacccttccgaggggccaccaagggctgccttcgggccctggccatgaagttcaagaccacacatgcaccgccaggggacacactggtgcatgctggggacctgctcaccgccctgtacttcatctcccggggctccatcgagatcctgcggggcgacgtcgtcgtggccatcctggggaagaatgacatctttggggagcctctgaacctgtatgcaaggcctggcaagtcgaacggggatgtgcgggccctcacctactgtgacctacacaagatccatcgggacgacctgctggaggtgctggacatgtaccctgagttctccgaccacttctggtccagcctggagatcaccttcaacctgcgagataccaacatgatcccgggctcccccggcagtacggagttagagggtggcttcagtcggcaacgcaagcgcaagttgtccttccgcaggcgcacggacaaggacacggagcagccaggggaggtgtcggccttggggccgggccgggcgggggcagggccgagtagccggggccggccgggggggccgtggggggagagcccgtccagtggcccctccagccctgagagcagtgaggatgagggcccaggccgcagctccagccccctccgcctggtgcccttctccagccccaggccccccggagagccgccgggtggggagcccctgatggaggactgcgagaagagcagcgacacttgcaaccccctgtcaggcgccttctcaggagtgtccaacattttcagcttctggggggacagtcggggccgccagtaccaggagctccctcgatgccccgcccccacccccagcctcctcaacatccccctctccagcccgggtcggcggccccggggcgacgtggagagcaggctggatgccctccagcgccagctcaacaggctggagacccggctgagtgcagacatggccactgtcctgcagctgctacagaggcagatgacgctggtcccgcccgcctacagtgctgtgaccaccccggggcctggccccacttccacatccccgctgttgcccgtcagccccctccccaccctcaccttggactcgctttctcaggtttcccagttcatggcgtgtgaggagctgcccccgggggccccagagcttccccaagaaggccccacacgacgcctctccctaccgggccagctgggggccctcacctcccagcccctgcacagacacggctcggacccgggcagttagtggggctgcccagtgtggacacgtggctcacccagggatcaaggcgctgctgggccgctccccttggaggccctgctcaggaggccctgaccgtggaaggggagaggaactcgaaagcacagctcctcccccagcccttgggaccatcttctcctgcagtcccctgggccccagtgagaggggcaggggcagggccggcagtaggtggggcctgtggtccccccactgccctgagggcattagctggtctaactgcccggaggcacccggccctgggccttaggcacctcaaggacttttctgctatttactgctcttattgttaaggataataattaaggatcatatgaataattaatgaagatgctgatgactatgaataataaataattatcctgaggaga

SEQ ID NO: 6 - DNA, 3884 bp, Homo sapiens
  source 1..3884: mol_type = genomic DNA
  misc_feature 1..3884: note = cDNA of KCNH2 gene SNP c.1017C>G (p.Asn339Lys)
atgccggtgcggaggggccacgtcgcgccgcagaacaccttcctggacaccatcatccgcaagtttgagggccagagccgtaagttcatcatcgccaacgctcgggtggagaactgcgccgtcatctactgcaacgacggcttctgcgagctgtgcggctactcgcgggccgaggtgatgcagcgaccctgcacctgcgacttcctgcacgggccgcgcacgcagcgccgcgctgccgcgcagatcgcgcaggcactgctgggcgccgaggagcgcaaagtggaaatcgccttctaccggaaagatgggagctgcttcctatgtctggtggatgtggtgcccgtgaagaacgaggatggggctgtcatcatgttcatcctcaatttcgaggtggtgatggagaaggacatggtggggtccccggctcatgacaccaaccaccggggcccccccaccagctggctggccccaggccgcgccaagaccttccgcctgaagctgcccgcgctgctggcgctgacggcccgggagtcgtcggtgcggtcgggcggcgcgggcggcgcgggcgccccgggggccgtggtggtggacgtggacctgacgcccgcggcacccagcagcgagtcgctggccctggacgaagtgacagccatggacaaccacgtggcagggctcgggcccgcggaggagcggcgtgcgctggtgggtcccggctctccgccccgcagcgcgcccggccagctcccatcgccccgggcgcacagcctcaaccccgacgcctcgggctccagctgcagcctggcccggacgcgctcccgagaaagctgcgccagcgtgcgccgcgcctcgtcggccgacgacatcgaggccatgcgcgccggggtgctgcccccgccaccgcgccacgccagcaccggggccatgcacccactgcgcagcggcttgctcaactccacctcggactccgacctcgtgcgctaccgcaccattagcaagattccccaaatcaccctcaagtttgtggacctcaagggcgaccccttcttggcttcgcccaccagtgaccgtgagatcatagcacctaagataaaggagcgaacccacaatgtcactgagaaggtcacccaggtcctgtccctgggcgccgacgtgctgcctgagtacaagctgcaggcaccgcgcatccaccgctggaccatcctgcattacagccccttcaaggccgtgtgggactggctcatcctgctgctggtcatctacacggctgtcttcacaccctactcggctgccttcctgctgaaggagacggaagaaggcccgcctgctaccgagtgtggctacgcctgccagccgctggctgtggtggacctcatcgtggacatcatgttcattgtggacatcctcatcaacttccgcaccacctacgtcaatgccaacgaggaggtggtcagccaccccggccgcatcgccgtccactacttcaagggctggttcctcatcgacatggtggccgccatccccttcgacctgctcatcttcggctctggctctgaggagctgatcgggctgctgaagactgcgcggctgctgcggctggtgcgcgtggcgcggaagctggatcgctactcagagtacggcgcggccgtgctgttcttgctcatgtgcacctttgcgctcatcgcgcactggctagcctgcatctggtacgccatcggcaacatggagcagccacacatggactcacgcatcggctggctgcacaacctgggcgaccagataggcaaaccctacaacagcagcggcctgggcggcccctccatcaaggacaagtatgtgacggcgctctacttcaccttcagcagcctcaccagtgtgggcttcggcaacgtctctcccaacaccaactcagagaagatcttctccatctgcgtcatgctcattggctccctcatgtatgctagcatcttcggcaacgtgtcggccatcatccagcggctgtactcgggcacagcccgctaccacacacagatgctgcgggtgcgggagttcatccgcttccaccagatccccaatcccctgcgccagcgcctcgaggagtacttccagcacgcctggtcctacaccaacggcatcgacatgaacgcggtgctgaagggcttccctgagtgcctgcaggctgacatctgcctgcacctgaaccgctcactgctgcagcactgcaaacccttccgaggggccaccaagggctgccttcgggccctggccatgaagttcaagaccacacatgcaccgccaggggacacactggtgcatgctggggacctgctcaccgccctgtacttcatctcccggggctccatcgagatcctgcggggcgacgtcgtcgtggccatcctggggaagaatgacatctttggggagcctctgaacctgtatgcaaggcctggcaagtcgaacggggatgtgcgggccctcacctactgtgacctacacaagatccatcgggacgacctgctggaggtgctggacatgtaccctgagttctccgaccacttctggtccagcctggagatcaccttcaacctgcgagataccaacatgatcccgggctcccccggcagtacggagttagagggtggcttcagtcggcaacgcaagcgcaagttgtccttccgcaggcgcacggacaaggacacggagcagccaggggaggtgtcggccttggggccgggccgggcgggggcagggccgagtagccggggccggccgggggggccgtggggggagagcccgtccagtggcccctccagccctgagagcagtgaggatgagggcccaggccgcagctccagccccctccgcctggtgcccttctccagccccaggccccccggagagccgccgggtggggagcccctgatggaggactgcgagaagagcagcgacacttgcaaccccctgtcaggcgccttctcaggagtgtccaacattttcagcttctggggggacagtcggggccgccagtaccaggagctccctcgatgccccgcccccacccccagcctcctcaacatccccctctccagcccgggtcggcggccccggggcgacgtggagagcaggctggatgccctccagcgccagctcaacaggctggagacccggctgagtgcagacatggccactgtcctgcagctgctacagaggcagatgacgctggtcccgcccgcctacagtgctgtgaccaccccggggcctggccccacttccacatccccgctgttgcccgtcagccccctccccaccctcaccttggactcgctttctcaggtttcccagttcatggcgtgtgaggagctgcccccgggggccccagagcttccccaagaaggccccacacgacgcctctccctaccgggccagctgggggccctcacctcccagcccctgcacagacacggctcggacccgggcagttagtggggctgcccagtgtggacacgtggctcacccagggatcaaggcgctgctgggccgctccccttggaggccctgctcaggaggccctgaccgtggaaggggagaggaactcgaaagcacagctcctcccccagcccttgggaccatcttctcctgcagtcccctgggccccagtgagaggggcaggggcagggccggcagtaggtggggcctgtggtccccccactgccctgagggcattagctggtctaactgcccggaggcacccggccctgggccttaggcacctcaaggacttttctgctatttactgctcttattgttaaggataataattaaggatcatatgaataattaatgaagatgctgatgactatgaataataaataattatcctgaggaga

SEQ ID NO: 7 - DNA, 3884 bp, Homo sapiens
  source 1..3884: mol_type = genomic DNA
  misc_feature 1..3884: note = cDNA of KCNH2 gene SNP c.1025A>T (p.Asp342Val)
atgccggtgcggaggggccacgtcgcgccgcagaacaccttcctggacaccatcatccgcaagtttgagggccagagccgtaagttcatcatcgccaacgctcgggtggagaactgcgccgtcatctactgcaacgacggcttctgcgagctgtgcggctactcgcgggccgaggtgatgcagcgaccctgcacctgcgacttcctgcacgggccgcgcacgcagcgccgcgctgccgcgcagatcgcgcaggcactgctgggcgccgaggagcgcaaagtggaaatcgccttctaccggaaagatgggagctgcttcctatgtctggtggatgtggtgcccgtgaagaacgaggatggggctgtcatcatgttcatcctcaatttcgaggtggtgatggagaaggacatggtggggtccccggctcatgacaccaaccaccggggcccccccaccagctggctggccccaggccgcgccaagaccttccgcctgaagctgcccgcgctgctggcgctgacggcccgggagtcgtcggtgcggtcgggcggcgcgggcggcgcgggcgccccgggggccgtggtggtggacgtggacctgacgcccgcggcacccagcagcgagtcgctggccctggacgaagtgacagccatggacaaccacgtggcagggctcgggcccgcggaggagcggcgtgcgctggtgggtcccggctctccgccccgcagcgcgcccggccagctcccatcgccccgggcgcacagcctcaaccccgacgcctcgggctccagctgcagcctggcccggacgcgctcccgagaaagctgcgccagcgtgcgccgcgcctcgtcggccgacgacatcgaggccatgcgcgccggggtgctgcccccgccaccgcgccacgccagcaccggggccatgcacccactgcgcagcggcttgctcaactccacctcggactccgacctcgtgcgctaccgcaccattagcaagattccccaaatcaccctcaactttgtggtcctcaagggcgaccccttcttggcttcgcccaccagtgaccgtgagatcatagcacctaagataaaggagcgaacccacaatgtcactgagaaggtcacccaggtcctgtccctgggcgccgacgtgctgcctgagtacaagctgcaggcaccgcgcatccaccgctggaccatcctgcattacagccccttcaaggccgtgtgggactggctcatcctgctgctggtcatctacacggctgtcttcacaccctactcggctgccttcctgctgaaggagacggaagaaggcccgcctgctaccgagtgtggctacgcctgccagccgctggctgtggtggacctcatcgtggacatcatgttcattgtggacatcctcatcaacttccgcaccacctacgtcaatgccaacgaggaggtggtcagccaccccggccgcatcgccgtccactacttcaagggctggttcctcatcgacatggtggccgccatccccttcgacctgctcatcttcggctctggctctgaggagctgatcgggctgctgaagactgcgcggctgctgcggctggtgcgcgtggcgcggaagctggatcgctactcagagtacggcgcggccgtgctgttcttgctcatgtgcacctttgcgctcatcgcgcactggctagcctgcatctggtacgccatcggcaacatggagcagccacacatggactcacgcatcggctggctgcacaacctgggcgaccagataggcaaaccctacaacagcagcggcctgggcggcccctccatcaaggacaagtatgtgacggcgctctacttcaccttcagcagcctcaccagtgtgggcttcggcaacgtctctcccaacaccaactcagagaagatcttctccatctgcgtcatgctcattggctccctcatgtatgctagcatcttcggcaacgtgtcggccatcatccagcggctgtactcgggcacagcccgctaccacacacagatgctgcgggtgcgggagttcatccgcttccaccagatccccaatcccctgcgccagcgcctcgaggagtacttccagcacgcctggtcctacaccaacggcatcgacatgaacgcggtgctgaagggcttccctgagtgcctgcaggctgacatctgcctgcacctgaaccgctcactgctgcagcactgcaaacccttccgaggggccaccaagggctgccttcgggccctggccatgaagttcaagaccacacatgcaccgccaggggacacactggtgcatgctggggacctgctcaccgccctgtacttcatctcccggggctccatcgagatcctgcggggcgacgtcgtcgtggccatcctggggaagaatgacatctttggggagcctctgaacctgtatgcaaggcctggcaagtcgaacggggatgtgcgggccctcacctactgtgacctacacaagatccatcgggacgacctgctggaggtgctggacatgtaccctgagttctccgaccacttctggtccagcctggagatcaccttcaacctgcgagataccaacatgatcccgggctcccccggcagtacggagttagagggtggcttcagtcggcaacgcaagcgcaagttgtccttccgcaggcgcacggacaaggacacggagcagccaggggaggtgtcggccttggggccgggccgggcgggggcagggccgagtagccggggccggccgggggggccgtggggggagagcccgtccagtggcccctccagccctgagagcagtgaggatgagggcccaggccgcagctccagccccctccgcctggtgcccttctccagccccaggccccccggagagccgccgggtggggagcccctgatggaggactgcgagaagagcagcgacacttgcaaccccctgtcaggcgccttctcaggagtgtccaacattttcagcttctggggggacagtcggggccgccagtaccaggagctccctcgatgccccgcccccacccccagcctcctcaacatccccctctccagcccgggtcggcggccccggggcgacgtggagagcaggctggatgccctccagcgccagctcaacaggctggagacccggctgagtgcagacatggccactgtcctgcagctgctacagaggcagatgacgctggtcccgcccgcctacagtgctgtgaccaccccggggcctggccccacttccacatccccgctgttgcccgtcagccccctccccaccctcaccttggactcgctttctcaggtttcccagttcatggcgtgtgaggagctgcccccgggggccccagagcttccccaagaaggccccacacgacgcctctccctaccgggccagctgggggccctcacctcccagcccctgcacagacacggctcggacccgggcagttagtggggctgcccagtgtggacacgtggctcacccagggatcaaggcgctgctgggccgctccccttggaggccctgctcaggaggccctgaccgtggaaggggagaggaactcgaaagcacagctcctcccccagcccttgggaccatcttctcctgcagtcccctgggccccagtgagaggggcaggggcagggccggcagtaggtggggcctgtggtccccccactgccctgagggcattagctggtctaactgcccggaggcacccggccctgggccttaggcacctcaaggacttttctgctatttactgctcttattgttaaggataataattaaggatcatatgaataattaatgaagatgctgatgactatgaataataaataattatcctgaggaga

SEQ ID NO: 8 - DNA, 3884 bp, Homo sapiens
  source 1..3884: mol_type = genomic DNA
  misc_feature 1..3884: note = cDNA of KCNH2 gene SNP c.1036G>A (p.Asp346Asn)
atgccggtgcggaggggccacgtcgcgccgcagaacaccttcctggacaccatcatccgcaagtttgagggccagagccgtaagttcatcatcgccaacgctcgggtggagaactgcgccgtcatctactgcaacgacggcttctgcgagctgtgcggctactcgcgggccgaggtgatgcagcgaccctgcacctgcgacttcctgcacgggccgcgcacgcagcgccgcgctgccgcgcagatcgcgcaggcactgctgggcgccgaggagcgcaaagtggaaatcgccttctaccggaaagatgggagctgcttcctatgtctggtggatgtggtgcccgtgaagaacgaggatggggctgtcatcatgttcatcctcaatttcgaggtggtgatggagaaggacatggtggggtccccggctcatgacaccaaccaccggggcccccccaccagctggctggccccaggccgcgccaagaccttccgcctgaagctgcccgcgctgctggcgctgacggcccgggagtcgtcggtgcggtcgggcggcgcgggcggcgcgggcgccccgggggccgtggtggtggacgtggacctgacgcccgcggcacccagcagcgagtcgctggccctggacgaagtgacagccatggacaaccacgtggcagggctcgggcccgcggaggagcggcgtgcgctggtgggtcccggctctccgccccgcagcgcgcccggccagctcccatcgccccgggcgcacagcctcaaccccgacgcctcgggctccagctgcagcctggcccggacgcgctcccgagaaagctgcgccagcgtgcgccgcgcctcgtcggccgacgacatcgaggccatgcgcgccggggtgctgcccccgccaccgcgccacgccagcaccggggccatgcacccactgcgcagcggcttgctcaactccacctcggactccgacctcgtgcgctaccgcaccattagcaagattccccaaatcaccctcaactttgtggacctcaagggcaaccccttcttggcttcgcccaccagtgaccgtgagatcatagcacctaagataaaggagcgaacccacaatgtcactgagaaggtcacccaggtcctgtccctgggcgccgacgtgctgcctgagtacaagctgcaggcaccgcgcatccaccgctggaccatcctgcattacagccccttcaaggccgtgtgggactggctcatcctgctgctggtcatctacacggctgtcttcacaccctactcggctgccttcctgctgaaggagacggaagaaggcccgcctgctaccgagtgtggctacgcctgccagccgctggctgtggtggacctcatcgtggacatcatgttcattgtggacatcctcatcaacttccgcaccacctacgtcaatgccaacgaggaggtggtcagccaccccggccgcatcgccgtccactacttcaagggctggttcctcatcgacatggtggccgccatccccttcgacctgctcatcttcggctctggctctgaggagctgatcgggctgctgaagactgcgcggctgctgcggctggtgcgcgtggcgcggaagctggatcgctactcagagtacggcgcggccgtgctgttcttgctcatgtgcacctttgcgctcatcgcgcactggctagcctgcatctggtacgccatcggcaacatggagcagccacacatggactcacgcatcggctggctgcacaacctgggcgaccagataggcaaaccctacaacagcagcggcctgggcggcccctccatcaaggacaagtatgtgacggcgctctacttcaccttcagcagcctcaccagtgtgggcttcggcaacgtctctcccaacaccaactcagagaagatcttctccatctgcgtcatgctcattggctccctcatgtatgctagcatcttcggcaacgtgtcggccatcatccagcggctgtactcgggcacagcccgctaccacacacagatgctgcgggtgcgggagttcatccgcttccaccagatccccaatcccctgcgccagcgcctcgaggagtacttccagcacgcctggtcctacaccaacggcatcgacatgaacgcggtgctgaagggcttccctgagtgcctgcaggctgacatctgcctgcacctgaaccgctcactgctgcagcactgcaaacccttccgaggggccaccaagggctgccttcgggccctggccatgaagttcaagaccacacatgcaccgccaggggacacactggtgcatgctggggacctgctcaccgccctgtacttcatctcccggggctccatcgagatcctgcggggcgacgtcgtcgtggccatcctggggaagaatgacatctttggggagcctctgaacctgtatgcaaggcctggcaagtcgaacggggatgtgcgggccctcacctactgtgacctacacaagatccatcgggacgacctgctggaggtgctggacatgtaccctgagttctccgaccacttctggtccagcctggagatcaccttcaacctgcgagataccaacatgatcccgggctcccccggcagtacggagttagagggtggcttcagtcggcaacgcaagcgcaagttgtccttccgcaggcgcacggacaaggacacggagcagccaggggaggtgtcggccttggggccgggccgggcgggggcagggccgagtagccggggccggccgggggggccgtggggggagagcccgtccagtggcccctccagccctgagagcagtgaggatgagggcccaggccgcagctccagccccctccgcctggtgcccttctccagccccaggccccccggagagccgccgggtggggagcccctgatggaggactgcgagaagagcagcgacacttgcaaccccctgtcaggcgccttctcaggagtgtccaacattttcagcttctggggggacagtcggggccgccagtaccaggagctccctcgatgccccgcccccacccccagcctcctcaacatccccctctccagcccgggtcggcggccccggggcgacgtggagagcaggctggatgccctccagcgccagctcaacaggctggagacccggctgagtgcagacatggccactgtcctgcagctgctacagaggcagatgacgctggtcccgcccgcctacagtgctgtgaccaccccggggcctggccccacttccacatccccgctgttgcccgtcagccccctccccaccctcaccttggactcgctttctcaggtttcccagttcatggcgtgtgaggagctgcccccgggggccccagagcttccccaagaaggccccacacgacgcctctccctaccgggccagctgggggccctcacctcccagcccctgcacagacacggctcggacccgggcagttagtggggctgcccagtgtggacacgtggctcacccagggatcaaggcgctgctgggccgctccccttggaggccctgctcaggaggccctgaccgtggaaggggagaggaactcgaaagcacagctcctcccccagcccttgggaccatcttctcctgcagtcccctgggccccagtgagaggggcaggggcagggccggcagtaggtggggcctgtggtccccccactgccctgagggcattagctggtctaactgcccggaggcacccggccctgggccttaggcacctcaaggacttttctgctatttactgctcttattgttaaggataataattaaggatcatatgaataattaatgaagatgctgatgactatgaataataaataattatcctgaggaga

SEQ ID NO: 9 - DNA, 3884 bp, Homo sapiens
  source 1..3884: mol_type = genomic DNA
  misc_feature 1..3884: note = cDNA of KCNH2 gene SNP c.1039C>T (p.Pro347Ser)
atgccggtgcggaggggccacgtcgcgccgcagaacaccttcctggacaccatcatccgcaagtttgagggccagagccgtaagttcatcatcgccaacgctcgggtggagaactgcgccgtcatctactgcaacgacggcttctgcgagctgtgcggctactcgcgggccgaggtgatgcagcgaccctgcacctgcgacttcctgcacgggccgcgcacgcagcgccgcgctgccgcgcagatcgcgcaggcactgctgggcgccgaggagcgcaaagtggaaatcgccttctaccggaaagatgggagctgcttcctatgtctggtggatgtggtgcccgtgaagaacgaggatggggctgtcatcatgttcatcctcaatttcgaggtggtgatggagaaggacatggtggggtccccggctcatgacaccaaccaccggggcccccccaccagctggctggccccaggccgcgccaagaccttccgcctgaagctgcccgcgctgctggcgctgacggcccgggagtcgtcggtgcggtcgggcggcgcgggcggcgcgggcgccccgggggccgtggtggtggacgtggacctgacgcccgcggcacccagcagcgagtcgctggccctggacgaagtgacagccatggacaaccacgtggcagggctcgggcccgcggaggagcggcgtgcgctggtgggtcccggctctccgccccgcagcgcgcccggccagctcccatcgccccgggcgcacagcctcaaccccgacgcctcgggctccagctgcagcctggcccggacgcgctcccgagaaagctgcgccagcgtgcgccgcgcctcgtcggccgacgacatcgaggccatgcgcgccggggtgctgcccccgccaccgcgccacgccagcaccggggccatgcacccactgcgcagcggcttgctcaactccacctcggactccgacctcgtgcgctaccgcaccattagcaagattccccaaatcaccctcaactttgtggacctcaagggcgactccttcttggcttcgcccaccagtgaccgtgagatcatagcacctaagataaaggagcgaacccacaatgtcactgagaaggtcacccaggtcctgtccctgggcgccgacgtgctgcctgagtacaagctgcaggcaccgcgcatccaccgctggaccatcctgcattacagccccttcaaggccgtgtgggactggctcatcctgctgctggtcatctacacggctgtcttcacaccctactcggctgccttcctgctgaaggagacggaagaaggcccgcctgctaccgagtgtggctacgcctgccagccgctggctgtggtggacctcatcgtggacatcatgttcattgtggacatcctcatcaacttccgcaccacctacgtcaatgccaacgaggaggtggtcagccaccccggccgcatcgccgtccactacttcaagggctggttcctcatcgacatggtggccgccatccccttcgacctgctcatcttcggctctggctctgaggagctgatcgggctgctgaagactgcgcggctgctgcggctggtgcgcgtggcgcggaagctggatcgctactcagagtacggcgcggccgtgctgttcttgctcatgtgcacctttgcgctcatcgcgcactggctagcctgcatctggtacgccatcggcaacatggagcagccacacatggactcacgcatcggctggctgcacaacctgggcgaccagataggcaaaccctacaacagcagcggcctgggcggcccctccatcaaggacaagtatgtgacggcgctctacttcaccttcagcagcctcaccagtgtgggcttcggcaacgtctctcccaacaccaactcagagaagatcttctccatctgcgtcatgctcattggctccctcatgtatgctagcatcttcggcaacgtgtcggccatcatccagcggctgtactcgggcacagcccgctaccacacacagatgctgcgggtgcgggagttcatccgcttccaccagatccccaatcccctgcgccagcgcctcgaggagtacttccagcacgcctggtcctacaccaacggcatcgacatgaacgcggtgctgaagggcttccctgagtgcctgcaggctgacatctgcctgcacctgaaccgctcactgctgcagcactgcaaacccttccgaggggccaccaagggctgccttcgggccctggccatgaagttcaagaccacacatgcaccgccaggggacacactggtgcatgctggggacctgctcaccgccctgtacttcatctcccggggctccatcgagatcctgcggggcgacgtcgtcgtggccatcctggggaagaatgacatctttggggagcctctgaacctgtatgcaaggcctggcaagtcgaacggggatgtgcgggccctcacctactgtgacctacacaagatccatcgggacgacctgctggaggtgctggacatgtaccctgagttctccgaccacttctggtccagcctggagatcaccttcaacctgcgagataccaacatgatcccgggctcccccggcagtacggagttagagggtggcttcagtcggcaacgcaagcgcaagttgtccttccgcaggcgcacggacaaggacacggagcagccaggggaggtgtcggccttggggccgggccgggcgggggcagggccgagtagccggggccggccgggggggccgtggggggagagcccgtccagtggcccctccagccctgagagcagtgaggatgagggcccaggccgcagctccagccccctccgcctggtgcccttctccagccccaggccccccggagagccgccgggtggggagcccctgatggaggactgcgagaagagcagcgacacttgcaaccccctgtcaggcgccttctcaggagtgtccaacattttcagcttctggggggacagtcggggccgccagtaccaggagctccctcgatgccccgcccccacccccagcctcctcaacatccccctctccagcccgggtcggcggccccggggcgacgtggagagcaggctggatgccctccagcgccagctcaacaggctggagacccggctgagtgcagacatggccactgtcctgcagctgctacagaggcagatgacgctggtcccgcccgcctacagtgctgtgaccaccccggggcctggccccacttccacatccccgctgttgcccgtcagccccctccccaccctcaccttggactcgctttctcaggtttcccagttcatggcgtgtgaggagctgcccccgggggccccagagcttccccaagaaggccccacacgacgcctctccctaccgggccagctgggggccctcacctcccagcccctgcacagacacggctcggacccgggcagttagtggggctgcccagtgtggacacgtggctcacccagggatcaaggcgctgctgggccgctccccttggaggccctgctcaggaggccctgaccgtggaaggggagaggaactcgaaagcacagctcctcccccagcccttgggaccatcttctcctgcagtcccctgggccccagtgagaggggcaggggcagggccggcagtaggtggggcctgtggtccccccactgccctgagggcattagctggtctaactgcccggaggcacccggccctgggccttaggcacctcaaggacttttctgctatttactgctcttattgttaaggataataattaaggatcatatgaataattaatgaagatgctgatgactatgaataataaataattatcctgaggaga

SEQ ID NO: 10 - DNA, 3884 bp, Homo sapiens
  source 1..3884: mol_type = genomic DNA
  misc_feature 1..3884: note = cDNA of KCNH2 gene SNP c.1043T>A (p.Phe348Tyr)
atgccggtgcggaggggccacgtcgcgccgcagaacaccttcctggacaccatcatccgcaagtttgagggccagagccgtaagttcatcatcgccaacgctcgggtggagaactgcgccgtcatctactgcaacgacggcttctgcgagctgtgcggctactcgcgggccgaggtgatgcagcgaccctgcacctgcgacttcctgcacgggccgcgcacgcagcgccgcgctgccgcgcagatcgcgcaggcactgctgggcgccgaggagcgcaaagtggaaatcgccttctaccggaaagatgggagctgcttcctatgtctggtggatgtggtgcccgtgaagaacgaggatggggctgtcatcatgttcatcctcaatttcgaggtggtgatggagaaggacatggtggggtccccggctcatgacaccaaccaccggggcccccccaccagctggctggccccaggccgcgccaagaccttccgcctgaagctgcccgcgctgctggcgctgacggcccgggagtcgtcggtgcggtcgggcggcgcgggcggcgcgggcgccccgggggccgtggtggtggacgtggacctgacgcccgcggcacccagcagcgagtcgctggccctggacgaagtgacagccatggacaaccacgtggcagggctcgggcccgcggaggagcggcgtgcgctggtgggtcccggctctccgccccgcagcgcgcccggccagctcccatcgccccgggcgcacagcctcaaccccgacgcctcgggctccagctgcagcctggcccggacgcgctcccgagaaagctgcgccagcgtgcgccgcgcctcgtcggccgacgacatcgaggccatgcgcgccggggtgctgcccccgccaccgcgccacgccagcaccggggccatgcacccactgcgcagcggcttgctcaactccacctcggactccgacctcgtgcgctaccgcaccattagcaagattccccaaatcaccctcaactttgtggacctcaagggcgacccctacttggcttcgcccaccagtgaccgtgagatcatagcacctaagataaaggagcgaacccacaatgtcactgagaaggtcacccaggtcctgtccctgggcgccgacgtgctgcctgagtacaagctgcaggcaccgcgcatccaccgctggaccatcctgcattacagccccttcaaggccgtgtgggactggctcatcctgctgctggtcatctacacggctgtcttcacaccctactcggctgccttcctgctgaaggagacggaagaaggcccgcctgctaccgagtgtggctacgcctgccagccgctggctgtggtggacctcatcgtggacatcatgttcattgtggacatcctcatcaacttccgcaccacctacgtcaatgccaacgaggaggtggtcagccaccccggccgcatcgccgtccactacttcaagggctggttcctcatcgacatggtggccgccatccccttcgacctgctcatcttcggctctggctctgaggagctgatcgggctgctgaagactgcgcggctgctgcggctggtgcgcgtggcgcggaagctggatcgctactcagagtacggcgcggccgtgctgttcttgctcatgtgcacctttgcgctcatcgcgcactggctagcctgcatctggtacgccatcggcaacatggagcagccacacatggactcacgcatcggctggctgcacaacctgggcgaccagataggcaaaccctacaacagcagcggcctgggcggcccctccatcaaggacaagtatgtgacggcgctctacttcaccttcagcagcctcaccagtgtgggcttcggcaacgtctctcccaacaccaactcagagaagatcttctccatctgcgtcatgctcattggctccctcatgtatgctagcatcttcggcaacgtgtcggccatcatccagcggctgtactcgggcacagcccgctaccacacacagatgctgcgggtgcgggagttcatccgcttccaccagatccccaatcccctgcgccagcgcctcgaggagtacttccagcacgcctggtcctacaccaacggcatcgacatgaacgcggtgctgaagggcttccctgagtgcctgcaggctgacatctgcctgcacctgaaccgctcactgctgcagcactgcaaacccttccgaggggccaccaagggctgccttcgggccctggccatgaagttcaagaccacacatgcaccgccaggggacacactggtgcatgctggggacctgctcaccgccctgtacttcatctcccggggctccatcgagatcctgcggggcgacgtcgtcgtggccatcctggggaagaatgacatctttggggagcctctgaacctgtatgcaaggcctggcaagtcgaacggggatgtgcgggccctcacctactgtgacctacacaagatccatcgggacgacctgctggaggtgctggacatgtaccctgagttctccgaccacttctggtccagcctggagatcaccttcaacctgcgagataccaacatgatcccgggctcccccggcagtacggagttagagggtggcttcagtcggcaacgcaagcgcaagttgtccttccgcaggcgcacggacaaggacacggagcagccaggggaggtgtcggccttggggccgggccgggcgggggcagggccgagtagccggggccggccgggggggccgtggggggagagcccgtccagtggcccctccagccctgagagcagtgaggatgagggcccaggccgcagctccagccccctccgcctggtgcccttctccagccccaggccccccggagagccgccgggtggggagcccctgatggaggactgcgagaagagcagcgacacttgcaaccccctgtcaggcgccttctcaggagtgtccaacattttcagcttctggggggacagtcggggccgccagtaccaggagctccctcgatgccccgcccccacccccagcctcctcaacatccccctctccagcccgggtcggcggccccggggcgacgtggagagcaggctggatgccctccagcgccagctcaacaggctggagacccggctgagtgcagacatggccactgtcctgcagctgctacagaggcagatgacgctggtcccgcccgcctacagtgctgtgaccaccccggggcctggccccacttccacatccccgctgttgcccgtcagccccctccccaccctcaccttggactcgctttctcaggtttcccagttcatggcgtgtgaggagctgcccccgggggccccagagcttccccaagaaggccccacacgacgcctctccctaccgggccagctgggggccctcacctcccagcccctgcacagacacggctcggacccgggcagttagtggggctgcccagtgtggacacgtggctcacccagggatcaaggcgctgctgggccgctccccttggaggccctgctcaggaggccctgaccgtggaaggggagaggaactcgaaagcacagctcctcccccagcccttgggaccatcttctcctgcagtcccctgggccccagtgagaggggcaggggcagggccggcagtaggtggggcctgtggtccccccactgccctgagggcattagctggtctaactgcccggaggcacccggccctgggccttaggcacctcaaggacttttctgctatttactgctcttattgttaaggataataattaaggatcatatgaataattaatgaagatgctgatgactatgaataataaataattatcctgaggaga

SEQ ID NO: 11 - DNA, 3884 bp, Homo sapiens
  source 1..3884: mol_type = genomic DNA
  misc_feature 1..3884: note = cDNA of KCNH2 gene SNP c.1052C>T (p.Ser351Leu)
atgccggtgcggaggggccacgtcgcgccgcagaacaccttcctggacaccatcatccgcaagtttgagggccagagccgtaagttcatcatcgccaacgctcgggtggagaactgcgccgtcatctactgcaacgacggcttctgcgagctgtgcggctactcgcgggccgaggtgatgcagcgaccctgcacctgcgacttcctgcacgggccgcgcacgcagcgccgcgctgccgcgcagatcgcgcaggcactgctgggcgccgaggagcgcaaagtggaaatcgccttctaccggaaagatgggagctgcttcctatgtctggtggatgtggtgcccgtgaagaacgaggatggggctgtcatcatgttcatcctcaatttcgaggtggtgatggagaaggacatggtggggtccccggctcatgacaccaaccaccggggcccccccaccagctggctggccccaggccgcgccaagaccttccgcctgaagctgcccgcgctgctggcgctgacggcccgggagtcgtcggtgcggtcgggcggcgcgggcggcgcgggcgccccgggggccgtggtggtggacgtggacctgacgcccgcggcacccagcagcgagtcgctggccctggacgaagtgacagccatggacaaccacgtggcagggctcgggcccgcggaggagcggcgtgcgctggtgggtcccggctctccgccccgcagcgcgcccggccagctcccatcgccccgggcgcacagcctcaaccccgacgcctcgggctccagctgcagcctggcccggacgcgctcccgagaaagctgcgccagcgtgcgccgcgcctcgtcggccgacgacatcgaggccatgcgcgccggggtgctgcccccgccaccgcgccacgccagcaccggggccatgcacccactgcgcagcggcttgctcaactccacctcggactccgacctcgtgcgctaccgcaccattagcaagattccccaaatcaccctcaactttgtggacctcaagggcgaccccttcttggctttgcccaccagtgaccgtgagatcatagcacctaagataaaggagcgaacccacaatgtcactgagaaggtcacccaggtcctgtccctgggcgccgacgtgctgcctgagtacaagctgcaggcaccgcgcatccaccgctggaccatcctgcattacagccccttcaaggccgtgtgggactggctcatcctgctgctggtcatctacacggctgtcttcacaccctactcggctgccttcctgctgaaggagacggaagaaggcccgcctgctaccgagtgtggctacgcctgccagccgctggctgtggtggacctcatcgtggacatcatgttcattgtggacatcctcatcaacttccgcaccacctacgtcaatgccaacgaggaggtggtcagccaccccggccgcatcgccgtccactacttcaagggctggttcctcatcgacatggtggccgccatccccttcgacctgctcatcttcggctctggctctgaggagctgatcgggctgctgaagactgcgcggctgctgcggctggtgcgcgtggcgcggaagctggatcgctactcagagtacggcgcggccgtgctgttcttgctcatgtgcacctttgcgctcatcgcgcactggctagcctgcatctggtacgccatcggcaacatggagcagccacacatggactcacgcatcggctggctgcacaacctgggcgaccagataggcaaaccctacaacagcagcggcctgggcggcccctccatcaaggacaagtatgtgacggcgctctacttcaccttcagcagcctcaccagtgtgggcttcggcaacgtctctcccaacaccaactcagagaagatcttctccatctgcgtcatgctcattggctccctcatgtatgctagcatcttcggcaacgtgtcggccatcatccagcggctgtactcgggcacagcccgctaccacacacagatgctgcgggtgcgggagttcatccgcttccaccagatccccaatcccctgcgccagcgcctcgaggagtacttccagcacgcctggtcctacaccaacggcatcgacatgaacgcggtgctgaagggcttccctgagtgcctgcaggctgacatctgcctgcacctgaaccgctcactgctgcagcactgcaaacccttccgaggggccaccaagggctgccttcgggccctggccatgaagttcaagaccacacatgcaccgccaggggacacactggtgcatgctggggacctgctcaccgccctgtacttcatctcccggggctccatcgagatcctgcggggcgacgtcgtcgtggccatcctggggaagaatgacatctttggggagcctctgaacctgtatgcaaggcctggcaagtcgaacggggatgtgcgggccctcacctactgtgacctacacaagatccatcgggacgacctgctggaggtgctggacatgtaccctgagttctccgaccacttctggtccagcctggagatcaccttcaacctgcgagataccaacatgatcccgggctcccccggcagtacggagttagagggtggcttcagtcggcaacgcaagcgcaagttgtccttccgcaggcgcacggacaaggacacggagcagccaggggaggtgtcggccttggggccgggccgggcgggggcagggccgagtagccggggccggccgggggggccgtggggggagagcccgtccagtggcccctccagccctgagagcagtgaggatgagggcccaggccgcagctccagccccctccgcctggtgcccttctccagccccaggccccccggagagccgccgggtggggagcccctgatggaggactgcgagaagagcagcgacacttgcaaccccctgtcaggcgccttctcaggagtgtccaacattttcagcttctggggggacagtcggggccgccagtaccaggagctccctcgatgccccgcccccacccccagcctcctcaacatccccctctccagcccgggtcggcggccccggggcgacgtggagagcaggctggatgccctccagcgccagctcaacaggctggagacccggctgagtgcagacatggccactgtcctgcagctgctacagaggcagatgacgctggtcccgcccgcctacagtgctgtgaccaccccggggcctggccccacttccacatccccgctgttgcccgtcagccccctccccaccctcaccttggactcgctttctcaggtttcccagttcatggcgtgtgaggagctgcccccgggggccccagagcttccccaagaaggccccacacgacgcctctccctaccgggccagctgggggccctcacctcccagcccctgcacagacacggctcggacccgggcagttagtggggctgcccagtgtggacacgtggctcacccagggatcaaggcgctgctgggccgctccccttggaggccctgctcaggaggccctgaccgtggaaggggagaggaactcgaaagcacagctcctcccccagcccttgggaccatcttctcctgcagtcccctgggccccagtgagaggggcaggggcagggccggcagtaggtggggcctgtggtccccccactgccctgagggcattagctggtctaactgcccggaggcacccggccctgggccttaggcacctcaaggacttttctgctatttactgctcttattgttaaggataataattaaggatcatatgaataattaatgaagatgctgatgactatgaataataaataattatcctgaggaga

SEQ ID NO: 12 - DNA, 3884 bp, Homo sapiens
  source 1..3884: mol_type = genomic DNA
  misc_feature 1..3884: note = cDNA of KCNH2 gene SNP c.1054C>T (p.Pro352Ser)
atgccggtgcggaggggccacgtcgcgccgcagaacaccttcctggacaccatcatccgcaagtttgagggccagagccgtaagttcatcatcgccaacgctcgggtggagaactgcgccgtcatctactgcaacgacggcttctgcgagctgtgcggctactcgcgggccgaggtgatgcagcgaccctgcacctgcgacttcctgcacgggccgcgcacgcagcgccgcgctgccgcgcagatcgcgcaggcactgctgggcgccgaggagcgcaaagtggaaatcgccttctaccggaaagatgggagctgcttcctatgtctggtggatgtggtgcccgtgaagaacgaggatggggctgtcatcatgttcatcctcaatttcgaggtggtgatggagaaggacatggtggggtccccggctcatgacaccaaccaccggggcccccccaccagctggctggccccaggccgcgccaagaccttccgcctgaagctgcccgcgctgctggcgctgacggcccgggagtcgtcggtgcggtcgggcggcgcgggcggcgcgggcgccccgggggccgtggtggtggacgtggacctgacgcccgcggcacccagcagcgagtcgctggccctggacgaagtgacagccatggacaaccacgtggcagggctcgggcccgcggaggagcggcgtgcgctggtgggtcccggctctccgccccgcagcgcgcccggccagctcccatcgccccgggcgcacagcctcaaccccgacgcctcgggctccagctgcagcctggcccggacgcgctcccgagaaagctgcgccagcgtgcgccgcgcctcgtcggccgacgacatcgaggccatgcgcgccggggtgctgcccccgccaccgcgccacgccagcaccggggccatgcacccactgcgcagcggcttgctcaactccacctcggactccgacctcgtgcgctaccgcaccattagcaagattccccaaatcaccctcaactttgtggacctcaagggcgaccccttcttggcttcgtccaccagtgaccgtgagatcatagcacctaagataaaggagcgaacccacaatgtcactgagaaggtcacccaggtcctgtccctgggcgccgacgtgctgcctgagtacaagctgcaggcaccgcgcatccaccgctggaccatcctgcattacagccccttcaaggccgtgtgggactggctcatcctgctgctggtcatctacacggctgtcttcacaccctactcggctgccttcctgctgaaggagacggaagaaggcccgcctgctaccgagtgtggctacgcctgccagccgctggctgtggtggacctcatcgtggacatcatgttcattgtggacatcctcatcaacttccgcaccacctacgtcaatgccaacgaggaggtggtcagccaccccggccgcatcgccgtccactacttcaagggctggttcctcatcgacatggtggccgccatccccttcgacctgctcatcttcggctctggctctgaggagctgatcgggctgctgaagactgcgcggctgctgcggctggtgcgcgtggcgcggaagctggatcgctactcagagtacggcgcggccgtgctgttcttgctcatgtgcacctttgcgctcatcgcgcactggctagcctgcatctggtacgccatcggcaacatggagcagccacacatggactcacgcatcggctggctgcacaacctgggcgaccagataggcaaaccctacaacagcagcggcctgggcggcccctccatcaaggacaagtatgtgacggcgctctacttcaccttcagcagcctcaccagtgtgggcttcggcaacgtctctcccaacaccaactcagagaagatcttctccatctgcgtcatgctcattggctccctcatgtatgctagcatcttcggcaacgtgtcggccatcatccagcggctgtactcgggcacagcccgctaccacacacagatgctgcgggtgcgggagttcatccgcttccaccagatccccaatcccctgcgccagcgcctcgaggagtacttccagcacgcctggtcctacaccaacggcatcgacatgaacgcggtgctgaagggcttccctgagtgcctgcaggctgacatctgcctgcacctgaaccgctcactgctgcagcactgcaaacccttccgaggggccaccaagggctgccttcgggccctggccatgaagttcaagaccacacatgcaccgccaggggacacactggtgcatgctggggacctgctcaccgccctgtacttcatctcccggggctccatcgagatcctgcggggcgacgtcgtcgtggccatcctggggaagaatgacatctttggggagcctctgaacctgtatgcaaggcctggcaagtcgaacggggatgtgcgggccctcacctactgtgacctacacaagatccatcgggacgacctgctggaggtgctggacatgtaccctgagttctccgaccacttctggtccagcctggagatcaccttcaacctgcgagataccaacatgatcccgggctcccccggcagtacggagttagagggtggcttcagtcggcaacgcaagcgcaagttgtccttccgcaggcgcacggacaaggacacggagcagccaggggaggtgtcggccttggggccgggccgggcgggggcagggccgagtagccggggccggccgggggggccgtggggggagagcccgtccagtggcccctccagccctgagagcagtgaggatgagggcccaggccgcagctccagccccctccgcctggtgcccttctccagccccaggccccccggagagccgccgggtggggagcccctgatggaggactgcgagaagagcagcgacacttgcaaccccctgtcaggcgccttctcaggagtgtccaacattttcagcttctggggggacagtcggggccgccagtaccaggagctccctcgatgccccgcccccacccccagcctcctcaacatccccctctccagcccgggtcggcggccccggggcgacgtggagagcaggctggatgccctccagcgccagctcaacaggctggagacccggctgagtgcagacatggccactgtcctgcagctgctacagaggcagatgacgctggtcccgcccgcctacagtgctgtgaccaccccggggcctggccccacttccacatccccgctgttgcccgtcagccccctccccaccctcaccttggactcgctttctcaggtttcccagttcatggcgtgtgaggagctgcccccgggggccccagagcttccccaagaaggccccacacgacgcctctccctaccgggccagctgggggccctcacctcccagcccctgcacagacacggctcggacccgggcagttagtggggctgcccagtgtggacacgtggctcacccagggatcaaggcgctgctgggccgctccccttggaggccctgctcaggaggccctgaccgtggaaggggagaggaactcgaaagcacagctcctcccccagcccttgggaccatcttctcctgcagtcccctgggccccagtgagaggggcaggggcagggccggcagtaggtggggcctgtggtccccccactgccctgagggcattagctggtctaactgcccggaggcacccggccctgggccttaggcacctcaaggacttttctgctatttactgctcttattgttaaggataataattaaggatcatatgaataattaatgaagatgctgatgactatgaataataaataattatcctgaggaga

SEQ ID NO: 13 - DNA, 3884 bp, Homo sapiens
  source 1..3884: mol_type = genomic DNA
  misc_feature 1..3884: note = cDNA of KCNH2 gene SNP c.1055C>G (p.Pro352Arg)
atgccggtgcggaggggccacgtcgcgccgcagaacaccttcctggacaccatcatccgcaagtttgagggccagagccgtaagttcatcatcgccaacgctcgggtggagaactgcgccgtcatctactgcaacgacggcttctgcgagctgtgcggctactcgcgggccgaggtgatgcagcgaccctgcacctgcgacttcctgcacgggccgcgcacgcagcgccgcgctgccgcgcagatcgcgcaggcactgctgggcgccgaggagcgcaaagtggaaatcgccttctaccggaaagatgggagctgcttcctatgtctggtggatgtggtgcccgtgaagaacgaggatggggctgtcatcatgttcatcctcaatttcgaggtggtgatggagaaggacatggtggggtccccggctcatgacaccaaccaccggggcccccccaccagctggctggccccaggccgcgccaagaccttccgcctgaagctgcccgcgctgctggcgctgacggcccgggagtcgtcggtgcggtcgggcggcgcgggcggcgcgggcgccccgggggccgtggtggtggacgtggacctgacgcccgcggcacccagcagcgagtcgctggccctggacgaagtgacagccatggacaaccacgtggcagggctcgggcccgcggaggagcggcgtgcgctggtgggtcccggctctccgccccgcagcgcgcccggccagctcccatcgccccgggcgcacagcctcaaccccgacgcctcgggctccagctgcagcctggcccggacgcgctcccgagaaagctgcgccagcgtgcgccgcgcctcgtcggccgacgacatcgaggccatgcgcgccggggtgctgcccccgccaccgcgccacgccagcaccggggccatgcacccactgcgcagcggcttgctcaactccacctcggactccgacctcgtgcgctaccgcaccattagcaagattccccaaatcaccctcaactttgtggacctcaagggcgaccccttcttggcttcgcgcaccagtgaccgtgagatcatagcacctaagataaaggagcgaacccacaatgtcactgagaaggtcacccaggtcctgtccctgggcgccgacgtgctgcctgagtacaagctgcaggcaccgcgcatccaccgctggaccatcctgcattacagccccttcaaggccgtgtgggactggctcatcctgctgctggtcatctacacggctgtcttcacaccctactcggctgccttcctgctgaaggagacggaagaaggcccgcctgctaccgagtgtggctacgcctgccagccgctggctgtggtggacctcatcgtggacatcatgttcattgtggacatcctcatcaacttccgcaccacctacgtcaatgccaacgaggaggtggtcagccaccccggccgcatcgccgtccactacttcaagggctggttcctcatcgacatggtggccgccatccccttcgacctgctcatcttcggctctggctctgaggagctgatcgggctgctgaagactgcgcggctgctgcggctggtgcgcgtggcgcggaagctggatcgctactcagagtacggcgcggccgtgctgttcttgctcatgtgcacctttgcgctcatcgcgcactggctagcctgcatctggtacgccatcggcaacatggagcagccacacatggactcacgcatcggctggctgcacaacctgggcgaccagataggcaaaccctacaacagcagcggcctgggcggcccctccatcaaggacaagtatgtgacggcgctctacttcaccttcagcagcctcaccagtgtgggcttcggcaacgtctctcccaacaccaactcagagaagatcttctccatctgcgtcatgctcattggctccctcatgtatgctagcatcttcggcaacgtgtcggccatcatccagcggctgtactcgggcacagcccgctaccacacacagatgctgcgggtgcgggagttcatccgcttccaccagatccccaatcccctgcgccagcgcctcgaggagtacttccagcacgcctggtcctacaccaacggcatcgacatgaacgcggtgctgaagggcttccctgagtgcctgcaggctgacatctgcctgcacctgaaccgctcactgctgcagcactgcaaacccttccgaggggccaccaagggctgccttcgggccctggccatgaagttcaagaccacacatgcaccgccaggggacacactggtgcatgctggggacctgctcaccgccctgtacttcatctcccggggctccatcgagatcctgcggggcgacgtcgtcgtggccatcctggggaagaatgacatctttggggagcctctgaacctgtatgcaaggcctggcaagtcgaacggggatgtgcgggccctcacctactgtgacctacacaagatccatcgggacgacctgctggaggtgctggacatgtaccctgagttctccgaccacttctggtccagcctggagatcaccttcaacctgcgagataccaacatgatcccgggctcccccggcagtacggagttagagggtggcttcagtcggcaacgcaagcgcaagttgtccttccgcaggcgcacggacaaggacacggagcagccaggggaggtgtcggccttggggccgggccgggcgggggcagggccgagtagccggggccggccgggggggccgtggggggagagcccgtccagtggcccctccagccctgagagcagtgaggatgagggcccaggccgcagctccagccccctccgcctggtgcccttctccagccccaggccccccggagagccgccgggtggggagcccctgatggaggactgcgagaagagcagcgacacttgcaaccccctgtcaggcgccttctcaggagtgtccaacattttcagcttctggggggacagtcggggccgccagtaccaggagctccctcgatgccccgcccccacccccagcctcctcaacatccccctctccagcccgggtcggcggccccggggcgacgtggagagcaggctggatgccctccagcgccagctcaacaggctggagacccggctgagtgcagacatggccactgtcctgcagctgctacagaggcagatgacgctggtcccgcccgcctacagtgctgtgaccaccccggggcctggccccacttccacatccccgctgttgcccgtcagccccctccccaccctcaccttggactcgctttctcaggtttcccagttcatggcgtgtgaggagctgcccccgggggccccagagcttccccaagaaggccccacacgacgcctctccctaccgggccagctgggggccctcacctcccagcccctgcacagacacggctcggacccgggcagttagtggggctgcccagtgtggacacgtggctcacccagggatcaaggcgctgctgggccgctccccttggaggccctgctcaggaggccctgaccgtggaaggggagaggaactcgaaagcacagctcctcccccagcccttgggaccatcttctcctgcagtcccctgggccccagtgagaggggcaggggcagggccggcagtaggtggggcctgtggtccccccactgccctgagggcattagctggtctaactgcccggaggcacccggccctgggccttaggcacctcaaggacttttctgctatttactgctcttattgttaaggataataattaaggatcatatgaataattaatgaagatgctgatgactatgaataataaataattatcctgaggaga

SEQ ID NO: 14 - DNA, 3884 bp, Homo sapiens
  source 1..3884: mol_type = genomic DNA
  misc_feature 1..3884: note = cDNA of KCNH2 gene SNP c.1058C>T (p.Thr353Ile)
atgccggtgcggaggggccacgtcgcgccgcagaacaccttcctggacaccatcatccgcaagtttgagggccagagccgtaagttcatcatcgccaacgctcgggtggagaactgcgccgtcatctactgcaacgacggcttctgcgagctgtgcggctactcgcgggccgaggtgatgcagcgaccctgcacctgcgacttcctgcacgggccgcgcacgcagcgccgcgctgccgcgcagatcgcgcaggcactgctgggcgccgaggagcgcaaagtggaaatcgccttctaccggaaagatgggagctgcttcctatgtctggtggatgtggtgcccgtgaagaacgaggatggggctgtcatcatgttcatcctcaatttcgaggtggtgatggagaaggacatggtggggtccccggctcatgacaccaaccaccggggcccccccaccagctggctggccccaggccgcgccaagaccttccgcctgaagctgcccgcgctgctggcgctgacggcccgggagtcgtcggtgcggtcgggcggcgcgggcggcgcgggcgccccgggggccgtggtggtggacgtggacctgacgcccgcggcacccagcagcgagtcgctggccctggacgaagtgacagccatggacaaccacgtggcagggctcgggcccgcggaggagcggcgtgcgctggtgggtcccggctctccgccccgcagcgcgcccggccagctcccatcgccccgggcgcacagcctcaaccccgacgcctcgggctccagctgcagcctggcccggacgcgctcccgagaaagctgcgccagcgtgcgccgcgcctcgtcggccgacgacatcgaggccatgcgcgccggggtgctgcccccgccaccgcgccacgccagcaccggggccatgcacccactgcgcagcggcttgctcaactccacctcggactccgacctcgtgcgctaccgcaccattagcaagattccccaaatcaccctcaactttgtggacctcaagggcgaccccttcttggcttcgcccatcagtgaccgtgagatcatagcacctaagataaaggagcgaacccacaatgtcactgagaaggtcacccaggtcctgtccctgggcgccgacgtgctgcctgagtacaagctgcaggcaccgcgcatccaccgctggaccatcctgcattacagccccttcaaggccgtgtgggactggctcatcctgctgctggtcatctacacggctgtcttcacaccctactcggctgccttcctgctgaaggagacggaagaaggcccgcctgctaccgagtgtggctacgcctgccagccgctggctgtggtggacctcatcgtggacatcatgttcattgtggacatcctcatcaacttccgcaccacctacgtcaatgccaacgaggaggtggtcagccaccccggccgcatcgccgtccactacttcaagggctggttcctcatcgacatggtggccgccatccccttcgacctgctcatcttcggctctggctctgaggagctgatcgggctgctgaagactgcgcggctgctgcggctggtgcgcgtggcgcggaagctggatcgctactcagagtacggcgcggccgtgctgttcttgctcatgtgcacctttgcgctcatcgcgcactggctagcctgcatctggtacgccatcggcaacatggagcagccacacatggactcacgcatcggctggctgcacaacctgggcgaccagataggcaaaccctacaacagcagcggcctgggcggcccctccatcaaggacaagtatgtgacggcgctctacttcaccttcagcagcctcaccagtgtgggcttcggcaacgtctctcccaacaccaactcagagaagatcttctccatctgcgtcatgctcattggctccctcatgtatgctagcatcttcggcaacgtgtcggccatcatccagcggctgtactcgggcacagcccgctaccacacacagatgctgcgggtgcgggagttcatccgcttccaccagatccccaatcccctgcgccagcgcctcgaggagtacttccagcacgcctggtcctacaccaacggcatcgacatgaacgcggtgctgaagggcttccctgagtgcctgcaggctgacatctgcctgcacctgaaccgctcactgctgcagcactgcaaacccttccgaggggccaccaagggctgccttcgggccctggccatgaagttcaagaccacacatgcaccgccaggggacacactggtgcatgctggggacctgctcaccgccctgtacttcatctcccggggctccatcgagatcctgcggggcgacgtcgtcgtggccatcctggggaagaatgacatctttggggagcctctgaacctgtatgcaaggcctggcaagtcgaacggggatgtgcgggccctcacctactgtgacctacacaagatccatcgggacgacctgctggaggtgctggacatgtaccctgagttctccgaccacttctggtccagcctggagatcaccttcaacctgcgagataccaacatgatcccgggctcccccggcagtacggagttagagggtggcttcagtcggcaacgcaagcgcaagttgtccttccgcaggcgcacggacaaggacacggagcagccaggggaggtgtcggccttggggccgggccgggcgggggcagggccgagtagccggggccggccgggggggccgtggggggagagcccgtccagtggcccctccagccctgagagcagtgaggatgagggcccaggccgcagctccagccccctccgcctggtgcccttctccagccccaggccccccggagagccgccgggtggggagcccctgatggaggactgcgagaagagcagcgacacttgcaaccccctgtcaggcgccttctcaggagtgtccaacattttcagcttctggggggacagtcggggccgccagtaccaggagctccctcgatgccccgcccccacccccagcctcctcaacatccccctctccagcccgggtcggcggccccggggcgacgtggagagcaggctggatgccctccagcgccagctcaacaggctggagacccggctgagtgcagacatggccactgtcctgcagctgctacagaggcagatgacgctggtcccgcccgcctacagtgctgtgaccaccccggggcctggccccacttccacatccccgctgttgcccgtcagccccctccccaccctcaccttggactcgctttctcaggtttcccagttcatggcgtgtgaggagctgcccccgggggccccagagcttccccaagaaggccccacacgacgcctctccctaccgggccagctgggggccctcacctcccagcccctgcacagacacggctcggacccgggcagttagtggggctgcccagtgtggacacgtggctcacccagggatcaaggcgctgctgggccgctccccttggaggccctgctcaggaggccctgaccgtggaaggggagaggaactcgaaagcacagctcctcccccagcccttgggaccatcttctcctgcagtcccctgggccccagtgagaggggcaggggcagggccggcagtaggtggggcctgtggtccccccactgccctgagggcattagctggtctaactgcccggaggcacccggccctgggccttaggcacctcaaggacttttctgctatttactgctcttattgttaaggataataattaaggatcatatgaataattaatgaagatgctgatgactatgaataataaataattatcctgaggaga

SEQ ID NO: 15 - DNA, 3884 bp, Homo sapiens
  source 1..3884: mol_type = genomic DNA
  misc_feature 1..3884: note = cDNA of KCNH2 gene SNP c.1066C>T (p.Arg356Cys)
atgccggtgcggaggggccacgtcgcgccgcagaacaccttcctggacaccatcatccgcaagtttgagggccagagccgtaagttcatcatcgccaacgctcgggtggagaactgcgccgtcatctactgcaacgacggcttctgcgagctgtgcggctactcgcgggccgaggtgatgcagcgaccctgcacctgcgacttcctgcacgggccgcgcacgcagcgccgcgctgccgcgcagatcgcgcaggcactgctgggcgccgaggagcgcaaagtggaaatcgccttctaccggaaagatgggagctgcttcctatgtctggtggatgtggtgcccgtgaagaacgaggatggggctgtcatcatgttcatcctcaatttcgaggtggtgatggagaaggacatggtggggtccccggctcatgacaccaaccaccggggcccccccaccagctggctggccccaggccgcgccaagaccttccgcctgaagctgcccgcgctgctggcgctgacggcccgggagtcgtcggtgcggtcgggcggcgcgggcggcgcgggcgccccgggggccgtggtggtggacgtggacctgacgcccgcggcacccagcagcgagtcgctggccctggacgaagtgacagccatggacaaccacgtggcagggctcgggcccgcggaggagcggcgtgcgctggtgggtcccggctctccgccccgcagcgcgcccggccagctcccatcgccccgggcgcacagcctcaaccccgacgcctcgggctccagctgcagcctggcccggacgcgctcccgagaaagctgcgccagcgtgcgccgcgcctcgtcggccgacgacatcgaggccatgcgcgccggggtgctgcccccgccaccgcgccacgccagcaccggggccatgcacccactgcgcagcggcttgctcaactccacctcggactccgacctcgtgcgctaccgcaccattagcaagattccccaaatcaccctcaactttgtggacctcaagggcgaccccttcttggcttcgcccaccagtgactgtgagatcatagcacctaagataaaggagcgaacccacaatgtcactgagaaggtcacccaggtcctgtccctgggcgccgacgtgctgcctgagtacaagctgcaggcaccgcgcatccaccgctggaccatcctgcattacagccccttcaaggccgtgtgggactggctcatcctgctgctggtcatctacacggctgtcttcacaccctactcggctgccttcctgctgaaggagacggaagaaggcccgcctgctaccgagtgtggctacgcctgccagccgctggctgtggtggacctcatcgtggacatcatgttcattgtggacatcctcatcaacttccgcaccacctacgtcaatgccaacgaggaggtggtcagccaccccggccgcatcgccgtccactacttcaagggctggttcctcatcgacatggtggccgccatccccttcgacctgctcatcttcggctctggctctgaggagctgatcgggctgctgaagactgcgcggctgctgcggctggtgcgcgtggcgcggaagctggatcgctactcagagtacggcgcggccgtgctgttcttgctcatgtgcacctttgcgctcatcgcgcactggctagcctgcatctggtacgccatcggcaacatggagcagccacacatggactcacgcatcggctggctgcacaacctgggcgaccagataggcaaaccctacaacagcagcggcctgggcggcccctccatcaaggacaagtatgtgacggcgctctacttcaccttcagcagcctcaccagtgtgggcttcggcaacgtctctcccaacaccaactcagagaagatcttctccatctgcgtcatgctcattggctccctcatgtatgctagcatcttcggcaacgtgtcggccatcatccagcggctgtactcgggcacagcccgctaccacacacagatgctgcgggtgcgggagttcatccgcttccaccagatccccaatcccctgcgccagcgcctcgaggagtacttccagcacgcctggtcctacaccaacggcatcgacatgaacgcggtgctgaagggcttccctgagtgcctgcaggctgacatctgcctgcacctgaaccgctcactgctgcagcactgcaaacccttccgaggggccaccaagggctgccttcgggccctggccatgaagttcaagaccacacatgcaccgccaggggacacactggtgcatgctggggacctgctcaccgccctgtacttcatctcccggggctccatcgagatcctgcggggcgacgtcgtcgtggccatcctggggaagaatgacatctttggggagcctctgaacctgtatgcaaggcctggcaagtcgaacggggatgtgcgggccctcacctactgtgacctacacaagatccatcgggacgacctgctggaggtgctggacatgtaccctgagttctccgaccacttctggtccagcctggagatcaccttcaacctgcgagataccaacatgatcccgggctcccccggcagtacggagttagagggtggcttcagtcggcaacgcaagcgcaagttgtccttccgcaggcgcacggacaaggacacggagcagccaggggaggtgtcggccttggggccgggccgggcgggggcagggccgagtagccggggccggccgggggggccgtggggggagagcccgtccagtggcccctccagccctgagagcagtgaggatgagggcccaggccgcagctccagccccctccgcctggtgcccttctccagccccaggccccccggagagccgccgggtggggagcccctgatggaggactgcgagaagagcagcgacacttgcaaccccctgtcaggcgccttctcaggagtgtccaacattttcagcttctggggggacagtcggggccgccagtaccaggagctccctcgatgccccgcccccacccccagcctcctcaacatccccctctccagcccgggtcggcggccccggggcgacgtggagagcaggctggatgccctccagcgccagctcaacaggctggagacccggctgagtgcagacatggccactgtcctgcagctgctacagaggcagatgacgctggtcccgcccgcctacagtgctgtgaccaccccggggcctggccccacttccacatccccgctgttgcccgtcagccccctccccaccctcaccttggactcgctttctcaggtttcccagttcatggcgtgtgaggagctgcccccgggggccccagagcttccccaagaaggccccacacgacgcctctccctaccgggccagctgggggccctcacctcccagcccctgcacagacacggctcggacccgggcagttagtggggctgcccagtgtggacacgtggctcacccagggatcaaggcgctgctgggccgctccccttggaggccctgctcaggaggccctgaccgtggaaggggagaggaactcgaaagcacagctcctcccccagcccttgggaccatcttctcctgcagtcccctgggccccagtgagaggggcaggggcagggccggcagtaggtggggcctgtggtccccccactgccctgagggcattagctggtctaactgcccggaggcacccggccctgggccttaggcacctcaaggacttttctgctatttactgctcttattgttaaggataataattaaggatcatatgaataattaatgaagatgctgatgactatgaataataaataattatcctgaggaga

SEQ ID NO: 16 - DNA, 3884 bp, Homo sapiens
  source 1..3884: mol_type = genomic DNA
  misc_feature 1..3884: note = cDNA of KCNH2 gene SNP c.1067G>A (p.Arg356His)
atgccggtgcggaggggccacgtcgcgccgcagaacaccttcctggacaccatcatccgcaagtttgagggccagagccgtaagttcatcatcgccaacgctcgggtggagaactgcgccgtcatctactgcaacgacggcttctgcgagctgtgcggctactcgcgggccgaggtgatgcagcgaccctgcacctgcgacttcctgcacgggccgcgcacgcagcgccgcgctgccgcgcagatcgcgcaggcactgctgggcgccgaggagcgcaaagtggaaatcgccttctaccggaaagatgggagctgcttcctatgtctggtggatgtggtgcccgtgaagaacgaggatggggctgtcatcatgttcatcctcaatttcgaggtggtgatggagaaggacatggtggggtccccggctcatgacaccaaccaccggggcccccccaccagctggctggccccaggccgcgccaagaccttccgcctgaagctgcccgcgctgctggcgctgacggcccgggagtcgtcggtgcggtcgggcggcgcgggcggcgcgggcgccccgggggccgtggtggtggacgtggacctgacgcccgcggcacccagcagcgagtcgctggccctggacgaagtgacagccatggacaaccacgtggcagggctcgggcccgcggaggagcggcgtgcgctggtgggtcccggctctccgccccgcagcgcgcccggccagctcccatcgccccgggcgcacagcctcaaccccgacgcctcgggctccagctgcagcctggcccggacgcgctcccgagaaagctgcgccagcgtgcgccgcgcctcgtcggccgacgacatcgaggccatgcgcgccggggtgctgcccccgccaccgcgccacgccagcaccggggccatgcacccactgcgcagcggcttgctcaactccacctcggactccgacctcgtgcgctaccgcaccattagcaagattccccaaatcaccctcaactttgtggacctcaagggcgaccccttcttggcttcgcccaccagtgaccatgagatcatagcacctaagataaaggagcgaacccacaatgtcactgagaaggtcacccaggtcctgtccctgggcgccgacgtgctgcctgagtacaagctgcaggcaccgcgcatccaccgctggaccatcctgcattacagccccttcaaggccgtgtgggactggctcatcctgctgctggtcatctacacggctgtcttcacaccctactcggctgccttcctgctgaaggagacggaagaaggcccgcctgctaccgagtgtggctacgcctgccagccgctggctgtggtggacctcatcgtggacatcatgttcattgtggacatcctcatcaacttccgcaccacctacgtcaatgccaacgaggaggtggtcagccaccccggccgcatcgccgtccactacttcaagggctggttcctcatcgacatggtggccgccatccccttcgacctgctcatcttcggctctggctctgaggagctgatcgggctgctgaagactgcgcggctgctgcggctggtgcgcgtggcgcggaagctggatcgctactcagagtacggcgcggccgtgctgttcttgctcatgtgcacctttgcgctcatcgcgcactggctagcctgcatctggtacgccatcggcaacatggagcagccacacatggactcacgcatcggctggctgcacaacctgggcgaccagataggcaaaccctacaacagcagcggcctgggcggcccctccatcaaggacaagtatgtgacggcgctctacttcaccttcagcagcctcaccagtgtgggcttcggcaacgtctctcccaacaccaactcagagaagatcttctccatctgcgtcatgctcattggctccctcatgtatgctagcatcttcggcaacgtgtcggccatcatccagcggctgtactcgggcacagcccgctaccacacacagatgctgcgggtgcgggagttcatccgcttccaccagatccccaatcccctgcgccagcgcctcgaggagtacttccagcacgcctggtcctacaccaacggcatcgacatgaacgcggtgctgaagggcttccctgagtgcctgcaggctgacatctgcctgcacctgaaccgctcactgctgcagcactgcaaacccttccgaggggccaccaagggctgccttcgggccctggccatgaagttcaagaccacacatgcaccgccaggggacacactggtgcatgctggggacctgctcaccgccctgtacttcatctcccggggctccatcgagatcctgcggggcgacgtcgtcgtggccatcctggggaagaatgacatctttggggagcctctgaacctgtatgcaaggcctggcaagtcgaacggggatgtgcgggccctcacctactgtgacctacacaagatccatcgggacgacctgctggaggtgctggacatgtaccctgagttctccgaccacttctggtccagcctggagatcaccttcaacctgcgagataccaacatgatcccgggctcccccggcagtacggagttagagggtggcttcagtcggcaacgcaagcgcaagttgtccttccgcaggcgcacggacaaggacacggagcagccaggggaggtgtcggccttggggccgggccgggcgggggcagggccgagtagccggggccggccgggggggccgtggggggagagcccgtccagtggcccctccagccctgagagcagtgaggatgagggcccaggccgcagctccagccccctccgcctggtgcccttctccagccccaggccccccggagagccgccgggtggggagcccctgatggaggactgcgagaagagcagcgacacttgcaaccccctgtcaggcgccttctcaggagtgtccaacattttcagcttctggggggacagtcggggccgccagtaccaggagctccctcgatgccccgcccccacccccagcctcctcaacatccccctctccagcccgggtcggcggccccggggcgacgtggagagcaggctggatgccctccagcgccagctcaacaggctggagacccggctgagtgcagacatggccactgtcctgcagctgctacagaggcagatgacgctggtcccgcccgcctacagtgctgtgaccaccccggggcctggccccacttccacatccccgctgttgcccgtcagccccctccccaccctcaccttggactcgctttctcaggtttcccagttcatggcgtgtgaggagctgcccccgggggccccagagcttccccaagaaggccccacacgacgcctctccctaccgggccagctgggggccctcacctcccagcccctgcacagacacggctcggacccgggcagttagtggggctgcccagtgtggacacgtggctcacccagggatcaaggcgctgctgggccgctccccttggaggccctgctcaggaggccctgaccgtggaaggggagaggaactcgaaagcacagctcctcccccagcccttgggaccatcttctcctgcagtcccctgggccccagtgagaggggcaggggcagggccggcagtaggtggggcctgtggtccccccactgccctgagggcattagctggtctaactgcccggaggcacccggccctgggccttaggcacctcaaggacttttctgctatttactgctcttattgttaaggataataattaaggatcatatgaataattaatgaagatgctgatgactatgaataataaataattatcctgaggaga

SEQ ID NO: 17 - DNA, 3884 bp, Homo sapiens
  source 1..3884: mol_type = genomic DNA
  misc_feature 1..3884: note = cDNA of KCNH2 gene SNP c.1071G>T (p.Glu357Asp)
atgccggtgcggaggggccacgtcgcgccgcagaacaccttcctggacaccatcatccgcaagtttgagggccagagccgtaagttcatcatcgccaacgctcgggtggagaactgcgccgtcatctactgcaacgacggcttctgcgagctgtgcggctactcgcgggccgaggtgatgcagcgaccctgcacctgcgacttcctgcacgggccgcgcacgcagcgccgcgctgccgcgcagatcgcgcaggcactgctgggcgccgaggagcgcaaagtggaaatcgccttctaccggaaagatgggagctgcttcctatgtctggtggatgtggtgcccgtgaagaacgaggatggggctgtcatcatgttcatcctcaatttcgaggtggtgatggagaaggacatggtggggtccccggctcatgacaccaaccaccggggcccccccaccagctggctggccccaggccgcgccaagaccttccgcctgaagctgcccgcgctgctggcgctgacggcccgggagtcgtcggtgcggtcgggcggcgcgggcggcgcgggcgccccgggggccgtggtggtggacgtggacctgacgcccgcggcacccagcagcgagtcgctggccctggacgaagtgacagccatggacaaccacgtggcagggctcgggcccgcggaggagcggcgtgcgctggtgggtcccggctctccgccccgcagcgcgcccggccagctcccatcgccccgggcgcacagcctcaaccccgacgcctcgggctccagctgcagcctggcccggacgcgctcccgagaaagctgcgccagcgtgcgccgcgcctcgtcggccgacgacatcgaggccatgcgcgccggggtgctgcccccgccaccgcgccacgccagcaccggggccatgcacccactgcgcagcggcttgctcaactccacctcggactccgacctcgtgcgctaccgcaccattagcaagattccccaaatcaccctcaactttgtggacctcaagggcgaccccttcttggcttcgcccaccagtgaccgtgatatcatagcacctaagataaaggagcgaacccacaatgtcactgagaaggtcacccaggtcctgtccctgggcgccgacgtgctgcctgagtacaagctgcaggcaccgcgcatccaccgctggaccatcctgcattacagccccttcaaggccgtgtgggactggctcatcctgctgctggtcatctacacggctgtcttcacaccctactcggctgccttcctgctgaaggagacggaagaaggcccgcctgctaccgagtgtggctacgcctgccagccgctggctgtggtggacctcatcgtggacatcatgttcattgtggacatcctcatcaacttccgcaccacctacgtcaatgccaacgaggaggtggtcagccaccccggccgcatcgccgtccactacttcaagggctggttcctcatcgacatggtggccgccatccccttcgacctgctcatcttcggctctggctctgaggagctgatcgggctgctgaagactgcgcggctgctgcggctggtgcgcgtggcgcggaagctggatcgctactcagagtacggcgcggccgtgctgttcttgctcatgtgcacctttgcgctcatcgcgcactggctagcctgcatctggtacgccatcggcaacatggagcagccacacatggactcacgcatcggctggctgcacaacctgggcgaccagataggcaaaccctacaacagcagcggcctgggcggcccctccatcaaggacaagtatgtgacggcgctctacttcaccttcagcagcctcaccagtgtgggcttcggcaacgtctctcccaacaccaactcagagaagatcttctccatctgcgtcatgctcattggctccctcatgtatgctagcatcttcggcaacgtgtcggccatcatccagcggctgtactcgggcacagcccgctaccacacacagatgctgcgggtgcgggagttcatccgcttccaccagatccccaatcccctgcgccagcgcctcgaggagtacttccagcacgcctggtcctacaccaacggcatcgacatgaacgcggtgctgaagggcttccctgagtgcctgcaggctgacatctgcctgcacctgaaccgctcactgctgcagcactgcaaacccttccgaggggccaccaagggctgccttcgggccctggccatgaagttcaagaccacacatgcaccgccaggggacacactggtgcatgctggggacctgctcaccgccctgtacttcatctcccggggctccatcgagatcctgcggggcgacgtcgtcgtggccatcctggggaagaatgacatctttggggagcctctgaacctgtatgcaaggcctggcaagtcgaacggggatgtgcgggccctcacctactgtgacctacacaagatccatcgggacgacctgctggaggtgctggacatgtaccctgagttctccgaccacttctggtccagcctggagatcaccttcaacctgcgagataccaacatgatcccgggctcccccggcagtacggagttagagggtggcttcagtcggcaacgcaagcgcaagttgtccttccgcaggcgcacggacaaggacacggagcagccaggggaggtgtcggccttggggccgggccgggcgggggcagggccgagtagccggggccggccgggggggccgtggggggagagcccgtccagtggcccctccagccctgagagcagtgaggatgagggcccaggccgcagctccagccccctccgcctggtgcccttctccagccccaggccccccggagagccgccgggtggggagcccctgatggaggactgcgagaagagcagcgacacttgcaaccccctgtcaggcgccttctcaggagtgtccaacattttcagcttctggggggacagtcggggccgccagtaccaggagctccctcgatgccccgcccccacccccagcctcctcaacatccccctctccagcccgggtcggcggccccggggcgacgtggagagcaggctggatgccctccagcgccagctcaacaggctggagacccggctgagtgcagacatggccactgtcctgcagctgctacagaggcagatgacgctggtcccgcccgcctacagtgctgtgaccaccccggggcctggccccacttccacatccccgctgttgcccgtcagccccctccccaccctcaccttggactcgctttctcaggtttcccagttcatggcgtgtgaggagctgcccccgggggccccagagcttccccaagaaggccccacacgacgcctctccctaccgggccagctgggggccctcacctcccagcccctgcacagacacggctcggacccgggcagttagtggggctgcccagtgtggacacgtggctcacccagggatcaaggcgctgctgggccgctccccttggaggccctgctcaggaggccctgaccgtggaaggggagaggaactcgaaagcacagctcctcccccagcccttgggaccatcttctcctgcagtcccctgggccccagtgagaggggcaggggcagggccggcagtaggtggggcctgtggtccccccactgccctgagggcattagctggtctaactgcccggaggcacccggccctgggccttaggcacctcaaggacttttctgctatttactgctcttattgttaaggataataattaaggatcatatgaataattaatgaagatgctgatgactatgaataataaataattatcctgaggaga

SEQ ID NO: 18 - DNA, 3884 bp, Homo sapiens
  source 1..3884: mol_type = genomic DNA
  misc_feature 1..3884: note = cDNA of KCNH2 gene SNP c.1073T>A (p.Ile358Asn)
atgccggtgcggaggggccacgtcgcgccgcagaacaccttcctggacaccatcatccgcaagtttgagggccagagccgtaagttcatcatcgccaacgctcgggtggagaactgcgccgtcatctactgcaacgacggcttctgcgagctgtgcggctactcgcgggccgaggtgatgcagcgaccctgcacctgcgacttcctgcacgggccgcgcacgcagcgccgcgctgccgcgcagatcgcgcaggcactgctgggcgccgaggagcgcaaagtggaaatcgccttctaccggaaagatgggagctgcttcctatgtctggtggatgtggtgcccgtgaagaacgaggatggggctgtcatcatgttcatcctcaatttcgaggtggtgatggagaaggacatggtggggtccccggctcatgacaccaaccaccggggcccccccaccagctggctggccccaggccgcgccaagaccttccgcctgaagctgcccgcgctgctggcgctgacggcccgggagtcgtcggtgcggtcgggcggcgcgggcggcgcgggcgccccgggggccgtggtggtggacgtggacctgacgcccgcggcacccagcagcgagtcgctggccctggacgaagtgacagccatggacaaccacgtggcagggctcgggcccgcggaggagcggcgtgcgctggtgggtcccggctctccgccccgcagcgcgcccggccagctcccatcgccccgggcgcacagcctcaaccccgacgcctcgggctccagctgcagcctggcccggacgcgctcccgagaaagctgcgccagcgtgcgccgcgcctcgtcggccgacgacatcgaggccatgcgcgccggggtgctgcccccgccaccgcgccacgccagcaccggggccatgcacccactgcgcagcggcttgctcaactccacctcggactccgacctcgtgcgctaccgcaccattagcaagattccccaaatcaccctcaactttgtggacctcaagggcgaccccttcttggcttcgcccaccagtgaccgtgagaacatagcacctaagataaaggagcgaacccacaatgtcactgagaaggtcacccaggtcctgtccctgggcgccgacgtgctgcctgagtacaagctgcaggcaccgcgcatccaccgctggaccatcctgcattacagccccttcaaggccgtgtgggactggctcatcctgctgctggtcatctacacggctgtcttcacaccctactcggctgccttcctgctgaaggagacggaagaaggcccgcctgctaccgagtgtggctacgcctgccagccgctggctgtggtggacctcatcgtggacatcatgttcattgtggacatcctcatcaacttccgcaccacctacgtcaatgccaacgaggaggtggtcagccaccccggccgcatcgccgtccactacttcaagggctggttcctcatcgacatggtggccgccatccccttcgacctgctcatcttcggctctggctctgaggagctgatcgggctgctgaagactgcgcggctgctgcggctggtgcgcgtggcgcggaagctggatcgctactcagagtacggcgcggccgtgctgttcttgctcatgtgcacctttgcgctcatcgcgcactggctagcctgcatctggtacgccatcggcaacatggagcagccacacatggactcacgcatcggctggctgcacaacctgggcgaccagataggcaaaccctacaacagcagcggcctgggcggcccctccatcaaggacaagtatgtgacggcgctctacttcaccttcagcagcctcaccagtgtgggcttcggcaacgtctctcccaacaccaactcagagaagatcttctccatctgcgtcatgctcattggctccctcatgtatgctagcatcttcggcaacgtgtcggccatcatccagcggctgtactcgggcacagcccgctaccacacacagatgctgcgggtgcgggagttcatccgcttccaccagatccccaatcccctgcgccagcgcctcgaggagtacttccagcacgcctggtcctacaccaacggcatcgacatgaacgcggtgctgaagggcttccctgagtgcctgcaggctgacatctgcctgcacctgaaccgctcactgctgcagcactgcaaacccttccgaggggccaccaagggctgccttcgggccctggccatgaagttcaagaccacacatgcaccgccaggggacacactggtgcatgctggggacctgctcaccgccctgtacttcatctcccggggctccatcgagatcctgcggggcgacgtcgtcgtggccatcctggggaagaatgacatctttggggagcctctgaacctgtatgcaaggcctggcaagtcgaacggggatgtgcgggccctcacctactgtgacctacacaagatccatcgggacgacctgctggaggtgctggacatgtaccctgagttctccgaccacttctggtccagcctggagatcaccttcaacctgcgagataccaacatgatcccgggctcccccggcagtacggagttagagggtggcttcagtcggcaacgcaagcgcaagttgtccttccgcaggcgcacggacaaggacacggagcagccaggggaggtgtcggccttggggccgggccgggcgggggcagggccgagtagccggggccggccgggggggccgtggggggagagcccgtccagtggcccctccagccctgagagcagtgaggatgagggcccaggccgcagctccagccccctccgcctggtgcccttctccagccccaggccccccggagagccgccgggtggggagcccctgatggaggactgcgagaagagcagcgacacttgcaaccccctgtcaggcgccttctcaggagtgtccaacattttcagcttctggggggacagtcggggccgccagtaccaggagctccctcgatgccccgcccccacccccagcctcctcaacatccccctctccagcccgggtcggcggccccggggcgacgtggagagcaggctggatgccctccagcgccagctcaacaggctggagacccggctgagtgcagacatggccactgtcctgcagctgctacagaggcagatgacgctggtcccgcccgcctacagtgctgtgaccaccccggggcctggccccacttccacatccccgctgttgcccgtcagccccctccccaccctcaccttggactcgctttctcaggtttcccagttcatggcgtgtgaggagctgcccccgggggccccagagcttccccaagaaggccccacacgacgcctctccctaccgggccagctgggggccctcacctcccagcccctgcacagacacggctcggacccgggcagttagtggggctgcccagtgtggacacgtggctcacccagggatcaaggcgctgctgggccgctccccttggaggccctgctcaggaggccctgaccgtggaaggggagaggaactcgaaagcacagctcctcccccagcccttgggaccatcttctcctgcagtcccctgggccccagtgagaggggcaggggcagggccggcagtaggtggggcctgtggtccccccactgccctgagggcattagctggtctaactgcccggaggcacccggccctgggccttaggcacctcaaggacttttctgctatttactgctcttattgttaaggataataattaaggatcatatgaataattaatgaagatgctgatgactatgaataataaataattatcctgaggaga

SEQ ID NO: 19 - DNA, 3884 bp, Homo sapiens
  source 1..3884: mol_type = genomic DNA
  misc_feature 1..3884: note = cDNA of KCNH2 gene SNP c.1076T>A (p.Ile359Lys)
atgccggtgcggaggggccacgtcgcgccgcagaacaccttcctggacaccatcatccgcaagtttgagggccagagccgtaagttcatcatcgccaacgctcgggtggagaactgcgccgtcatctactgcaacgacggcttctgcgagctgtgcggctactcgcgggccgaggtgatgcagcgaccctgcacctgcgacttcctgcacgggccgcgcacgcagcgccgcgctgccgcgcagatcgcgcaggcactgctgggcgccgaggagcgcaaagtggaaatcgccttctaccggaaagatgggagctgcttcctatgtctggtggatgtggtgcccgtgaagaacgaggatggggctgtcatcatgttcatcctcaatttcgaggtggtgatggagaaggacatggtggggtccccggctcatgacaccaaccaccggggcccccccaccagctggctggccccaggccgcgccaagaccttccgcctgaagctgcccgcgctgctggcgctgacggcccgggagtcgtcggtgcggtcgggcggcgcgggcggcgcgggcgccccgggggccgtggtggtggacgtggacctgacgcccgcggcacccagcagcgagtcgctggccctggacgaagtgacagccatggacaaccacgtggcagggctcgggcccgcggaggagcggcgtgcgctggtgggtcccggctctccgccccgcagcgcgcccggccagctcccatcgccccgggcgcacagcctcaaccccgacgcctcgggctccagctgcagcctggcccggacgcgctcccgagaaagctgcgccagcgtgcgccgcgcctcgtcggccgacgacatcgaggccatgcgcgccggggtgctgcccccgccaccgcgccacgccagcaccggggccatgcacccactgcgcagcggcttgctcaactccacctcggactccgacctcgtgcgctaccgcaccattagcaagattccccaaatcaccctcaactttgtggacctcaagggcgaccccttcttggcttcgcccaccagtgaccgtgagatcaaagcacctaagataaaggagcgaacccacaatgtcactgagaaggtcacccaggtcctgtccctgggcgccgacgtgctgcctgagtacaagctgcaggcaccgcgcatccaccgctggaccatcctgcattacagccccttcaaggccgtgtgggactggctcatcctgctgctggtcatctacacggctgtcttcacaccctactcggctgccttcctgctgaaggagacggaagaaggcccgcctgctaccgagtgtggctacgcctgccagccgctggctgtggtggacctcatcgtggacatcatgttcattgtggacatcctcatcaacttccgcaccacctacgtcaatgccaacgaggaggtggtcagccaccccggccgcatcgccgtccactacttcaagggctggttcctcatcgacatggtggccgccatccccttcgacctgctcatcttcggctctggctctgaggagctgatcgggctgctgaagactgcgcggctgctgcggctggtgcgcgtggcgcggaagctggatcgctactcagagtacggcgcggccgtgctgttcttgctcatgtgcacctttgcgctcatcgcgcactggctagcctgcatctggtacgccatcggcaacatggagcagccacacatggactcacgcatcggctggctgcacaacctgggcgaccagataggcaaaccctacaacagcagcggcctgggcggcccctccatcaaggacaagtatgtgacggcgctctacttcaccttcagcagcctcaccagtgtgggcttcggcaacgtctctcccaacaccaactcagagaagatcttctccatctgcgtcatgctcattggctccctcatgtatgctagcatcttcggcaacgtgtcggccatcatccagcggctgtactcgggcacagcccgctaccacacacagatgctgcgggtgcgggagttcatccgcttccaccagatccccaatcccctgcgccagcgcctcgaggagtacttccagcacgcctggtcctacaccaacggcatcgacatgaacgcggtgctgaagggcttccctgagtgcctgcaggctgacatctgcctgcacctgaaccgctcactgctgcagcactgcaaacccttccgaggggccaccaagggctgccttcgggccctggccatgaagttcaagaccacacatgcaccgccaggggacacactggtgcatgctggggacctgctcaccgccctgtacttcatctcccggggctccatcgagatcctgcggggcgacgtcgtcgtggccatcctggggaagaatgacatctttggggagcctctgaacctgtatgcaaggcctggcaagtcgaacggggatgtgcgggccctcacctactgtgacctacacaagatccatcgggacgacctgctggaggtgctggacatgtaccctgagttctccgaccacttctggtccagcctggagatcaccttcaacctgcgagataccaacatgatcccgggctcccccggcagtacggagttagagggtggcttcagtcggcaacgcaagcgcaagttgtccttccgcaggcgcacggacaaggacacggagcagccaggggaggtgtcggccttggggccgggccgggcgggggcagggccgagtagccggggccggccgggggggccgtggggggagagcccgtccagtggcccctccagccctgagagcagtgaggatgagggcccaggccgcagctccagccccctccgcctggtgcccttctccagccccaggccccccggagagccgccgggtggggagcccctgatggaggactgcgagaagagcagcgacacttgcaaccccctgtcaggcgccttctcaggagtgtccaacattttcagcttctggggggacagtcggggccgccagtaccaggagctccctcgatgccccgcccccacccccagcctcctcaacatccccctctccagcccgggtcggcggccccggggcgacgtggagagcaggctggatgccctccagcgccagctcaacaggctggagacccggctgagtgcagacatggccactgtcctgcagctgctacagaggcagatgacgctggtcccgcccgcctacagtgctgtgaccaccccggggcctggccccacttccacatccccgctgttgcccgtcagccccctccccaccctcaccttggactcgctttctcaggtttcccagttcatggcgtgtgaggagctgcccccgggggccccagagcttccccaagaaggccccacacgacgcctctccctaccgggccagctgggggccctcacctcccagcccctgcacagacacggctcggacccgggcagttagtggggctgcccagtgtggacacgtggctcacccagggatcaaggcgctgctgggccgctccccttggaggccctgctcaggaggccctgaccgtggaaggggagaggaactcgaaagcacagctcctcccccagcccttgggaccatcttctcctgcagtcccctgggccccagtgagaggggcaggggcagggccggcagtaggtggggcctgtggtccccccactgccctgagggcattagctggtctaactgcccggaggcacccggccctgggccttaggcacctcaaggacttttctgctatttactgctcttattgttaaggataataattaaggatcatatgaataattaatgaagatgctgatgactatgaataataaataattatcctgaggaga

SEQ ID NO: 20 - DNA, 3884 bp, Homo sapiens
  source 1..3884: mol_type = genomic DNA
  misc_feature 1..3884: note = cDNA of KCNH2 gene SNP c.1081C>T (p.Pro361Ser)
atgccggtgcggaggggccacgtcgcgccgcagaacaccttcctggacaccatcatccgcaagtttgagggccagagccgtaagttcatcatcgccaacgctcgggtggagaactgcgccgtcatctactgcaacgacggcttctgcgagctgtgcggctactcgcgggccgaggtgatgcagcgaccctgcacctgcgacttcctgcacgggccgcgcacgcagcgccgcgctgccgcgcagatcgcgcaggcactgctgggcgccgaggagcgcaaagtggaaatcgccttctaccggaaagatgggagctgcttcctatgtctggtggatgtggtgcccgtgaagaacgaggatggggctgtcatcatgttcatcctcaatttcgaggtggtgatggagaaggacatggtggggtccccggctcatgacaccaaccaccggggcccccccaccagctggctggccccaggccgcgccaagaccttccgcctgaagctgcccgcgctgctggcgctgacggcccgggagtcgtcggtgcggtcgggcggcgcgggcggcgcgggcgccccgggggccgtggtggtggacgtggacctgacgcccgcggcacccagcagcgagtcgctggccctggacgaagtgacagccatggacaaccacgtggcagggctcgggcccgcggaggagcggcgtgcgctggtgggtcccggctctccgccccgcagcgcgcccggccagctcccatcgccccgggcgcacagcctcaaccccgacgcctcgggctccagctgcagcctggcccggacgcgctcccgagaaagctgcgccagcgtgcgccgcgcctcgtcggccgacgacatcgaggccatgcgcgccggggtgctgcccccgccaccgcgccacgccagcaccggggccatgcacccactgcgcagcggcttgctcaactccacctcggactccgacctcgtgcgctaccgcaccattagcaagattccccaaatcaccctcaactttgtggacctcaagggcgaccccttcttggcttcgcccaccagtgaccgtgagatcatagcatctaagataaaggagcgaacccacaatgtcactgagaaggtcacccaggtcctgtccctgggcgccgacgtgctgcctgagtacaagctgcaggcaccgcgcatccaccgctggaccatcctgcattacagccccttcaaggccgtgtgggactggctcatcctgctgctggtcatctacacggctgtcttcacaccctactcggctgccttcctgctgaaggagacggaagaaggcccgcctgctaccgagtgtggctacgcctgccagccgctggctgtggtggacctcatcgtggacatcatgttcattgtggacatcctcatcaacttccgcaccacctacgtcaatgccaacgaggaggtggtcagccaccccggccgcatcgccgtccactacttcaagggctggttcctcatcgacatggtggccgccatccccttcgacctgctcatcttcggctctggctctgaggagctgatcgggctgctgaagactgcgcggctgctgcggctggtgcgcgtggcgcggaagctggatcgctactcagagtacggcgcggccgtgctgttcttgctcatgtgcacctttgcgctcatcgcgcactggctagcctgcatctggtacgccatcggcaacatggagcagccacacatggactcacgcatcggctggctgcacaacctgggcgaccagataggcaaaccctacaacagcagcggcctgggcggcccctccatcaaggacaagtatgtgacggcgctctacttcaccttcagcagcctcaccagtgtgggcttcggcaacgtctctcccaacaccaactcagagaagatcttctccatctgcgtcatgctcattggctccctcatgtatgctagcatcttcggcaacgtgtcggccatcatccagcggctgtactcgggcacagcccgctaccacacacagatgctgcgggtgcgggagttcatccgcttccaccagatccccaatcccctgcgccagcgcctcgaggagtacttccagcacgcctggtcctacaccaacggcatcgacatgaacgcggtgctgaagggcttccctgagtgcctgcaggctgacatctgcctgcacctgaaccgctcactgctgcagcactgcaaacccttccgaggggccaccaagggctgccttcgggccctggccatgaagttcaagaccacacatgcaccgccaggggacacactggtgcatgctggggacctgctcaccgccctgtacttcatctcccggggctccatcgagatcctgcggggcgacgtcgtcgtggccatcctggggaagaatgacatctttggggagcctctgaacctgtatgcaaggcctggcaagtcgaacggggatgtgcgggccctcacctactgtgacctacacaagatccatcgggacgacctgctggaggtgctggacatgtaccctgagttctccgaccacttctggtccagcctggagatcaccttcaacctgcgagataccaacatgatcccgggctcccccggcagtacggagttagagggtggcttcagtcggcaacgcaagcgcaagttgtccttccgcaggcgcacggacaaggacacggagcagccaggggaggtgtcggccttggggccgggccgggcgggggcagggccgagtagccggggccggccgggggggccgtggggggagagcccgtccagtggcccctccagccctgagagcagtgaggatgagggcccaggccgcagctccagccccctccgcctggtgcccttctccagccccaggccccccggagagccgccgggtggggagcccctgatggaggactgcgagaagagcagcgacacttgcaaccccctgtcaggcgccttctcaggagtgtccaacattttcagcttctggggggacagtcggggccgccagtaccaggagctccctcgatgccccgcccccacccccagcctcctcaacatccccctctccagcccgggtcggcggccccggggcgacgtggagagcaggctggatgccctccagcgccagctcaacaggctggagacccggctgagtgcagacatggccactgtcctgcagctgctacagaggcagatgacgctggtcccgcccgcctacagtgctgtgaccaccccggggcctggccccacttccacatccccgctgttgcccgtcagccccctccccaccctcaccttggactcgctttctcaggtttcccagttcatggcgtgtgaggagctgcccccgggggccccagagcttccccaagaaggccccacacgacgcctctccctaccgggccagctgggggccctcacctcccagcccctgcacagacacggctcggacccgggcagttagtggggctgcccagtgtggacacgtggctcacccagggatcaaggcgctgctgggccgctccccttggaggccctgctcaggaggccctgaccgtggaaggggagaggaactcgaaagcacagctcctcccccagcccttgggaccatcttctcctgcagtcccctgggccccagtgagaggggcaggggcagggccggcagtaggtggggcctgtggtccccccactgccctgagggcattagctggtctaactgcccggaggcacccggccctgggccttaggcacctcaaggacttttctgctatttactgctcttattgttaaggataataattaaggatcatatgaataattaatgaagatgctgatgactatgaataataaataattatcctgaggaga

SEQ ID NO: 21 - DNA, 3884 bp, Homo sapiens
  source 1..3884: mol_type = genomic DNA
  misc_feature 1..3884: note = cDNA of KCNH2 gene SNP c.1096C>T (p.Arg366Ter)
atgccggtgcggaggggccacgtcgcgccgcagaacaccttcctggacaccatcatccgcaagtttgagggccagagccgtaagttcatcatcgccaacgctcgggtggagaactgcgccgtcatctactgcaacgacggcttctgcgagctgtgcggctactcgcgggccgaggtgatgcagcgaccctgcacctgcgacttcctgcacgggccgcgcacgcagcgccgcgctgccgcgcagatcgcgcaggcactgctgggcgccgaggagcgcaaagtggaaatcgccttctaccggaaagatgggagctgcttcctatgtctggtggatgtggtgcccgtgaagaacgaggatggggctgtcatcatgttcatcctcaatttcgaggtggtgatggagaaggacatggtggggtccccggctcatgacaccaaccaccggggcccccccaccagctggctggccccaggccgcgccaagaccttccgcctgaagctgcccgcgctgctggcgctgacggcccgggagtcgtcggtgcggtcgggcggcgcgggcggcgcgggcgccccgggggccgtggtggtggacgtggacctgacgcccgcggcacccagcagcgagtcgctggccctggacgaagtgacagccatggacaaccacgtggcagggctcgggcccgcggaggagcggcgtgcgctggtgggtcccggctctccgccccgcagcgcgcccggccagctcccatcgccccgggcgcacagcctcaaccccgacgcctcgggctccagctgcagcctggcccggacgcgctcccgagaaagctgcgccagcgtgcgccgcgcctcgtcggccgacgacatcgaggccatgcgcgccggggtgctgcccccgccaccgcgccacgccagcaccggggccatgcacccactgcgcagcggcttgctcaactccacctcggactccgacctcgtgcgctaccgcaccattagcaagattccccaaatcaccctcaactttgtggacctcaagggcgaccccttcttggcttcgcccaccagtgaccgtgagatcatagcacctaagataaaggagtgaacccacaatgtcactgagaaggtcacccaggtcctgtccctgggcgccgacgtgctgcctgagtacaagctgcaggcaccgcgcatccaccgctggaccatcctgcattacagccccttcaaggccgtgtgggactggctcatcctgctgctggtcatctacacggctgtcttcacaccctactcggctgccttcctgctgaaggagacggaagaaggcccgcctgctaccgagtgtggctacgcctgccagccgctggctgtggtggacctcatcgtggacatcatgttcattgtggacatcctcatcaacttccgcaccacctacgtcaatgccaacgaggaggtggtcagccaccccggccgcatcgccgtccactacttcaagggctggttcctcatcgacatggtggccgccatccccttcgacctgctcatcttcggctctggctctgaggagctgatcgggctgctgaagactgcgcggctgctgcggctggtgcgcgtggcgcggaagctggatcgctactcagagtacggcgcggccgtgctgttcttgctcatgtgcacctttgcgctcatcgcgcactggctagcctgcatctggtacgccatcggcaacatggagcagccacacatggactcacgcatcggctggctgcacaacctgggcgaccagataggcaaaccctacaacagcagcggcctgggcggcccctccatcaaggacaagtatgtgacggcgctctacttcaccttcagcagcctcaccagtgtgggcttcggcaacgtctctcccaacaccaactcagagaagatcttctccatctgcgtcatgctcattggctccctcatgtatgctagcatcttcggcaacgtgtcggccatcatccagcggctgtactcgggcacagcccgctaccacacacagatgctgcgggtgcgggagttcatccgcttccaccagatccccaatcccctgcgccagcgcctcgaggagtacttccagcacgcctggtcctacaccaacggcatcgacatgaacgcggtgctgaagggcttccctgagtgcctgcaggctgacatctgcctgcacctgaaccgctcactgctgcagcactgcaaacccttccgaggggccaccaagggctgccttcgggccctggccatgaagttcaagaccacacatgcaccgccaggggacacactggtgcatgctggggacctgctcaccgccctgtacttcatctcccggggctccatcgagatcctgcggggcgacgtcgtcgtggccatcctggggaagaatgacatctttggggagcctctgaacctgtatgcaaggcctggcaagtcgaacggggatgtgcgggccctcacctactgtgacctacacaagatccatcgggacgacctgctggaggtgctggacatgtaccctgagttctccgaccacttctggtccagcctggagatcaccttcaacctgcgagataccaacatgatcccgggctcccccggcagtacggagttagagggtggcttcagtcggcaacgcaagcgcaagttgtccttccgcaggcgcacggacaaggacacggagcagccaggggaggtgtcggccttggggccgggccgggcgggggcagggccgagtagccggggccggccgggggggccgtggggggagagcccgtccagtggcccctccagccctgagagcagtgaggatgagggcccaggccgcagctccagccccctccgcctggtgcccttctccagccccaggccccccggagagccgccgggtggggagcccctgatggaggactgcgagaagagcagcgacacttgcaaccccctgtcaggcgccttctcaggagtgtccaacattttcagcttctggggggacagtcggggccgccagtaccaggagctccctcgatgccccgcccccacccccagcctcctcaacatccccctctccagcccgggtcggcggccccggggcgacgtggagagcaggctggatgccctccagcgccagctcaacaggctggagacccggctgagtgcagacatggccactgtcctgcagctgctacagaggcagatgacgctggtcccgcccgcctacagtgctgtgaccaccccggggcctggccccacttccacatccccgctgttgcccgtcagccccctccccaccctcaccttggactcgctttctcaggtttcccagttcatggcgtgtgaggagctgcccccgggggccccagagcttccccaagaaggccccacacgacgcctctccctaccgggccagctgggggccctcacctcccagcccctgcacagacacggctcggacccgggcagttagtggggctgcccagtgtggacacgtggctcacccagggatcaaggcgctgctgggccgctccccttggaggccctgctcaggaggccctgaccgtggaaggggagaggaactcgaaagcacagctcctcccccagcccttgggaccatcttctcctgcagtcccctgggccccagtgagaggggcaggggcagggccggcagtaggtggggcctgtggtccccccactgccctgagggcattagctggtctaactgcccggaggcacccggccctgggccttaggcacctcaaggacttttctgctatttactgctcttattgttaaggataataattaaggatcatatgaataattaatgaagatgctgatgactatgaataataaataattatcctgaggaga

SEQ ID NO: 22 - DNA, 3884 bp, Homo sapiens
  source 1..3884: mol_type = genomic DNA
  misc_feature 1..3884: note = cDNA of KCNH2 gene SNP c.1097G>A (p.Arg366Gln)
atgccggtgcggaggggccacgtcgcgccgcagaacaccttcctggacaccatcatccgcaagtttgagggccagagccgtaagttcatcatcgccaacgctcgggtggagaactgcgccgtcatctactgcaacgacggcttctgcgagctgtgcggctactcgcgggccgaggtgatgcagcgaccctgcacctgcgacttcctgcacgggccgcgcacgcagcgccgcgctgccgcgcagatcgcgcaggcactgctgggcgccgaggagcgcaaagtggaaatcgccttctaccggaaagatgggagctgcttcctatgtctggtggatgtggtgcccgtgaagaacgaggatggggctgtcatcatgttcatcctcaatttcgaggtggtgatggagaaggacatggtggggtccccggctcatgacaccaaccaccggggcccccccaccagctggctggccccaggccgcgccaagaccttccgcctgaagctgcccgcgctgctggcgctgacggcccgggagtcgtcggtgcggtcgggcggcgcgggcggcgcgggcgccccgggggccgtggtggtggacgtggacctgacgcccgcggcacccagcagcgagtcgctggccctggacgaagtgacagccatggacaaccacgtggcagggctcgggcccgcggaggagcggcgtgcgctggtgggtcccggctctccgccccgcagcgcgcccggccagctcccatcgccccgggcgcacagcctcaaccccgacgcctcgggctccagctgcagcctggcccggacgcgctcccgagaaagctgcgccagcgtgcgccgcgcctcgtcggccgacgacatcgaggccatgcgcgccggggtgctgcccccgccaccgcgccacgccagcaccggggccatgcacccactgcgcagcggcttgctcaactccacctcggactccgacctcgtgcgctaccgcaccattagcaagattccccaaatcaccctcaactttgtggacctcaagggcgaccccttcttggcttcgcccaccagtgaccgtgagatcatagcacctaagataaaggagcaaacccacaatgtcactgagaaggtcacccaggtcctgtccctgggcgccgacgtgctgcctgagtacaagctgcaggcaccgcgcatccaccgctggaccatcctgcattacagccccttcaaggccgtgtgggactggctcatcctgctgctggtcatctacacggctgtcttcacaccctactcggctgccttcctgctgaaggagacggaagaaggcccgcctgctaccgagtgtggctacgcctgccagccgctggctgtggtggacctcatcgtggacatcatgttcattgtggacatcctcatcaacttccgcaccacctacgtcaatgccaacgaggaggtggtcagccaccccggccgcatcgccgtccactacttcaagggctggttcctcatcgacatggtggccgccatccccttcgacctgctcatcttcggctctggctctgaggagctgatcgggctgctgaagactgcgcggctgctgcggctggtgcgcgtggcgcggaagctggatcgctactcagagtacggcgcggccgtgctgttcttgctcatgtgcacctttgcgctcatcgcgcactggctagcctgcatctggtacgccatcggcaacatggagcagccacacatggactcacgcatcggctggctgcacaacctgggcgaccagataggcaaaccctacaacagcagcggcctgggcggcccctccatcaaggacaagtatgtgacggcgctctacttcaccttcagcagcctcaccagtgtgggcttcggcaacgtctctcccaacaccaactcagagaagatcttctccatctgcgtcatgctcattggctccctcatgtatgctagcatcttcggcaacgtgtcggccatcatccagcggctgtactcgggcacagcccgctaccacacacagatgctgcgggtgcgggagttcatccgcttccaccagatccccaatcccctgcgccagcgcctcgaggagtacttccagcacgcctggtcctacaccaacggcatcgacatgaacgcggtgctgaagggcttccctgagtgcctgcaggctgacatctgcctgcacctgaaccgctcactgctgcagcactgcaaacccttccgaggggccaccaagggctgccttcgggccctggccatgaagttcaagaccacacatgcaccgccaggggacacactggtgcatgctggggacctgctcaccgccctgtacttcatctcccggggctccatcgagatcctgcggggcgacgtcgtcgtggccatcctggggaagaatgacatctttggggagcctctgaacctgtatgcaaggcctggcaagtcgaacggggatgtgcgggccctcacctactgtgacctacacaagatccatcgggacgacctgctggaggtgctggacatgtaccctgagttctccgaccacttctggtccagcctggagatcaccttcaacctgcgagataccaacatgatcccgggctcccccggcagtacggagttagagggtggcttcagtcggcaacgcaagcgcaagttgtccttccgcaggcgcacggacaaggacacggagcagccaggggaggtgtcggccttggggccgggccgggcgggggcagggccgagtagccggggccggccgggggggccgtggggggagagcccgtccagtggcccctccagccctgagagcagtgaggatgagggcccaggccgcagctccagccccctccgcctggtgcccttctccagccccaggccccccggagagccgccgggtggggagcccctgatggaggactgcgagaagagcagcgacacttgcaaccccctgtcaggcgccttctcaggagtgtccaacattttcagcttctggggggacagtcggggccgccagtaccaggagctccctcgatgccccgcccccacccccagcctcctcaacatccccctctccagcccgggtcggcggccccggggcgacgtggagagcaggctggatgccctccagcgccagctcaacaggctggagacccggctgagtgcagacatggccactgtcctgcagctgctacagaggcagatgacgctggtcccgcccgcctacagtgctgtgaccaccccggggcctggccccacttccacatccccgctgttgcccgtcagccccctccccaccctcaccttggactcgctttctcaggtttcccagttcatggcgtgtgaggagctgcccccgggggccccagagcttccccaagaaggccccacacgacgcctctccctaccgggccagctgggggccctcacctcccagcccctgcacagacacggctcggacccgggcagttagtggggctgcccagtgtggacacgtggctcacccagggatcaaggcgctgctgggccgctccccttggaggccctgctcaggaggccctgaccgtggaaggggagaggaactcgaaagcacagctcctcccccagcccttgggaccatcttctcctgcagtcccctgggccccagtgagaggggcaggggcagggccggcagtaggtggggcctgtggtccccccactgccctgagggcattagctggtctaactgcccggaggcacccggccctgggccttaggcacctcaaggacttttctgctatttactgctcttattgttaaggataataattaaggatcatatgaataattaatgaagatgctgatgactatgaataataaataattatcctgaggaga

SEQ ID NO: 23 - DNA, 3884 bp, Homo sapiens
  source 1..3884: mol_type = genomic DNA
  misc_feature 1..3884: note = cDNA of KCNH2 gene SNP c.1099A>G (p.Thr367Ala)
atgccggtgcggaggggccacgtcgcgccgcagaacaccttcctggacaccatcatccgcaagtttgagggccagagccgtaagttcatcatcgccaacgctcgggtggagaactgcgccgtcatctactgcaacgacggcttctgcgagctgtgcggctactcgcgggccgaggtgatgcagcgaccctgcacctgcgacttcctgcacgggccgcgcacgcagcgccgcgctgccgcgcagatcgcgcaggcactgctgggcgccgaggagcgcaaagtggaaatcgccttctaccggaaagatgggagctgcttcctatgtctggtggatgtggtgcccgtgaagaacgaggatggggctgtcatcatgttcatcctcaatttcgaggtggtgatggagaaggacatggtggggtccccggctcatgacaccaaccaccggggcccccccaccagctggctggccccaggccgcgccaagaccttccgcctgaagctgcccgcgctgctggcgctgacggcccgggagtcgtcggtgcggtcgggcggcgcgggcggcgcgggcgccccgggggccgtggtggtggacgtggacctgacgcccgcggcacccagcagcgagtcgctggccctggacgaagtgacagccatggacaaccacgtggcagggctcgggcccgcggaggagcggcgtgcgctggtgggtcccggctctccgccccgcagcgcgcccggccagctcccatcgccccgggcgcacagcctcaaccccgacgcctcgggctccagctgcagcctggcccggacgcgctcccgagaaagctgcgccagcgtgcgccgcgcctcgtcggccgacgacatcgaggccatgcgcgccggggtgctgcccccgccaccgcgccacgccagcaccggggccatgcacccactgcgcagcggcttgctcaactccacctcggactccgacctcgtgcgctaccgcaccattagcaagattccccaaatcaccctcaactttgtggacctcaagggcgaccccttcttggcttcgcccaccagtgaccgtgagatcatagcacctaagataaaggagcgagcccacaatgtcactgagaaggtcacccaggtcctgtccctgggcgccgacgtgctgcctgagtacaagctgcaggcaccgcgcatccaccgctggaccatcctgcattacagccccttcaaggccgtgtgggactggctcatcctgctgctggtcatctacacggctgtcttcacaccctactcggctgccttcctgctgaaggagacggaagaaggcccgcctgctaccgagtgtggctacgcctgccagccgctggctgtggtggacctcatcgtggacatcatgttcattgtggacatcctcatcaacttccgcaccacctacgtcaatgccaacgaggaggtggtcagccaccccggccgcatcgccgtccactacttcaagggctggttcctcatcgacatggtggccgccatccccttcgacctgctcatcttcggctctggctctgaggagctgatcgggctgctgaagactgcgcggctgctgcggctggtgcgcgtggcgcggaagctggatcgctactcagagtacggcgcggccgtgctgttcttgctcatgtgcacctttgcgctcatcgcgcactggctagcctgcatctggtacgccatcggcaacatggagcagccacacatggactcacgcatcggctggctgcacaacctgggcgaccagataggcaaaccctacaacagcagcggcctgggcggcccctccatcaaggacaagtatgtgacggcgctctacttcaccttcagcagcctcaccagtgtgggcttcggcaacgtctctcccaacaccaactcagagaagatcttctccatctgcgtcatgctcattggctccctcatgtatgctagcatcttcggcaacgtgtcggccatcatccagcggctgtactcgggcacagcccgctaccacacacagatgctgcgggtgcgggagttcatccgcttccaccagatccccaatcccctgcgccagcgcctcgaggagtacttccagcacgcctggtcctacaccaacggcatcgacatgaacgcggtgctgaagggcttccctgagtgcctgcaggctgacatctgcctgcacctgaaccgctcactgctgcagcactgcaaacccttccgaggggccaccaagggctgccttcgggccctggccatgaagttcaagaccacacatgcaccgccaggggacacactggtgcatgctggggacctgctcaccgccctgtacttcatctcccggggctccatcgagatcctgcggggcgacgtcgtcgtggccatcctggggaagaatgacatctttggggagcctctgaacctgtatgcaaggcctggcaagtcgaacggggatgtgcgggccctcacctactgtgacctacacaagatccatcgggacgacctgctggaggtgctggacatgtaccctgagttctccgaccacttctggtccagcctggagatcaccttcaacctgcgagataccaacatgatcccgggctcccccggcagtacggagttagagggtggcttcagtcggcaacgcaagcgcaagttgtccttccgcaggcgcacggacaaggacacggagcagccaggggaggtgtcggccttggggccgggccgggcgggggcagggccgagtagccggggccggccgggggggccgtggggggagagcccgtccagtggcccctccagccctgagagcagtgaggatgagggcccaggccgcagctccagccccctccgcctggtgcccttctccagccccaggccccccggagagccgccgggtggggagcccctgatggaggactgcgagaagagcagcgacacttgcaaccccctgtcaggcgccttctcaggagtgtccaacattttcagcttctggggggacagtcggggccgccagtaccaggagctccctcgatgccccgcccccacccccagcctcctcaacatccccctctccagcccgggtcggcggccccggggcgacgtggagagcaggctggatgccctccagcgccagctcaacaggctggagacccggctgagtgcagacatggccactgtcctgcagctgctacagaggcagatgacgctggtcccgcccgcctacagtgctgtgaccaccccggggcctggccccacttccacatccccgctgttgcccgtcagccccctccccaccctcaccttggactcgctttctcaggtttcccagttcatggcgtgtgaggagctgcccccgggggccccagagcttccccaagaaggccccacacgacgcctctccctaccgggccagctgggggccctcacctcccagcccctgcacagacacggctcggacccgggcagttagtggggctgcccagtgtggacacgtggctcacccagggatcaaggcgctgctgggccgctccccttggaggccctgctcaggaggccctgaccgtggaaggggagaggaactcgaaagcacagctcctcccccagcccttgggaccatcttctcctgcagtcccctgggccccagtgagaggggcaggggcagggccggcagtaggtggggcctgtggtccccccactgccctgagggcattagctggtctaactgcccggaggcacccggccctgggccttaggcacctcaaggacttttctgctatttactgctcttattgttaaggataataattaaggatcatatgaataattaatgaagatgctgatgactatgaataataaataattatcctgaggaga

SEQ ID NO: 24 - DNA, 3884 bp, Homo sapiens
  source 1..3884: mol_type = genomic DNA
  misc_feature 1..3884: note = cDNA of KCNH2 gene SNP c.1099A>T (p.Thr367Ser)
atgccggtgcggaggggccacgtcgcgccgcagaacaccttcctggacaccatcatccgcaagtttgagggccagagccgtaagttcatcatcgccaacgctcgggtggagaactgcgccgtcatctactgcaacgacggcttctgcgagctgtgcggctactcgcgggccgaggtgatgcagcgaccctgcacctgcgacttcctgcacgggccgcgcacgcagcgccgcgctgccgcgcagatcgcgcaggcactgctgggcgccgaggagcgcaaagtggaaatcgccttctaccggaaagatgggagctgcttcctatgtctggtggatgtggtgcccgtgaagaacgaggatggggctgtcatcatgttcatcctcaatttcgaggtggtgatggagaaggacatggtggggtccccggctcatgacaccaaccaccggggcccccccaccagctggctggccccaggccgcgccaagaccttccgcctgaagctgcccgcgctgctggcgctgacggcccgggagtcgtcggtgcggtcgggcggcgcgggcggcgcgggcgccccgggggccgtggtggtggacgtggacctgacgcccgcggcacccagcagcgagtcgctggccctggacgaagtgacagccatggacaaccacgtggcagggctcgggcccgcggaggagcggcgtgcgctggtgggtcccggctctccgccccgcagcgcgcccggccagctcccatcgccccgggcgcacagcctcaaccccgacgcctcgggctccagctgcagcctggcccggacgcgctcccgagaaagctgcgccagcgtgcgccgcgcctcgtcggccgacgacatcgaggccatgcgcgccggggtgctgcccccgccaccgcgccacgccagcaccggggccatgcacccactgcgcagcggcttgctcaactccacctcggactccgacctcgtgcgctaccgcaccattagcaagattccccaaatcaccctcaactttgtggacctcaagggcgaccccttcttggcttcgcccaccagtgaccgtgagatcatagcacctaagataaaggagcgatcccacaatgtcactgagaaggtcacccaggtcctgtccctgggcgccgacgtgctgcctgagtacaagctgcaggcaccgcgcatccaccgctggaccatcctgcattacagccccttcaaggccgtgtgggactggctcatcctgctgctggtcatctacacggctgtcttcacaccctactcggctgccttcctgctgaaggagacggaagaaggcccgcctgctaccgagtgtggctacgcctgccagccgctggctgtggtggacctcatcgtggacatcatgttcattgtggacatcctcatcaacttccgcaccacctacgtcaatgccaacgaggaggtggtcagccaccccggccgcatcgccgtccactacttcaagggctggttcctcatcgacatggtggccgccatccccttcgacctgctcatcttcggctctggctctgaggagctgatcgggctgctgaagactgcgcggctgctgcggctggtgcgcgtggcgcggaagctggatcgctactcagagtacggcgcggccgtgctgttcttgctcatgtgcacctttgcgctcatcgcgcactggctagcctgcatctggtacgccatcggcaacatggagcagccacacatggactcacgcatcggctggctgcacaacctgggcgaccagataggcaaaccctacaacagcagcggcctgggcggcccctccatcaaggacaagtatgtgacggcgctctacttcaccttcagcagcctcaccagtgtgggcttcggcaacgtctctcccaacaccaactcagagaagatcttctccatctgcgtcatgctcattggctccctcatgtatgctagcatcttcggcaacgtgtcggccatcatccagcggctgtactcgggcacagcccgctaccacacacagatgctgcgggtgcgggagttcatccgcttccaccagatccccaatcccctgcgccagcgcctcgaggagtacttccagcacgcctggtcctacaccaacggcatcgacatgaacgcggtgctgaagggcttccctgagtgcctgcaggctgacatctgcctgcacctgaaccgctcactgctgcagcactgcaaacccttccgaggggccaccaagggctgccttcgggccctggccatgaagttcaagaccacacatgcaccgccaggggacacactggtgcatgctggggacctgctcaccgccctgtacttcatctcccggggctccatcgagatcctgcggggcgacgtcgtcgtggccatcctggggaagaatgacatctttggggagcctctgaacctgtatgcaaggcctggcaagtcgaacggggatgtgcgggccctcacctactgtgacctacacaagatccatcgggacgacctgctggaggtgctggacatgtaccctgagttctccgaccacttctggtccagcctggagatcaccttcaacctgcgagataccaacatgatcccgggctcccccggcagtacggagttagagggtggcttcagtcggcaacgcaagcgcaagttgtccttccgcaggcgcacggacaaggacacggagcagccaggggaggtgtcggccttggggccgggccgggcgggggcagggccgagtagccggggccggccgggggggccgtggggggagagcccgtccagtggcccctccagccctgagagcagtgaggatgagggcccaggccgcagctccagccccctccgcctggtgcccttctccagccccaggccccccggagagccgccgggtggggagcccctgatggaggactgcgagaagagcagcgacacttgcaaccccctgtcaggcgccttctcaggagtgtccaacattttcagcttctggggggacagtcggggccgccagtaccaggagctccctcgatgccccgcccccacccccagcctcctcaacatccccctctccagcccgggtcggcggccccggggcgacgtggagagcaggctggatgccctccagcgccagctcaacaggctggagacccggctgagtgcagacatggccactgtcctgcagctgctacagaggcagatgacgctggtcccgcccgcctacagtgctgtgaccaccccggggcctggccccacttccacatccccgctgttgcccgtcagccccctccccaccctcaccttggactcgctttctcaggtttcccagttcatggcgtgtgaggagctgcccccgggggccccagagcttccccaagaaggccccacacgacgcctctccctaccgggccagctgggggccctcacctcccagcccctgcacagacacggctcggacccgggcagttagtggggctgcccagtgtggacacgtggctcacccagggatcaaggcgctgctgggccgctccccttggaggccctgctcaggaggccctgaccgtggaaggggagaggaactcgaaagcacagctcctcccccagcccttgggaccatcttctcctgcagtcccctgggccccagtgagaggggcaggggcagggccggcagtaggtggggcctgtggtccccccactgccctgagggcattagctggtctaactgcccggaggcacccggccctgggccttaggcacctcaaggacttttctgctatttactgctcttattgttaaggataataattaaggatcatatgaataattaatgaagatgctgatgactatgaataataaataattatcctgaggaga

SEQ ID NO: 25 - DNA, 3884 bp, Homo sapiens
  source 1..3884: mol_type = genomic DNA
  misc_feature 1..3884: note = cDNA of KCNH2 gene SNP c.1126C>G (p.Gln376Glu)
atgccggtgcggaggggccacgtcgcgccgcagaacaccttcctggacaccatcatccgcaagtttgagggccagagccgtaagttcatcatcgccaacgctcgggtggagaactgcgccgtcatctactgcaacgacggcttctgcgagctgtgcggctactcgcgggccgaggtgatgcagcgaccctgcacctgcgacttcctgcacgggccgcgcacgcagcgccgcgctgccgcgcagatcgcgcaggcactgctgggcgccgaggagcgcaaagtggaaatcgccttctaccggaaagatgggagctgcttcctatgtctggtggatgtggtgcccgtgaagaacgaggatggggctgtcatcatgttcatcctcaatttcgaggtggtgatggagaaggacatggtggggtccccggctcatgacaccaaccaccggggcccccccaccagctggctggccccaggccgcgccaagaccttccgcctgaagctgcccgcgctgctggcgctgacggcccgggagtcgtcggtgcggtcgggcggcgcgggcggcgcgggcgccccgggggccgtggtggtggacgtggacctgacgcccgcggcacccagcagcgagtcgctggccctggacgaagtgacagccatggacaaccacgtggcagggctcgggcccgcggaggagcggcgtgcgctggtgggtcccggctctccgccccgcagcgcgcccggccagctcccatcgccccgggcgcacagcctcaaccccgacgcctcgggctccagctgcagcctggcccggacgcgctcccgagaaagctgcgccagcgtgcgccgcgcctcgtcggccgacgacatcgaggccatgcgcgccggggtgctgcccccgccaccgcgccacgccagcaccggggccatgcacccactgcgcagcggcttgctcaactccacctcggactccgacctcgtgcgctaccgcaccattagcaagattccccaaatcaccctcaactttgtggacctcaagggcgaccccttcttggcttcgcccaccagtgaccgtgagatcatagcacctaagataaaggagcgaacccacaatgtcactgagaaggtcaccgaggtcctgtccctgggcgccgacgtgctgcctgagtacaagctgcaggcaccgcgcatccaccgctggaccatcctgcattacagccccttcaaggccgtgtgggactggctcatcctgctgctggtcatctacacggctgtcttcacaccctactcggctgccttcctgctgaaggagacggaagaaggcccgcctgctaccgagtgtggctacgcctgccagccgctggctgtggtggacctcatcgtggacatcatgttcattgtggacatcctcatcaacttccgcaccacctacgtcaatgccaacgaggaggtggtcagccaccccggccgcatcgccgtccactacttcaagggctggttcctcatcgacatggtggccgccatccccttcgacctgctcatcttcggctctggctctgaggagctgatcgggctgctgaagactgcgcggctgctgcggctggtgcgcgtggcgcggaagctggatcgctactcagagtacggcgcggccgtgctgttcttgctcatgtgcacctttgcgctcatcgcgcactggctagcctgcatctggtacgccatcggcaacatggagcagccacacatggactcacgcatcggctggctgcacaacctgggcgaccagataggcaaaccctacaacagcagcggcctgggcggcccctccatcaaggacaagtatgtgacggcgctctacttcaccttcagcagcctcaccagtgtgggcttcggcaacgtctctcccaacaccaactcagagaagatcttctccatctgcgtcatgctcattggctccctcatgtatgctagcatcttcggcaacgtgtcggccatcatccagcggctgtactcgggcacagcccgctaccacacacagatgctgcgggtgcgggagttcatccgcttccaccagatccccaatcccctgcgccagcgcctcgaggagtacttccagcacgcctggtcctacaccaacggcatcgacatgaacgcggtgctgaagggcttccctgagtgcctgcaggctgacatctgcctgcacctgaaccgctcactgctgcagcactgcaaacccttccgaggggccaccaagggctgccttcgggccctggccatgaagttcaagaccacacatgcaccgccaggggacacactggtgcatgctggggacctgctcaccgccctgtacttcatctcccggggctccatcgagatcctgcggggcgacgtcgtcgtggccatcctggggaagaatgacatctttggggagcctctgaacctgtatgcaaggcctggcaagtcgaacggggatgtgcgggccctcacctactgtgacctacacaagatccatcgggacgacctgctggaggtgctggacatgtaccctgagttctccgaccacttctggtccagcctggagatcaccttcaacctgcgagataccaacatgatcccgggctcccccggcagtacggagttagagggtggcttcagtcggcaacgcaagcgcaagttgtccttccgcaggcgcacggacaaggacacggagcagccaggggaggtgtcggccttggggccgggccgggcgggggcagggccgagtagccggggccggccgggggggccgtggggggagagcccgtccagtggcccctccagccctgagagcagtgaggatgagggcccaggccgcagctccagccccctccgcctggtgcccttctccagccccaggccccccggagagccgccgggtggggagcccctgatggaggactgcgagaagagcagcgacacttgcaaccccctgtcaggcgccttctcaggagtgtccaacattttcagcttctggggggacagtcggggccgccagtaccaggagctccctcgatgccccgcccccacccccagcctcctcaacatccccctctccagcccgggtcggcggccccggggcgacgtggagagcaggctggatgccctccagcgccagctcaacaggctggagacccggctgagtgcagacatggccactgtcctgcagctgctacagaggcagatgacgctggtcccgcccgcctacagtgctgtgaccaccccggggcctggccccacttccacatccccgctgttgcccgtcagccccctccccaccctcaccttggactcgctttctcaggtttcccagttcatggcgtgtgaggagctgcccccgggggccccagagcttccccaagaaggccccacacgacgcctctccctaccgggccagctgggggccctcacctcccagcccctgcacagacacggctcggacccgggcagttagtggggctgcccagtgtggacacgtggctcacccagggatcaaggcgctgctgggccgctccccttggaggccctgctcaggaggccctgaccgtggaaggggagaggaactcgaaagcacagctcctcccccagcccttgggaccatcttctcctgcagtcccctgggccccagtgagaggggcaggggcagggccggcagtaggtggggcctgtggtccccccactgccctgagggcattagctggtctaactgcccggaggcacccggccctgggccttaggcacctcaaggacttttctgctatttactgctcttattgttaaggataataattaaggatcatatgaataattaatgaagatgctgatgactatgaataataaataattatcctgaggaga

SEQ ID NO: 26 - DNA, 3884 bp, Homo sapiens
  source 1..3884: mol_type = genomic DNA
  misc_feature 1..3884: note = cDNA of KCNH2 gene SNP c.1149C>A (p.Asp383Glu)
atgccggtgcggaggggccacgtcgcgccgcagaacaccttcctggacaccatcatccgcaagtttgagggccagagccgtaagttcatcatcgccaacgctcgggtggagaactgcgccgtcatctactgcaacgacggcttctgcgagctgtgcggctactcgcgggccgaggtgatgcagcgaccctgcacctgcgacttcctgcacgggccgcgcacgcagcgccgcgctgccgcgcagatcgcgcaggcactgctgggcgccgaggagcgcaaagtggaaatcgccttctaccggaaagatgggagctgcttcctatgtctggtggatgtggtgcccgtgaagaacgaggatggggctgtcatcatgttcatcctcaatttcgaggtggtgatggagaaggacatggtggggtccccggctcatgacaccaaccaccggggcccccccaccagctggctggccccaggccgcgccaagaccttccgcctgaagctgcccgcgctgctggcgctgacggcccgggagtcgtcggtgcggtcgggcggcgcgggcggcgcgggcgccccgggggccgtggtggtggacgtggacctgacgcccgcggcacccagcagcgagtcgctggccctggacgaagtgacagccatggacaaccacgtggcagggctcgggcccgcggaggagcggcgtgcgctggtgggtcccggctctccgccccgcagcgcgcccggccagctcccatcgccccgggcgcacagcctcaaccccgacgcctcgggctccagctgcagcctggcccggacgcgctcccgagaaagctgcgccagcgtgcgccgcgcctcgtcggccgacgacatcgaggccatgcgcgccggggtgctgcccccgccaccgcgccacgccagcaccggggccatgcacccactgcgcagcggcttgctcaactccacctcggactccgacctcgtgcgctaccgcaccattagcaagattccccaaatcaccctcaactttgtggacctcaagggcgaccccttcttggcttcgcccaccagtgaccgtgagatcatagcacctaagataaaggagcgaacccacaatgtcactgagaaggtcacccaggtcctgtccctgggcgccgaagtgctgcctgagtacaagctgcaggcaccgcgcatccaccgctggaccatcctgcattacagccccttcaaggccgtgtgggactggctcatcctgctgctggtcatctacacggctgtcttcacaccctactcggctgccttcctgctgaaggagacggaagaaggcccgcctgctaccgagtgtggctacgcctgccagccgctggctgtggtggacctcatcgtggacatcatgttcattgtggacatcctcatcaacttccgcaccacctacgtcaatgccaacgaggaggtggtcagccaccccggccgcatcgccgtccactacttcaagggctggttcctcatcgacatggtggccgccatccccttcgacctgctcatcttcggctctggctctgaggagctgatcgggctgctgaagactgcgcggctgctgcggctggtgcgcgtggcgcggaagctggatcgctactcagagtacggcgcggccgtgctgttcttgctcatgtgcacctttgcgctcatcgcgcactggctagcctgcatctggtacgccatcggcaacatggagcagccacacatggactcacgcatcggctggctgcacaacctgggcgaccagataggcaaaccctacaacagcagcggcctgggcggcccctccatcaaggacaagtatgtgacggcgctctacttcaccttcagcagcctcaccagtgtgggcttcggcaacgtctctcccaacaccaactcagagaagatcttctccatctgcgtcatgctcattggctccctcatgtatgctagcatcttcggcaacgtgtcggccatcatccagcggctgtactcgggcacagcccgctaccacacacagatgctgcgggtgcgggagttcatccgcttccaccagatccccaatcccctgcgccagcgcctcgaggagtacttccagcacgcctggtcctacaccaacggcatcgacatgaacgcggtgctgaagggcttccctgagtgcctgcaggctgacatctgcctgcacctgaaccgctcactgctgcagcactgcaaacccttccgaggggccaccaagggctgccttcgggccctggccatgaagttcaagaccacacatgcaccgccaggggacacactggtgcatgctggggacctgctcaccgccctgtacttcatctcccggggctccatcgagatcctgcggggcgacgtcgtcgtggccatcctggggaagaatgacatctttggggagcctctgaacctgtatgcaaggcctggcaagtcgaacggggatgtgcgggccctcacctactgtgacctacacaagatccatcgggacgacctgctggaggtgctggacatgtaccctgagttctccgaccacttctggtccagcctggagatcaccttcaacctgcgagataccaacatgatcccgggctcccccggcagtacggagttagagggtggcttcagtcggcaacgcaagcgcaagttgtccttccgcaggcgcacggacaaggacacggagcagccaggggaggtgtcggccttggggccgggccgggcgggggcagggccgagtagccggggccggccgggggggccgtggggggagagcccgtccagtggcccctccagccctgagagcagtgaggatgagggcccaggccgcagctccagccccctccgcctggtgcccttctccagccccaggccccccggagagccgccgggtggggagcccctgatggaggactgcgagaagagcagcgacacttgcaaccccctgtcaggcgccttctcaggagtgtccaacattttcagcttctggggggacagtcggggccgccagtaccaggagctccctcgatgccccgcccccacccccagcctcctcaacatccccctctccagcccgggtcggcggccccggggcgacgtggagagcaggctggatgccctccagcgccagctcaacaggctggagacccggctgagtgcagacatggccactgtcctgcagctgctacagaggcagatgacgctggtcccgcccgcctacagtgctgtgaccaccccggggcctggccccacttccacatccccgctgttgcccgtcagccccctccccaccctcaccttggactcgctttctcaggtttcccagttcatggcgtgtgaggagctgcccccgggggccccagagcttccccaagaaggccccacacgacgcctctccctaccgggccagctgggggccctcacctcccagcccctgcacagacacggctcggacccgggcagttagtggggctgcccagtgtggacacgtggctcacccagggatcaaggcgctgctgggccgctccccttggaggccctgctcaggaggccctgaccgtggaaggggagaggaactcgaaagcacagctcctcccccagcccttgggaccatcttctcctgcagtcccctgggccccagtgagaggggcaggggcagggccggcagtaggtggggcctgtggtccccccactgccctgagggcattagctggtctaactgcccggaggcacccggccctgggccttaggcacctcaaggacttttctgctatttactgctcttattgttaaggataataattaaggatcatatgaataattaatgaagatgctgatgactatgaataataaataattatcctgaggaga

SEQ ID NO: 27 - DNA, 3884 bp, Homo sapiens
  source 1..3884: mol_type = genomic DNA
  misc_feature 1..3884: note = cDNA of KCNH2 gene SNP c.115T>C (p.Cys39Arg)
atgccggtgcggaggggccacgtcgcgccgcagaacaccttcctggacaccatcatccgcaagtttgagggccagagccgtaagttcatcatcgccaacgctcgggtggagaaccgcgccgtcatctactgcaacgacggcttctgcgagctgtgcggctactcgcgggccgaggtgatgcagcgaccctgcacctgcgacttcctgcacgggccgcgcacgcagcgccgcgctgccgcgcagatcgcgcaggcactgctgggcgccgaggagcgcaaagtggaaatcgccttctaccggaaagatgggagctgcttcctatgtctggtggatgtggtgcccgtgaagaacgaggatggggctgtcatcatgttcatcctcaatttcgaggtggtgatggagaaggacatggtggggtccccggctcatgacaccaaccaccggggcccccccaccagctggctggccccaggccgcgccaagaccttccgcctgaagctgcccgcgctgctggcgctgacggcccgggagtcgtcggtgcggtcgggcggcgcgggcggcgcgggcgccccgggggccgtggtggtggacgtggacctgacgcccgcggcacccagcagcgagtcgctggccctggacgaagtgacagccatggacaaccacgtggcagggctcgggcccgcggaggagcggcgtgcgctggtgggtcccggctctccgccccgcagcgcgcccggccagctcccatcgccccgggcgcacagcctcaaccccgacgcctcgggctccagctgcagcctggcccggacgcgctcccgagaaagctgcgccagcgtgcgccgcgcctcgtcggccgacgacatcgaggccatgcgcgccggggtgctgcccccgccaccgcgccacgccagcaccggggccatgcacccactgcgcagcggcttgctcaactccacctcggactccgacctcgtgcgctaccgcaccattagcaagattccccaaatcaccctcaactttgtggacctcaagggcgaccccttcttggcttcgcccaccagtgaccgtgagatcatagcacctaagataaaggagcgaacccacaatgtcactgagaaggtcacccaggtcctgtccctgggcgccgacgtgctgcctgagtacaagctgcaggcaccgcgcatccaccgctggaccatcctgcattacagccccttcaaggccgtgtgggactggctcatcctgctgctggtcatctacacggctgtcttcacaccctactcggctgccttcctgctgaaggagacggaagaaggcccgcctgctaccgagtgtggctacgcctgccagccgctggctgtggtggacctcatcgtggacatcatgttcattgtggacatcctcatcaacttccgcaccacctacgtcaatgccaacgaggaggtggtcagccaccccggccgcatcgccgtccactacttcaagggctggttcctcatcgacatggtggccgccatccccttcgacctgctcatcttcggctctggctctgaggagctgatcgggctgctgaagactgcgcggctgctgcggctggtgcgcgtggcgcggaagctggatcgctactcagagtacggcgcggccgtgctgttcttgctcatgtgcacctttgcgctcatcgcgcactggctagcctgcatctggtacgccatcggcaacatggagcagccacacatggactcacgcatcggctggctgcacaacctgggcgaccagataggcaaaccctacaacagcagcggcctgggcggcccctccatcaaggacaagtatgtgacggcgctctacttcaccttcagcagcctcaccagtgtgggcttcggcaacgtctctcccaacaccaactcagagaagatcttctccatctgcgtcatgctcattggctccctcatgtatgctagcatcttcggcaacgtgtcggccatcatccagcggctgtactcgggcacagcccgctaccacacacagatgctgcgggtgcgggagttcatccgcttccaccagatccccaatcccctgcgccagcgcctcgaggagtacttccagcacgcctggtcctacaccaacggcatcgacatgaacgcggtgctgaagggcttccctgagtgcctgcaggctgacatctgcctgcacctgaaccgctcactgctgcagcactgcaaacccttccgaggggccaccaagggctgccttcgggccctggccatgaagttcaagaccacacatgcaccgccaggggacacactggtgcatgctggggacctgctcaccgccctgtacttcatctcccggggctccatcgagatcctgcggggcgacgtcgtcgtggccatcctggggaagaatgacatctttggggagcctctgaacctgtatgcaaggcctggcaagtcgaacggggatgtgcgggccctcacctactgtgacctacacaagatccatcgggacgacctgctggaggtgctggacatgtaccctgagttctccgaccacttctggtccagcctggagatcaccttcaacctgcgagataccaacatgatcccgggctcccccggcagtacggagttagagggtggcttcagtcggcaacgcaagcgcaagttgtccttccgcaggcgcacggacaaggacacggagcagccaggggaggtgtcggccttggggccgggccgggcgggggcagggccgagtagccggggccggccgggggggccgtggggggagagcccgtccagtggcccctccagccctgagagcagtgaggatgagggcccaggccgcagctccagccccctccgcctggtgcccttctccagccccaggccccccggagagccgccgggtggggagcccctgatggaggactgcgagaagagcagcgacacttgcaaccccctgtcaggcgccttctcaggagtgtccaacattttcagcttctggggggacagtcggggccgccagtaccaggagctccctcgatgccccgcccccacccccagcctcctcaacatccccctctccagcccgggtcggcggccccggggcgacgtggagagcaggctggatgccctccagcgccagctcaacaggctggagacccggctgagtgcagacatggccactgtcctgcagctgctacagaggcagatgacgctggtcccgcccgcctacagtgctgtgaccaccccggggcctggccccacttccacatccccgctgttgcccgtcagccccctccccaccctcaccttggactcgctttctcaggtttcccagttcatggcgtgtgaggagctgcccccgggggccccagagcttccccaagaaggccccacacgacgcctctccctaccgggccagctgggggccctcacctcccagcccctgcacagacacggctcggacccgggcagttagtggggctgcccagtgtggacacgtggctcacccagggatcaaggcgctgctgggccgctccccttggaggccctgctcaggaggccctgaccgtggaaggggagaggaactcgaaagcacagctcctcccccagcccttgggaccatcttctcctgcagtcccctgggccccagtgagaggggcaggggcagggccggcagtaggtggggcctgtggtccccccactgccctgagggcattagctggtctaactgcccggaggcacccggccctgggccttaggcacctcaaggacttttctgctatttactgctcttattgttaaggataataattaaggatcatatgaataattaatgaagatgctgatgactatgaataataaataattatcctgaggaga

SEQ ID NO: 28 - DNA, 3884 bp, Homo sapiens
  source 1..3884: mol_type = genomic DNA
  misc_feature 1..3884: note = cDNA of KCNH2 gene SNP c.1178C>T (p.Pro393Leu)
atgccggtgcggaggggccacgtcgcgccgcagaacaccttcctggacaccatcatccgcaagtttgagggccagagccgtaagttcatcatcgccaacgctcgggtggagaactgcgccgtcatctactgcaacgacggcttctgcgagctgtgcggctactcgcgggccgaggtgatgcagcgaccctgcacctgcgacttcctgcacgggccgcgcacgcagcgccgcgctgccgcgcagatcgcgcaggcactgctgggcgccgaggagcgcaaagtggaaatcgccttctaccggaaagatgggagctgcttcctatgtctggtggatgtggtgcccgtgaagaacgaggatggggctgtcatcatgttcatcctcaatttcgaggtggtgatggagaaggacatggtggggtccccggctcatgacaccaaccaccggggcccccccaccagctggctggccccaggccgcgccaagaccttccgcctgaagctgcccgcgctgctggcgctgacggcccgggagtcgtcggtgcggtcgggcggcgcgggcggcgcgggcgccccgggggccgtggtggtggacgtggacctgacgcccgcggcacccagcagcgagtcgctggccctggacgaagtgacagccatggacaaccacgtggcagggctcgggcccgcggaggagcggcgtgcgctggtgggtcccggctctccgccccgcagcgcgcccggccagctcccatcgccccgggcgcacagcctcaaccccgacgcctcgggctccagctgcagcctggcccggacgcgctcccgagaaagctgcgccagcgtgcgccgcgcctcgtcggccgacgacatcgaggccatgcgcgccggggtgctgcccccgccaccgcgccacgccagcaccggggccatgcacccactgcgcagcggcttgctcaactccacctcggactccgacctcgtgcgctaccgcaccattagcaagattccccaaatcaccctcaactttgtggacctcaagggcgaccccttcttggcttcgcccaccagtgaccgtgagatcatagcacctaagataaaggagcgaacccacaatgtcactgagaaggtcacccaggtcctgtccctgggcgccgacgtgctgcctgagtacaagctgcaggcactgcgcatccaccgctggaccatcctgcattacagccccttcaaggccgtgtgggactggctcatcctgctgctggtcatctacacggctgtcttcacaccctactcggctgccttcctgctgaaggagacggaagaaggcccgcctgctaccgagtgtggctacgcctgccagccgctggctgtggtggacctcatcgtggacatcatgttcattgtggacatcctcatcaacttccgcaccacctacgtcaatgccaacgaggaggtggtcagccaccccggccgcatcgccgtccactacttcaagggctggttcctcatcgacatggtggccgccatccccttcgacctgctcatcttcggctctggctctgaggagctgatcgggctgctgaagactgcgcggctgctgcggctggtgcgcgtggcgcggaagctggatcgctactcagagtacggcgcggccgtgctgttcttgctcatgtgcacctttgcgctcatcgcgcactggctagcctgcatctggtacgccatcggcaacatggagcagccacacatggactcacgcatcggctggctgcacaacctgggcgaccagataggcaaaccctacaacagcagcggcctgggcggcccctccatcaaggacaagtatgtgacggcgctctacttcaccttcagcagcctcaccagtgtgggcttcggcaacgtctctcccaacaccaactcagagaagatcttctccatctgcgtcatgctcattggctccctcatgtatgctagcatcttcggcaacgtgtcggccatcatccagcggctgtactcgggcacagcccgctaccacacacagatgctgcgggtgcgggagttcatccgcttccaccagatccccaatcccctgcgccagcgcctcgaggagtacttccagcacgcctggtcctacaccaacggcatcgacatgaacgcggtgctgaagggcttccctgagtgcctgcaggctgacatctgcctgcacctgaaccgctcactgctgcagcactgcaaacccttccgaggggccaccaagggctgccttcgggccctggccatgaagttcaagaccacacatgcaccgccaggggacacactggtgcatgctggggacctgctcaccgccctgtacttcatctcccggggctccatcgagatcctgcggggcgacgtcgtcgtggccatcctggggaagaatgacatctttggggagcctctgaacctgtatgcaaggcctggcaagtcgaacggggatgtgcgggccctcacctactgtgacctacacaagatccatcgggacgacctgctggaggtgctggacatgtaccctgagttctccgaccacttctggtccagcctggagatcaccttcaacctgcgagataccaacatgatcccgggctcccccggcagtacggagttagagggtggcttcagtcggcaacgcaagcgcaagttgtccttccgcaggcgcacggacaaggacacggagcagccaggggaggtgtcggccttggggccgggccgggcgggggcagggccgagtagccggggccggccgggggggccgtggggggagagcccgtccagtggcccctccagccctgagagcagtgaggatgagggcccaggccgcagctccagccccctccgcctggtgcccttctccagccccaggccccccggagagccgccgggtggggagcccctgatggaggactgcgagaagagcagcgacacttgcaaccccctgtcaggcgccttctcaggagtgtccaacattttcagcttctggggggacagtcggggccgccagtaccaggagctccctcgatgccccgcccccacccccagcctcctcaacatccccctctccagcccgggtcggcggccccggggcgacgtggagagcaggctggatgccctccagcgccagctcaacaggctggagacccggctgagtgcagacatggccactgtcctgcagctgctacagaggcagatgacgctggtcccgcccgcctacagtgctgtgaccaccccggggcctggccccacttccacatccccgctgttgcccgtcagccccctccccaccctcaccttggactcgctttctcaggtttcccagttcatggcgtgtgaggagctgcccccgggggccccagagcttccccaagaaggccccacacgacgcctctccctaccgggccagctgggggccctcacctcccagcccctgcacagacacggctcggacccgggcagttagtggggctgcccagtgtggacacgtggctcacccagggatcaaggcgctgctgggccgctccccttggaggccctgctcaggaggccctgaccgtggaaggggagaggaactcgaaagcacagctcctcccccagcccttgggaccatcttctcctgcagtcccctgggccccagtgagaggggcaggggcagggccggcagtaggtggggcctgtggtccccccactgccctgagggcattagctggtctaactgcccggaggcacccggccctgggccttaggcacctcaaggacttttctgctatttactgctcttattgttaaggataataattaaggatcatatgaataattaatgaagatgctgatgactatgaataataaataattatcctgaggaga

SEQ ID NO: 29 - DNA, 3884 bp, Homo sapiens
  source 1..3884: mol_type = genomic DNA
  misc_feature 1..3884: note = cDNA of KCNH2 gene SNP c.1180C>T (p.Arg394Cys)
atgccggtgcggaggggccacgtcgcgccgcagaacaccttcctggacaccatcatccgcaagtttgagggccagagccgtaagttcatcatcgccaacgctcgggtggagaactgcgccgtcatctactgcaacgacggcttctgcgagctgtgcggctactcgcgggccgaggtgatgcagcgaccctgcacctgcgacttcctgcacgggccgcgcacgcagcgccgcgctgccgcgcagatcgcgcaggcactgctgggcgccgaggagcgcaaagtggaaatcgccttctaccggaaagatgggagctgcttcctatgtctggtggatgtggtgcccgtgaagaacgaggatggggctgtcatcatgttcatcctcaatttcgaggtggtgatggagaaggacatggtggggtccccggctcatgacaccaaccaccggggcccccccaccagctggctggccccaggccgcgccaagaccttccgcctgaagctgcccgcgctgctggcgctgacggcccgggagtcgtcggtgcggtcgggcggcgcgggcggcgcgggcgccccgggggccgtggtggtggacgtggacctgacgcccgcggcacccagcagcgagtcgctggccctggacgaagtgacagccatggacaaccacgtggcagggctcgggcccgcggaggagcggcgtgcgctggtgggtcccggctctccgccccgcagcgcgcccggccagctcccatcgccccgggcgcacagcctcaaccccgacgcctcgggctccagctgcagcctggcccggacgcgctcccgagaaagctgcgccagcgtgcgccgcgcctcgtcggccgacgacatcgaggccatgcgcgccggggtgctgcccccgccaccgcgccacgccagcaccggggccatgcacccactgcgcagcggcttgctcaactccacctcggactccgacctcgtgcgctaccgcaccattagcaagattccccaaatcaccctcaactttgtggacctcaagggcgaccccttcttggcttcgcccaccagtgaccgtgagatcatagcacctaagataaaggagcgaacccacaatgtcactgagaaggtcacccaggtcctgtccctgggcgccgacgtgctgcctgagtacaagctgcaggcaccgtgcatccaccgctggaccatcctgcattacagccccttcaaggccgtgtgggactggctcatcctgctgctggtcatctacacggctgtcttcacaccctactcggctgccttcctgctgaaggagacggaagaaggcccgcctgctaccgagtgtggctacgcctgccagccgctggctgtggtggacctcatcgtggacatcatgttcattgtggacatcctcatcaacttccgcaccacctacgtcaatgccaacgaggaggtggtcagccaccccggccgcatcgccgtccactacttcaagggctggttcctcatcgacatggtggccgccatccccttcgacctgctcatcttcggctctggctctgaggagctgatcgggctgctgaagactgcgcggctgctgcggctggtgcgcgtggcgcggaagctggatcgctactcagagtacggcgcggccgtgctgttcttgctcatgtgcacctttgcgctcatcgcgcactggctagcctgcatctggtacgccatcggcaacatggagcagccacacatggactcacgcatcggctggctgcacaacctgggcgaccagataggcaaaccctacaacagcagcggcctgggcggcccctccatcaaggacaagtatgtgacggcgctctacttcaccttcagcagcctcaccagtgtgggcttcggcaacgtctctcccaacaccaactcagagaagatcttctccatctgcgtcatgctcattggctccctcatgtatgctagcatcttcggcaacgtgtcggccatcatccagcggctgtactcgggcacagcccgctaccacacacagatgctgcgggtgcgggagttcatccgcttccaccagatccccaatcccctgcgccagcgcctcgaggagtacttccagcacgcctggtcctacaccaacggcatcgacatgaacgcggtgctgaagggcttccctgagtgcctgcaggctgacatctgcctgcacctgaaccgctcactgctgcagcactgcaaacccttccgaggggccaccaagggctgccttcgggccctggccatgaagttcaagaccacacatgcaccgccaggggacacactggtgcatgctggggacctgctcaccgccctgtacttcatctcccggggctccatcgagatcctgcggggcgacgtcgtcgtggccatcctggggaagaatgacatctttggggagcctctgaacctgtatgcaaggcctggcaagtcgaacggggatgtgcgggccctcacctactgtgacctacacaagatccatcgggacgacctgctggaggtgctggacatgtaccctgagttctccgaccacttctggtccagcctggagatcaccttcaacctgcgagataccaacatgatcccgggctcccccggcagtacggagttagagggtggcttcagtcggcaacgcaagcgcaagttgtccttccgcaggcgcacggacaaggacacggagcagccaggggaggtgtcggccttggggccgggccgggcgggggcagggccgagtagccggggccggccgggggggccgtggggggagagcccgtccagtggcccctccagccctgagagcagtgaggatgagggcccaggccgcagctccagccccctccgcctggtgcccttctccagccccaggccccccggagagccgccgggtggggagcccctgatggaggactgcgagaagagcagcgacacttgcaaccccctgtcaggcgccttctcaggagtgtccaacattttcagcttctggggggacagtcggggccgccagtaccaggagctccctcgatgccccgcccccacccccagcctcctcaacatccccctctccagcccgggtcggcggccccggggcgacgtggagagcaggctggatgccctccagcgccagctcaacaggctggagacccggctgagtgcagacatggccactgtcctgcagctgctacagaggcagatgacgctggtcccgcccgcctacagtgctgtgaccaccccggggcctggccccacttccacatccccgctgttgcccgtcagccccctccccaccctcaccttggactcgctttctcaggtttcccagttcatggcgtgtgaggagctgcccccgggggccccagagcttccccaagaaggccccacacgacgcctctccctaccgggccagctgggggccctcacctcccagcccctgcacagacacggctcggacccgggcagttagtggggctgcccagtgtggacacgtggctcacccagggatcaaggcgctgctgggccgctccccttggaggccctgctcaggaggccctgaccgtggaaggggagaggaactcgaaagcacagctcctcccccagcccttgggaccatcttctcctgcagtcccctgggccccagtgagaggggcaggggcagggccggcagtaggtggggcctgtggtccccccactgccctgagggcattagctggtctaactgcccggaggcacccggccctgggccttaggcacctcaaggacttttctgctatttactgctcttattgttaaggataataattaaggatcatatgaataattaatgaagatgctgatgactatgaataataaataattatcctgaggaga

SEQ ID NO: 30 - DNA, 3884 bp, Homo sapiens
  source 1..3884: mol_type = genomic DNA
  misc_feature 1..3884: note = cDNA of KCNH2 gene SNP c.1181G>A (p.Arg394His)
atgccggtgcggaggggccacgtcgcgccgcagaacaccttcctggacaccatcatccgcaagtttgagggccagagccgtaagttcatcatcgccaacgctcgggtggagaactgcgccgtcatctactgcaacgacggcttctgcgagctgtgcggctactcgcgggccgaggtgatgcagcgaccctgcacctgcgacttcctgcacgggccgcgcacgcagcgccgcgctgccgcgcagatcgcgcaggcactgctgggcgccgaggagcgcaaagtggaaatcgccttctaccggaaagatgggagctgcttcctatgtctggtggatgtggtgcccgtgaagaacgaggatggggctgtcatcatgttcatcctcaatttcgaggtggtgatggagaaggacatggtggggtccccggctcatgacaccaaccaccggggcccccccaccagctggctggccccaggccgcgccaagaccttccgcctgaagctgcccgcgctgctggcgctgacggcccgggagtcgtcggtgcggtcgggcggcgcgggcggcgcgggcgccccgggggccgtggtggtggacgtggacctgacgcccgcggcacccagcagcgagtcgctggccctggacgaagtgacagccatggacaaccacgtggcagggctcgggcccgcggaggagcggcgtgcgctggtgggtcccggctctccgccccgcagcgcgcccggccagctcccatcgccccgggcgcacagcctcaaccccgacgcctcgggctccagctgcagcctggcccggacgcgctcccgagaaagctgcgccagcgtgcgccgcgcctcgtcggccgacgacatcgaggccatgcgcgccggggtgctgcccccgccaccgcgccacgccagcaccggggccatgcacccactgcgcagcggcttgctcaactccacctcggactccgacctcgtgcgctaccgcaccattagcaagattccccaaatcaccctcaactttgtggacctcaagggcgaccccttcttggcttcgcccaccagtgaccgtgagatcatagcacctaagataaaggagcgaacccacaatgtcactgagaaggtcacccaggtcctgtccctgggcgccgacgtgctgcctgagtacaagctgcaggcaccgcacatccaccgctggaccatcctgcattacagccccttcaaggccgtgtgggactggctcatcctgctgctggtcatctacacggctgtcttcacaccctactcggctgccttcctgctgaaggagacggaagaaggcccgcctgctaccgagtgtggctacgcctgccagccgctggctgtggtggacctcatcgtggacatcatgttcattgtggacatcctcatcaacttccgcaccacctacgtcaatgccaacgaggaggtggtcagccaccccggccgcatcgccgtccactacttcaagggctggttcctcatcgacatggtggccgccatccccttcgacctgctcatcttcggctctggctctgaggagctgatcgggctgctgaagactgcgcggctgctgcggctggtgcgcgtggcgcggaagctggatcgctactcagagtacggcgcggccgtgctgttcttgctcatgtgcacctttgcgctcatcgcgcactggctagcctgcatctggtacgccatcggcaacatggagcagccacacatggactcacgcatcggctggctgcacaacctgggcgaccagataggcaaaccctacaacagcagcggcctgggcggcccctccatcaaggacaagtatgtgacggcgctctacttcaccttcagcagcctcaccagtgtgggcttcggcaacgtctctcccaacaccaactcagagaagatcttctccatctgcgtcatgctcattggctccctcatgtatgctagcatcttcggcaacgtgtcggccatcatccagcggctgtactcgggcacagcccgctaccacacacagatgctgcgggtgcgggagttcatccgcttccaccagatccccaatcccctgcgccagcgcctcgaggagtacttccagcacgcctggtcctacaccaacggcatcgacatgaacgcggtgctgaagggcttccctgagtgcctgcaggctgacatctgcctgcacctgaaccgctcactgctgcagcactgcaaacccttccgaggggccaccaagggctgccttcgggccctggccatgaagttcaagaccacacatgcaccgccaggggacacactggtgcatgctggggacctgctcaccgccctgtacttcatctcccggggctccatcgagatcctgcggggcgacgtcgtcgtggccatcctggggaagaatgacatctttggggagcctctgaacctgtatgcaaggcctggcaagtcgaacggggatgtgcgggccctcacctactgtgacctacacaagatccatcgggacgacctgctggaggtgctggacatgtaccctgagttctccgaccacttctggtccagcctggagatcaccttcaacctgcgagataccaacatgatcccgggctcccccggcagtacggagttagagggtggcttcagtcggcaacgcaagcgcaagttgtccttccgcaggcgcacggacaaggacacggagcagccaggggaggtgtcggccttggggccgggccgggcgggggcagggccgagtagccggggccggccgggggggccgtggggggagagcccgtccagtggcccctccagccctgagagcagtgaggatgagggcccaggccgcagctccagccccctccgcctggtgcccttctccagccccaggccccccggagagccgccgggtggggagcccctgatggaggactgcgagaagagcagcgacacttgcaaccccctgtcaggcgccttctcaggagtgtccaacattttcagcttctggggggacagtcggggccgccagtaccaggagctccctcgatgccccgcccccacccccagcctcctcaacatccccctctccagcccgggtcggcggccccggggcgacgtggagagcaggctggatgccctccagcgccagctcaacaggctggagacccggctgagtgcagacatggccactgtcctgcagctgctacagaggcagatgacgctggtcccgcccgcctacagtgctgtgaccaccccggggcctggccccacttccacatccccgctgttgcccgtcagccccctccccaccctcaccttggactcgctttctcaggtttcccagttcatggcgtgtgaggagctgcccccgggggccccagagcttccccaagaaggccccacacgacgcctctccctaccgggccagctgggggccctcacctcccagcccctgcacagacacggctcggacccgggcagttagtggggctgcccagtgtggacacgtggctcacccagggatcaaggcgctgctgggccgctccccttggaggccctgctcaggaggccctgaccgtggaaggggagaggaactcgaaagcacagctcctcccccagcccttgggaccatcttctcctgcagtcccctgggccccagtgagaggggcaggggcagggccggcagtaggtggggcctgtggtccccccactgccctgagggcattagctggtctaactgcccggaggcacccggccctgggccttaggcacctcaaggacttttctgctatttactgctcttattgttaaggataataattaaggatcatatgaataattaatgaagatgctgatgactatgaataataaataattatcctgaggaga

SEQ ID NO: 31 - DNA, 3884 bp, Homo sapiens
  source 1..3884: mol_type = genomic DNA
  misc_feature 1..3884: note = cDNA of KCNH2 gene SNP c.1189C>T (p.Arg397Cys)
atgccggtgcggaggggccacgtcgcgccgcagaacaccttcctggacaccatcatccgcaagtttgagggccagagccgtaagttcatcatcgccaacgctcgggtggagaactgcgccgtcatctactgcaacgacggcttctgcgagctgtgcggctactcgcgggccgaggtgatgcagcgaccctgcacctgcgacttcctgcacgggccgcgcacgcagcgccgcgctgccgcgcagatcgcgcaggcactgctgggcgccgaggagcgcaaagtggaaatcgccttctaccggaaagatgggagctgcttcctatgtctggtggatgtggtgcccgtgaagaacgaggatggggctgtcatcatgttcatcctcaatttcgaggtggtgatggagaaggacatggtggggtccccggctcatgacaccaaccaccggggcccccccaccagctggctggccccaggccgcgccaagaccttccgcctgaagctgcccgcgctgctggcgctgacggcccgggagtcgtcggtgcggtcgggcggcgcgggcggcgcgggcgccccgggggccgtggtggtggacgtggacctgacgcccgcggcacccagcagcgagtcgctggccctggacgaagtgacagccatggacaaccacgtggcagggctcgggcccgcggaggagcggcgtgcgctggtgggtcccggctctccgccccgcagcgcgcccggccagctcccatcgccccgggcgcacagcctcaaccccgacgcctcgggctccagctgcagcctggcccggacgcgctcccgagaaagctgcgccagcgtgcgccgcgcctcgtcggccgacgacatcgaggccatgcgcgccggggtgctgcccccgccaccgcgccacgccagcaccggggccatgcacccactgcgcagcggcttgctcaactccacctcggactccgacctcgtgcgctaccgcaccattagcaagattccccaaatcaccctcaactttgtggacctcaagggcgaccccttcttggcttcgcccaccagtgaccgtgagatcatagcacctaagataaaggagcgaacccacaatgtcactgagaaggtcacccaggtcctgtccctgggcgccgacgtgctgcctgagtacaagctgcaggcaccgcgcatccactgctggaccatcctgcattacagccccttcaaggccgtgtgggactggctcatcctgctgctggtcatctacacggctgtcttcacaccctactcggctgccttcctgctgaaggagacggaagaaggcccgcctgctaccgagtgtggctacgcctgccagccgctggctgtggtggacctcatcgtggacatcatgttcattgtggacatcctcatcaacttccgcaccacctacgtcaatgccaacgaggaggtggtcagccaccccggccgcatcgccgtccactacttcaagggctggttcctcatcgacatggtggccgccatccccttcgacctgctcatcttcggctctggctctgaggagctgatcgggctgctgaagactgcgcggctgctgcggctggtgcgcgtggcgcggaagctggatcgctactcagagtacggcgcggccgtgctgttcttgctcatgtgcacctttgcgctcatcgcgcactggctagcctgcatctggtacgccatcggcaacatggagcagccacacatggactcacgcatcggctggctgcacaacctgggcgaccagataggcaaaccctacaacagcagcggcctgggcggcccctccatcaaggacaagtatgtgacggcgctctacttcaccttcagcagcctcaccagtgtgggcttcggcaacgtctctcccaacaccaactcagagaagatcttctccatctgcgtcatgctcattggctccctcatgtatgctagcatcttcggcaacgtgtcggccatcatccagcggctgtactcgggcacagcccgctaccacacacagatgctgcgggtgcgggagttcatccgcttccaccagatccccaatcccctgcgccagcgcctcgaggagtacttccagcacgcctggtcctacaccaacggcatcgacatgaacgcggtgctgaagggcttccctgagtgcctgcaggctgacatctgcctgcacctgaaccgctcactgctgcagcactgcaaacccttccgaggggccaccaagggctgccttcgggccctggccatgaagttcaagaccacacatgcaccgccaggggacacactggtgcatgctggggacctgctcaccgccctgtacttcatctcccggggctccatcgagatcctgcggggcgacgtcgtcgtggccatcctggggaagaatgacatctttggggagcctctgaacctgtatgcaaggcctggcaagtcgaacggggatgtgcgggccctcacctactgtgacctacacaagatccatcgggacgacctgctggaggtgctggacatgtaccctgagttctccgaccacttctggtccagcctggagatcaccttcaacctgcgagataccaacatgatcccgggctcccccggcagtacggagttagagggtggcttcagtcggcaacgcaagcgcaagttgtccttccgcaggcgcacggacaaggacacggagcagccaggggaggtgtcggccttggggccgggccgggcgggggcagggccgagtagccggggccggccgggggggccgtggggggagagcccgtccagtggcccctccagccctgagagcagtgaggatgagggcccaggccgcagctccagccccctccgcctggtgcccttctccagccccaggccccccggagagccgccgggtggggagcccctgatggaggactgcgagaagagcagcgacacttgcaaccccctgtcaggcgccttctcaggagtgtccaacattttcagcttctggggggacagtcggggccgccagtaccaggagctccctcgatgccccgcccccacccccagcctcctcaacatccccctctccagcccgggtcggcggccccggggcgacgtggagagcaggctggatgccctccagcgccagctcaacaggctggagacccggctgagtgcagacatggccactgtcctgcagctgctacagaggcagatgacgctggtcccgcccgcctacagtgctgtgaccaccccggggcctggccccacttccacatccccgctgttgcccgtcagccccctccccaccctcaccttggactcgctttctcaggtttcccagttcatggcgtgtgaggagctgcccccgggggccccagagcttccccaagaaggccccacacgacgcctctccctaccgggccagctgggggccctcacctcccagcccctgcacagacacggctcggacccgggcagttagtggggctgcccagtgtggacacgtggctcacccagggatcaaggcgctgctgggccgctccccttggaggccctgctcaggaggccctgaccgtggaaggggagaggaactcgaaagcacagctcctcccccagcccttgggaccatcttctcctgcagtcccctgggccccagtgagaggggcaggggcagggccggcagtaggtggggcctgtggtccccccactgccctgagggcattagctggtctaactgcccggaggcacccggccctgggccttaggcacctcaaggacttttctgctatttactgctcttattgttaaggataataattaaggatcatatgaataattaatgaagatgctgatgactatgaataataaataattatcctgaggaga

SEQ ID NO: 32 - DNA, 3884 bp, Homo sapiens
  source 1..3884: mol_type = genomic DNA
  misc_feature 1..3884: note = cDNA of KCNH2 gene SNP c.1190G>A (p.Arg397His)
atgccggtgcggaggggccacgtcgcgccgcagaacaccttcctggacaccatcatccgcaagtttgagggccagagccgtaagttcatcatcgccaacgctcgggtggagaactgcgccgtcatctactgcaacgacggcttctgcgagctgtgcggctactcgcgggccgaggtgatgcagcgaccctgcacctgcgacttcctgcacgggccgcgcacgcagcgccgcgctgccgcgcagatcgcgcaggcactgctgggcgccgaggagcgcaaagtggaaatcgccttctaccggaaagatgggagctgcttcctatgtctggtggatgtggtgcccgtgaagaacgaggatggggctgtcatcatgttcatcctcaatttcgaggtggtgatggagaaggacatggtggggtccccggctcatgacaccaaccaccggggcccccccaccagctggctggccccaggccgcgccaagaccttccgcctgaagctgcccgcgctgctggcgctgacggcccgggagtcgtcggtgcggtcgggcggcgcgggcggcgcgggcgccccgggggccgtggtggtggacgtggacctgacgcccgcggcacccagcagcgagtcgctggccctggacgaagtgacagccatggacaaccacgtggcagggctcgggcccgcggaggagcggcgtgcgctggtgggtcccggctctccgccccgcagcgcgcccggccagctcccatcgccccgggcgcacagcctcaaccccgacgcctcgggctccagctgcagcctggcccggacgcgctcccgagaaagctgcgccagcgtgcgccgcgcctcgtcggccgacgacatcgaggccatgcgcgccggggtgctgcccccgccaccgcgccacgccagcaccggggccatgcacccactgcgcagcggcttgctcaactccacctcggactccgacctcgtgcgctaccgcaccattagcaagattccccaaatcaccctcaactttgtggacctcaagggcgaccccttcttggcttcgcccaccagtgaccgtgagatcatagcacctaagataaaggagcgaacccacaatgtcactgagaaggtcacccaggtcctgtccctgggcgccgacgtgctgcctgagtacaagctgcaggcaccgcgcatccaccactggaccatcctgcattacagccccttcaaggccgtgtgggactggctcatcctgctgctggtcatctacacggctgtcttcacaccctactcggctgccttcctgctgaaggagacggaagaaggcccgcctgctaccgagtgtggctacgcctgccagccgctggctgtggtggacctcatcgtggacatcatgttcattgtggacatcctcatcaacttccgcaccacctacgtcaatgccaacgaggaggtggtcagccaccccggccgcatcgccgtccactacttcaagggctggttcctcatcgacatggtggccgccatccccttcgacctgctcatcttcggctctggctctgaggagctgatcgggctgctgaagactgcgcggctgctgcggctggtgcgcgtggcgcggaagctggatcgctactcagagtacggcgcggccgtgctgttcttgctcatgtgcacctttgcgctcatcgcgcactggctagcctgcatctggtacgccatcggcaacatggagcagccacacatggactcacgcatcggctggctgcacaacctgggcgaccagataggcaaaccctacaacagcagcggcctgggcggcccctccatcaaggacaagtatgtgacggcgctctacttcaccttcagcagcctcaccagtgtgggcttcggcaacgtctctcccaacaccaactcagagaagatcttctccatctgcgtcatgctcattggctccctcatgtatgctagcatcttcggcaacgtgtcggccatcatccagcggctgtactcgggcacagcccgctaccacacacagatgctgcgggtgcgggagttcatccgcttccaccagatccccaatcccctgcgccagcgcctcgaggagtacttccagcacgcctggtcctacaccaacggcatcgacatgaacgcggtgctgaagggcttccctgagtgcctgcaggctgacatctgcctgcacctgaaccgctcactgctgcagcactgcaaacccttccgaggggccaccaagggctgccttcgggccctggccatgaagttcaagaccacacatgcaccgccaggggacacactggtgcatgctggggacctgctcaccgccctgtacttcatctcccggggctccatcgagatcctgcggggcgacgtcgtcgtggccatcctggggaagaatgacatctttggggagcctctgaacctgtatgcaaggcctggcaagtcgaacggggatgtgcgggccctcacctactgtgacctacacaagatccatcgggacgacctgctggaggtgctggacatgtaccctgagttctccgaccacttctggtccagcctggagatcaccttcaacctgcgagataccaacatgatcccgggctcccccggcagtacggagttagagggtggcttcagtcggcaacgcaagcgcaagttgtccttccgcaggcgcacggacaaggacacggagcagccaggggaggtgtcggccttggggccgggccgggcgggggcagggccgagtagccggggccggccgggggggccgtggggggagagcccgtccagtggcccctccagccctgagagcagtgaggatgagggcccaggccgcagctccagccccctccgcctggtgcccttctccagccccaggccccccggagagccgccgggtggggagcccctgatggaggactgcgagaagagcagcgacacttgcaaccccctgtcaggcgccttctcaggagtgtccaacattttcagcttctggggggacagtcggggccgccagtaccaggagctccctcgatgccccgcccccacccccagcctcctcaacatccccctctccagcccgggtcggcggccccggggcgacgtggagagcaggctggatgccctccagcgccagctcaacaggctggagacccggctgagtgcagacatggccactgtcctgcagctgctacagaggcagatgacgctggtcccgcccgcctacagtgctgtgaccaccccggggcctggccccacttccacatccccgctgttgcccgtcagccccctccccaccctcaccttggactcgctttctcaggtttcccagttcatggcgtgtgaggagctgcccccgggggccccagagcttccccaagaaggccccacacgacgcctctccctaccgggccagctgggggccctcacctcccagcccctgcacagacacggctcggacccgggcagttagtggggctgcccagtgtggacacgtggctcacccagggatcaaggcgctgctgggccgctccccttggaggccctgctcaggaggccctgaccgtggaaggggagaggaactcgaaagcacagctcctcccccagcccttgggaccatcttctcctgcagtcccctgggccccagtgagaggggcaggggcagggccggcagtaggtggggcctgtggtccccccactgccctgagggcattagctggtctaactgcccggaggcacccggccctgggccttaggcacctcaaggacttttctgctatttactgctcttattgttaaggataataattaaggatcatatgaataattaatgaagatgctgatgactatgaataataaataattatcctgaggaga

SEQ ID NO: 33 - DNA, 3884 bp, Homo sapiens
  source 1..3884: mol_type = genomic DNA
  misc_feature 1..3884: note = cDNA of KCNH2 gene SNP c.1193G>A (p.Trp398Ter)
atgccggtgcggaggggccacgtcgcgccgcagaacaccttcctggacaccatcatccgcaagtttgagggccagagccgtaagttcatcatcgccaacgctcgggtggagaactgcgccgtcatctactgcaacgacggcttctgcgagctgtgcggctactcgcgggccgaggtgatgcagcgaccctgcacctgcgacttcctgcacgggccgcgcacgcagcgccgcgctgccgcgcagatcgcgcaggcactgctgggcgccgaggagcgcaaagtggaaatcgccttctaccggaaagatgggagctgcttcctatgtctggtggatgtggtgcccgtgaagaacgaggatggggctgtcatcatgttcatcctcaatttcgaggtggtgatggagaaggacatggtggggtccccggctcatgacaccaaccaccggggcccccccaccagctggctggccccaggccgcgccaagaccttccgcctgaagctgcccgcgctgctggcgctgacggcccgggagtcgtcggtgcggtcgggcggcgcgggcggcgcgggcgccccgggggccgtggtggtggacgtggacctgacgcccgcggcacccagcagcgagtcgctggccctggacgaagtgacagccatggacaaccacgtggcagggctcgggcccgcggaggagcggcgtgcgctggtgggtcccggctctccgccccgcagcgcgcccggccagctcccatcgccccgggcgcacagcctcaaccccgacgcctcgggctccagctgcagcctggcccggacgcgctcccgagaaagctgcgccagcgtgcgccgcgcctcgtcggccgacgacatcgaggccatgcgcgccggggtgctgcccccgccaccgcgccacgccagcaccggggccatgcacccactgcgcagcggcttgctcaactccacctcggactccgacctcgtgcgctaccgcaccattagcaagattccccaaatcaccctcaactttgtggacctcaagggcgaccccttcttggcttcgcccaccagtgaccgtgagatcatagcacctaagataaaggagcgaacccacaatgtcactgagaaggtcacccaggtcctgtccctgggcgccgacgtgctgcctgagtacaagctgcaggcaccgcgcatccaccgctagaccatcctgcattacagccccttcaaggccgtgtgggactggctcatcctgctgctggtcatctacacggctgtcttcacaccctactcggctgccttcctgctgaaggagacggaagaaggcccgcctgctaccgagtgtggctacgcctgccagccgctggctgtggtggacctcatcgtggacatcatgttcattgtggacatcctcatcaacttccgcaccacctacgtcaatgccaacgaggaggtggtcagccaccccggccgcatcgccgtccactacttcaagggctggttcctcatcgacatggtggccgccatccccttcgacctgctcatcttcggctctggctctgaggagctgatcgggctgctgaagactgcgcggctgctgcggctggtgcgcgtggcgcggaagctggatcgctactcagagtacggcgcggccgtgctgttcttgctcatgtgcacctttgcgctcatcgcgcactggctagcctgcatctggtacgccatcggcaacatggagcagccacacatggactcacgcatcggctggctgcacaacctgggcgaccagataggcaaaccctacaacagcagcggcctgggcggcccctccatcaaggacaagtatgtgacggcgctctacttcaccttcagcagcctcaccagtgtgggcttcggcaacgtctctcccaacaccaactcagagaagatcttctccatctgcgtcatgctcattggctccctcatgtatgctagcatcttcggcaacgtgtcggccatcatccagcggctgtactcgggcacagcccgctaccacacacagatgctgcgggtgcgggagttcatccgcttccaccagatccccaatcccctgcgccagcgcctcgaggagtacttccagcacgcctggtcctacaccaacggcatcgacatgaacgcggtgctgaagggcttccctgagtgcctgcaggctgacatctgcctgcacctgaaccgctcactgctgcagcactgcaaacccttccgaggggccaccaagggctgccttcgggccctggccatgaagttcaagaccacacatgcaccgccaggggacacactggtgcatgctggggacctgctcaccgccctgtacttcatctcccggggctccatcgagatcctgcggggcgacgtcgtcgtggccatcctggggaagaatgacatctttggggagcctctgaacctgtatgcaaggcctggcaagtcgaacggggatgtgcgggccctcacctactgtgacctacacaagatccatcgggacgacctgctggaggtgctggacatgtaccctgagttctccgaccacttctggtccagcctggagatcaccttcaacctgcgagataccaacatgatcccgggctcccccggcagtacggagttagagggtggcttcagtcggcaacgcaagcgcaagttgtccttccgcaggcgcacggacaaggacacggagcagccaggggaggtgtcggccttggggccgggccgggcgggggcagggccgagtagccggggccggccgggggggccgtggggggagagcccgtccagtggcccctccagccctgagagcagtgaggatgagggcccaggccgcagctccagccccctccgcctggtgcccttctccagccccaggccccccggagagccgccgggtggggagcccctgatggaggactgcgagaagagcagcgacacttgcaaccccctgtcaggcgccttctcaggagtgtccaacattttcagcttctggggggacagtcggggccgccagtaccaggagctccctcgatgccccgcccccacccccagcctcctcaacatccccctctccagcccgggtcggcggccccggggcgacgtggagagcaggctggatgccctccagcgccagctcaacaggctggagacccggctgagtgcagacatggccactgtcctgcagctgctacagaggcagatgacgctggtcccgcccgcctacagtgctgtgaccaccccggggcctggccccacttccacatccccgctgttgcccgtcagccccctccccaccctcaccttggactcgctttctcaggtttcccagttcatggcgtgtgaggagctgcccccgggggccccagagcttccccaagaaggccccacacgacgcctctccctaccgggccagctgggggccctcacctcccagcccctgcacagacacggctcggacccgggcagttagtggggctgcccagtgtggacacgtggctcacccagggatcaaggcgctgctgggccgctccccttggaggccctgctcaggaggccctgaccgtggaaggggagaggaactcgaaagcacagctcctcccccagcccttgggaccatcttctcctgcagtcccctgggccccagtgagaggggcaggggcagggccggcagtaggtggggcctgtggtccccccactgccctgagggcattagctggtctaactgcccggaggcacccggccctgggccttaggcacctcaaggacttttctgctatttactgctcttattgttaaggataataattaaggatcatatgaataattaatgaagatgctgatgactatgaataataaataattatcctgaggaga

SEQ ID NO: 34 - DNA, 3884 bp, Homo sapiens
  source 1..3884: mol_type = genomic DNA
  misc_feature 1..3884: note = cDNA of KCNH2 gene SNP c.1199T>A (p.Ile400Asn)
atgccggtgcggaggggccacgtcgcgccgcagaacaccttcctggacaccatcatccgcaagtttgagggccagagccgtaagttcatcatcgccaacgctcgggtggagaactgcgccgtcatctactgcaacgacggcttctgcgagctgtgcggctactcgcgggccgaggtgatgcagcgaccctgcacctgcgacttcctgcacgggccgcgcacgcagcgccgcgctgccgcgcagatcgcgcaggcactgctgggcgccgaggagcgcaaagtggaaatcgccttctaccggaaagatgggagctgcttcctatgtctggtggatgtggtgcccgtgaagaacgaggatggggctgtcatcatgttcatcctcaatttcgaggtggtgatggagaaggacatggtggggtccccggctcatgacaccaaccaccggggcccccccaccagctggctggccccaggccgcgccaagaccttccgcctgaagctgcccgcgctgctggcgctgacggcccgggagtcgtcggtgcggtcgggcggcgcgggcggcgcgggcgccccgggggccgtggtggtggacgtggacctgacgcccgcggcacccagcagcgagtcgctggccctggacgaagtgacagccatggacaaccacgtggcagggctcgggcccgcggaggagcggcgtgcgctggtgggtcccggctctccgccccgcagcgcgcccggccagctcccatcgccccgggcgcacagcctcaaccccgacgcctcgggctccagctgcagcctggcccggacgcgctcccgagaaagctgcgccagcgtgcgccgcgcctcgtcggccgacgacatcgaggccatgcgcgccggggtgctgcccccgccaccgcgccacgccagcaccggggccatgcacccactgcgcagcggcttgctcaactccacctcggactccgacctcgtgcgctaccgcaccattagcaagattccccaaatcaccctcaactttgtggacctcaagggcgaccccttcttggcttcgcccaccagtgaccgtgagatcatagcacctaagataaaggagcgaacccacaatgtcactgagaaggtcacccaggtcctgtccctgggcgccgacgtgctgcctgagtacaagctgcaggcaccgcgcatccaccgctggaccaacctgcattacagccccttcaaggccgtgtgggactggctcatcctgctgctggtcatctacacggctgtcttcacaccctactcggctgccttcctgctgaaggagacggaagaaggcccgcctgctaccgagtgtggctacgcctgccagccgctggctgtggtggacctcatcgtggacatcatgttcattgtggacatcctcatcaacttccgcaccacctacgtcaatgccaacgaggaggtggtcagccaccccggccgcatcgccgtccactacttcaagggctggttcctcatcgacatggtggccgccatccccttcgacctgctcatcttcggctctggctctgaggagctgatcgggctgctgaagactgcgcggctgctgcggctggtgcgcgtggcgcggaagctggatcgctactcagagtacggcgcggccgtgctgttcttgctcatgtgcacctttgcgctcatcgcgcactggctagcctgcatctggtacgccatcggcaacatggagcagccacacatggactcacgcatcggctggctgcacaacctgggcgaccagataggcaaaccctacaacagcagcggcctgggcggcccctccatcaaggacaagtatgtgacggcgctctacttcaccttcagcagcctcaccagtgtgggcttcggcaacgtctctcccaacaccaactcagagaagatcttctccatctgcgtcatgctcattggctccctcatgtatgctagcatcttcggcaacgtgtcggccatcatccagcggctgtactcgggcacagcccgctaccacacacagatgctgcgggtgcgggagttcatccgcttccaccagatccccaatcccctgcgccagcgcctcgaggagtacttccagcacgcctggtcctacaccaacggcatcgacatgaacgcggtgctgaagggcttccctgagtgcctgcaggctgacatctgcctgcacctgaaccgctcactgctgcagcactgcaaacccttccgaggggccaccaagggctgccttcgggccctggccatgaagttcaagaccacacatgcaccgccaggggacacactggtgcatgctggggacctgctcaccgccctgtacttcatctcccggggctccatcgagatcctgcggggcgacgtcgtcgtggccatcctggggaagaatgacatctttggggagcctctgaacctgtatgcaaggcctggcaagtcgaacggggatgtgcgggccctcacctactgtgacctacacaagatccatcgggacgacctgctggaggtgctggacatgtaccctgagttctccgaccacttctggtccagcctggagatcaccttcaacctgcgagataccaacatgatcccgggctcccccggcagtacggagttagagggtggcttcagtcggcaacgcaagcgcaagttgtccttccgcaggcgcacggacaaggacacggagcagccaggggaggtgtcggccttggggccgggccgggcgggggcagggccgagtagccggggccggccgggggggccgtggggggagagcccgtccagtggcccctccagccctgagagcagtgaggatgagggcccaggccgcagctccagccccctccgcctggtgcccttctccagccccaggccccccggagagccgccgggtggggagcccctgatggaggactgcgagaagagcagcgacacttgcaaccccctgtcaggcgccttctcaggagtgtccaacattttcagcttctggggggacagtcggggccgccagtaccaggagctccctcgatgccccgcccccacccccagcctcctcaacatccccctctccagcccgggtcggcggccccggggcgacgtggagagcaggctggatgccctccagcgccagctcaacaggctggagacccggctgagtgcagacatggccactgtcctgcagctgctacagaggcagatgacgctggtcccgcccgcctacagtgctgtgaccaccccggggcctggccccacttccacatccccgctgttgcccgtcagccccctccccaccctcaccttggactcgctttctcaggtttcccagttcatggcgtgtgaggagctgcccccgggggccccagagcttccccaagaaggccccacacgacgcctctccctaccgggccagctgggggccctcacctcccagcccctgcacagacacggctcggacccgggcagttagtggggctgcccagtgtggacacgtggctcacccagggatcaaggcgctgctgggccgctccccttggaggccctgctcaggaggccctgaccgtggaaggggagaggaactcgaaagcacagctcctcccccagcccttgggaccatcttctcctgcagtcccctgggccccagtgagaggggcaggggcagggccggcagtaggtggggcctgtggtccccccactgccctgagggcattagctggtctaactgcccggaggcacccggccctgggccttaggcacctcaaggacttttctgctatttactgctcttattgttaaggataataattaaggatcatatgaataattaatgaagatgctgatgactatgaataataaataattatcctgaggaga

SEQ ID NO: 35 - DNA, 3884 bp, Homo sapiens
  source 1..3884: mol_type = genomic DNA
  misc_feature 1..3884: note = cDNA of KCNH2 gene SNP c.119C>T (p.Ala40Val)
atgccggtgcggaggggccacgtcgcgccgcagaacaccttcctggacaccatcatccgcaagtttgagggccagagccgtaagttcatcatcgccaacgctcgggtggagaactgcgtcgtcatctactgcaacgacggcttctgcgagctgtgcggctactcgcgggccgaggtgatgcagcgaccctgcacctgcgacttcctgcacgggccgcgcacgcagcgccgcgctgccgcgcagatcgcgcaggcactgctgggcgccgaggagcgcaaagtggaaatcgccttctaccggaaagatgggagctgcttcctatgtctggtggatgtggtgcccgtgaagaacgaggatggggctgtcatcatgttcatcctcaatttcgaggtggtgatggagaaggacatggtggggtccccggctcatgacaccaaccaccggggcccccccaccagctggctggccccaggccgcgccaagaccttccgcctgaagctgcccgcgctgctggcgctgacggcccgggagtcgtcggtgcggtcgggcggcgcgggcggcgcgggcgccccgggggccgtggtggtggacgtggacctgacgcccgcggcacccagcagcgagtcgctggccctggacgaagtgacagccatggacaaccacgtggcagggctcgggcccgcggaggagcggcgtgcgctggtgggtcccggctctccgccccgcagcgcgcccggccagctcccatcgccccgggcgcacagcctcaaccccgacgcctcgggctccagctgcagcctggcccggacgcgctcccgagaaagctgcgccagcgtgcgccgcgcctcgtcggccgacgacatcgaggccatgcgcgccggggtgctgcccccgccaccgcgccacgccagcaccggggccatgcacccactgcgcagcggcttgctcaactccacctcggactccgacctcgtgcgctaccgcaccattagcaagattccccaaatcaccctcaactttgtggacctcaagggcgaccccttcttggcttcgcccaccagtgaccgtgagatcatagcacctaagataaaggagcgaacccacaatgtcactgagaaggtcacccaggtcctgtccctgggcgccgacgtgctgcctgagtacaagctgcaggcaccgcgcatccaccgctggaccatcctgcattacagccccttcaaggccgtgtgggactggctcatcctgctgctggtcatctacacggctgtcttcacaccctactcggctgccttcctgctgaaggagacggaagaaggcccgcctgctaccgagtgtggctacgcctgccagccgctggctgtggtggacctcatcgtggacatcatgttcattgtggacatcctcatcaacttccgcaccacctacgtcaatgccaacgaggaggtggtcagccaccccggccgcatcgccgtccactacttcaagggctggttcctcatcgacatggtggccgccatccccttcgacctgctcatcttcggctctggctctgaggagctgatcgggctgctgaagactgcgcggctgctgcggctggtgcgcgtggcgcggaagctggatcgctactcagagtacggcgcggccgtgctgttcttgctcatgtgcacctttgcgctcatcgcgcactggctagcctgcatctggtacgccatcggcaacatggagcagccacacatggactcacgcatcggctggctgcacaacctgggcgaccagataggcaaaccctacaacagcagcggcctgggcggcccctccatcaaggacaagtatgtgacggcgctctacttcaccttcagcagcctcaccagtgtgggcttcggcaacgtctctcccaacaccaactcagagaagatcttctccatctgcgtcatgctcattggctccctcatgtatgctagcatcttcggcaacgtgtcggccatcatccagcggctgtactcgggcacagcccgctaccacacacagatgctgcgggtgcgggagttcatccgcttccaccagatccccaatcccctgcgccagcgcctcgaggagtacttccagcacgcctggtcctacaccaacggcatcgacatgaacgcggtgctgaagggcttccctgagtgcctgcaggctgacatctgcctgcacctgaaccgctcactgctgcagcactgcaaacccttccgaggggccaccaagggctgccttcgggccctggccatgaagttcaagaccacacatgcaccgccaggggacacactggtgcatgctggggacctgctcaccgccctgtacttcatctcccggggctccatcgagatcctgcggggcgacgtcgtcgtggccatcctggggaagaatgacatctttggggagcctctgaacctgtatgcaaggcctggcaagtcgaacggggatgtgcgggccctcacctactgtgacctacacaagatccatcgggacgacctgctggaggtgctggacatgtaccctgagttctccgaccacttctggtccagcctggagatcaccttcaacctgcgagataccaacatgatcccgggctcccccggcagtacggagttagagggtggcttcagtcggcaacgcaagcgcaagttgtccttccgcaggcgcacggacaaggacacggagcagccaggggaggtgtcggccttggggccgggccgggcgggggcagggccgagtagccggggccggccgggggggccgtggggggagagcccgtccagtggcccctccagccctgagagcagtgaggatgagggcccaggccgcagctccagccccctccgcctggtgcccttctccagccccaggccccccggagagccgccgggtggggagcccctgatggaggactgcgagaagagcagcgacacttgcaaccccctgtcaggcgccttctcaggagtgtccaacattttcagcttctggggggacagtcggggccgccagtaccaggagctccctcgatgccccgcccccacccccagcctcctcaacatccccctctccagcccgggtcggcggccccggggcgacgtggagagcaggctggatgccctccagcgccagctcaacaggctggagacccggctgagtgcagacatggccactgtcctgcagctgctacagaggcagatgacgctggtcccgcccgcctacagtgctgtgaccaccccggggcctggccccacttccacatccccgctgttgcccgtcagccccctccccaccctcaccttggactcgctttctcaggtttcccagttcatggcgtgtgaggagctgcccccgggggccccagagcttccccaagaaggccccacacgacgcctctccctaccgggccagctgggggccctcacctcccagcccctgcacagacacggctcggacccgggcagttagtggggctgcccagtgtggacacgtggctcacccagggatcaaggcgctgctgggccgctccccttggaggccctgctcaggaggccctgaccgtggaaggggagaggaactcgaaagcacagctcctcccccagcccttgggaccatcttctcctgcagtcccctgggccccagtgagaggggcaggggcagggccggcagtaggtggggcctgtggtccccccactgccctgagggcattagctggtctaactgcccggaggcacccggccctgggccttaggcacctcaaggacttttctgctatttactgctcttattgttaaggataataattaaggatcatatgaataattaatgaagatgctgatgactatgaataataaataattatcctgaggaga

SEQ ID NO: 36 - DNA, 3884 bp, Homo sapiens
  source 1..3884: mol_type = genomic DNA
  misc_feature 1..3884: note = cDNA of KCNH2 gene SNP c.1205A>G (p.His402Arg)
atgccggtgcggaggggccacgtcgcgccgcagaacaccttcctggacaccatcatccgcaagtttgagggccagagccgtaagttcatcatcgccaacgctcgggtggagaactgcgccgtcatctactgcaacgacggcttctgcgagctgtgcggctactcgcgggccgaggtgatgcagcgaccctgcacctgcgacttcctgcacgggccgcgcacgcagcgccgcgctgccgcgcagatcgcgcaggcactgctgggcgccgaggagcgcaaagtggaaatcgccttctaccggaaagatgggagctgcttcctatgtctggtggatgtggtgcccgtgaagaacgaggatggggctgtcatcatgttcatcctcaatttcgaggtggtgatggagaaggacatggtggggtccccggctcatgacaccaaccaccggggcccccccaccagctggctggccccaggccgcgccaagaccttccgcctgaagctgcccgcgctgctggcgctgacggcccgggagtcgtcggtgcggtcgggcggcgcgggcggcgcgggcgccccgggggccgtggtggtggacgtggacctgacgcccgcggcacccagcagcgagtcgctggccctggacgaagtgacagccatggacaaccacgtggcagggctcgggcccgcggaggagcggcgtgcgctggtgggtcccggctctccgccccgcagcgcgcccggccagctcccatcgccccgggcgcacagcctcaaccccgacgcctcgggctccagctgcagcctggcccggacgcgctcccgagaaagctgcgccagcgtgcgccgcgcctcgtcggccgacgacatcgaggccatgcgcgccggggtgctgcccccgccaccgcgccacgccagcaccggggccatgcacccactgcgcagcggcttgctcaactccacctcggactccgacctcgtgcgctaccgcaccattagcaagattccccaaatcaccctcaactttgtggacctcaagggcgaccccttcttggcttcgcccaccagtgaccgtgagatcatagcacctaagataaaggagcgaacccacaatgtcactgagaaggtcacccaggtcctgtccctgggcgccgacgtgctgcctgagtacaagctgcaggcaccgcgcatccaccgctggaccatcctgcgttacagccccttcaaggccgtgtgggactggctcatcctgctgctggtcatctacacggctgtcttcacaccctactcggctgccttcctgctgaaggagacggaagaaggcccgcctgctaccgagtgtggctacgcctgccagccgctggctgtggtggacctcatcgtggacatcatgttcattgtggacatcctcatcaacttccgcaccacctacgtcaatgccaacgaggaggtggtcagccaccccggccgcatcgccgtccactacttcaagggctggttcctcatcgacatggtggccgccatccccttcgacctgctcatcttcggctctggctctgaggagctgatcgggctgctgaagactgcgcggctgctgcggctggtgcgcgtggcgcggaagctggatcgctactcagagtacggcgcggccgtgctgttcttgctcatgtgcacctttgcgctcatcgcgcactggctagcctgcatctggtacgccatcggcaacatggagcagccacacatggactcacgcatcggctggctgcacaacctgggcgaccagataggcaaaccctacaacagcagcggcctgggcggcccctccatcaaggacaagtatgtgacggcgctctacttcaccttcagcagcctcaccagtgtgggcttcggcaacgtctctcccaacaccaactcagagaagatcttctccatctgcgtcatgctcattggctccctcatgtatgctagcatcttcggcaacgtgtcggccatcatccagcggctgtactcgggcacagcccgctaccacacacagatgctgcgggtgcgggagttcatccgcttccaccagatccccaatcccctgcgccagcgcctcgaggagtacttccagcacgcctggtcctacaccaacggcatcgacatgaacgcggtgctgaagggcttccctgagtgcctgcaggctgacatctgcctgcacctgaaccgctcactgctgcagcactgcaaacccttccgaggggccaccaagggctgccttcgggccctggccatgaagttcaagaccacacatgcaccgccaggggacacactggtgcatgctggggacctgctcaccgccctgtacttcatctcccggggctccatcgagatcctgcggggcgacgtcgtcgtggccatcctggggaagaatgacatctttggggagcctctgaacctgtatgcaaggcctggcaagtcgaacggggatgtgcgggccctcacctactgtgacctacacaagatccatcgggacgacctgctggaggtgctggacatgtaccctgagttctccgaccacttctggtccagcctggagatcaccttcaacctgcgagataccaacatgatcccgggctcccccggcagtacggagttagagggtggcttcagtcggcaacgcaagcgcaagttgtccttccgcaggcgcacggacaaggacacggagcagccaggggaggtgtcggccttggggccgggccgggcgggggcagggccgagtagccggggccggccgggggggccgtggggggagagcccgtccagtggcccctccagccctgagagcagtgaggatgagggcccaggccgcagctccagccccctccgcctggtgcccttctccagccccaggccccccggagagccgccgggtggggagcccctgatggaggactgcgagaagagcagcgacacttgcaaccccctgtcaggcgccttctcaggagtgtccaacattttcagcttctggggggacagtcggggccgccagtaccaggagctccctcgatgccccgcccccacccccagcctcctcaacatccccctctccagcccgggtcggcggccccggggcgacgtggagagcaggctggatgccctccagcgccagctcaacaggctggagacccggctgagtgcagacatggccactgtcctgcagctgctacagaggcagatgacgctggtcccgcccgcctacagtgctgtgaccaccccggggcctggccccacttccacatccccgctgttgcccgtcagccccctccccaccctcaccttggactcgctttctcaggtttcccagttcatggcgtgtgaggagctgcccccgggggccccagagcttccccaagaaggccccacacgacgcctctccctaccgggccagctgggggccctcacctcccagcccctgcacagacacggctcggacccgggcagttagtggggctgcccagtgtggacacgtggctcacccagggatcaaggcgctgctgggccgctccccttggaggccctgctcaggaggccctgaccgtggaaggggagaggaactcgaaagcacagctcctcccccagcccttgggaccatcttctcctgcagtcccctgggccccagtgagaggggcaggggcagggccggcagtaggtggggcctgtggtccccccactgccctgagggcattagctggtctaactgcccggaggcacccggccctgggccttaggcacctcaaggacttttctgctatttactgctcttattgttaaggataataattaaggatcatatgaataattaatgaagatgctgatgactatgaataataaataattatcctgaggaga

SEQ ID NO: 37 - DNA, 3884 bp, Homo sapiens
  source 1..3884: mol_type = genomic DNA
  misc_feature 1..3884: note = cDNA of KCNH2 gene SNP c.121G>C (p.Val41Leu)
atgccggtgcggaggggccacgtcgcgccgcagaacaccttcctggacaccatcatccgcaagtttgagggccagagccgtaagttcatcatcgccaacgctcgggtggagaactgcgccctcatctactgcaacgacggcttctgcgagctgtgcggctactcgcgggccgaggtgatgcagcgaccctgcacctgcgacttcctgcacgggccgcgcacgcagcgccgcgctgccgcgcagatcgcgcaggcactgctgggcgccgaggagcgcaaagtggaaatcgccttctaccggaaagatgggagctgcttcctatgtctggtggatgtggtgcccgtgaagaacgaggatggggctgtcatcatgttcatcctcaatttcgaggtggtgatggagaaggacatggtggggtccccggctcatgacaccaaccaccggggcccccccaccagctggctggccccaggccgcgccaagaccttccgcctgaagctgcccgcgctgctggcgctgacggcccgggagtcgtcggtgcggtcgggcggcgcgggcggcgcgggcgccccgggggccgtggtggtggacgtggacctgacgcccgcggcacccagcagcgagtcgctggccctggacgaagtgacagccatggacaaccacgtggcagggctcgggcccgcggaggagcggcgtgcgctggtgggtcccggctctccgccccgcagcgcgcccggccagctcccatcgccccgggcgcacagcctcaaccccgacgcctcgggctccagctgcagcctggcccggacgcgctcccgagaaagctgcgccagcgtgcgccgcgcctcgtcggccgacgacatcgaggccatgcgcgccggggtgctgcccccgccaccgcgccacgccagcaccggggccatgcacccactgcgcagcggcttgctcaactccacctcggactccgacctcgtgcgctaccgcaccattagcaagattccccaaatcaccctcaactttgtggacctcaagggcgaccccttcttggcttcgcccaccagtgaccgtgagatcatagcacctaagataaaggagcgaacccacaatgtcactgagaaggtcacccaggtcctgtccctgggcgccgacgtgctgcctgagtacaagctgcaggcaccgcgcatccaccgctggaccatcctgcattacagccccttcaaggccgtgtgggactggctcatcctgctgctggtcatctacacggctgtcttcacaccctactcggctgccttcctgctgaaggagacggaagaaggcccgcctgctaccgagtgtggctacgcctgccagccgctggctgtggtggacctcatcgtggacatcatgttcattgtggacatcctcatcaacttccgcaccacctacgtcaatgccaacgaggaggtggtcagccaccccggccgcatcgccgtccactacttcaagggctggttcctcatcgacatggtggccgccatccccttcgacctgctcatcttcggctctggctctgaggagctgatcgggctgctgaagactgcgcggctgctgcggctggtgcgcgtggcgcggaagctggatcgctactcagagtacggcgcggccgtgctgttcttgctcatgtgcacctttgcgctcatcgcgcactggctagcctgcatctggtacgccatcggcaacatggagcagccacacatggactcacgcatcggctggctgcacaacctgggcgaccagataggcaaaccctacaacagcagcggcctgggcggcccctccatcaaggacaagtatgtgacggcgctctacttcaccttcagcagcctcaccagtgtgggcttcggcaacgtctctcccaacaccaactcagagaagatcttctccatctgcgtcatgctcattggctccctcatgtatgctagcatcttcggcaacgtgtcggccatcatccagcggctgtactcgggcacagcccgctaccacacacagatgctgcgggtgcgggagttcatccgcttccaccagatccccaatcccctgcgccagcgcctcgaggagtacttccagcacgcctggtcctacaccaacggcatcgacatgaacgcggtgctgaagggcttccctgagtgcctgcaggctgacatctgcctgcacctgaaccgctcactgctgcagcactgcaaacccttccgaggggccaccaagggctgccttcgggccctggccatgaagttcaagaccacacatgcaccgccaggggacacactggtgcatgctggggacctgctcaccgccctgtacttcatctcccggggctccatcgagatcctgcggggcgacgtcgtcgtggccatcctggggaagaatgacatctttggggagcctctgaacctgtatgcaaggcctggcaagtcgaacggggatgtgcgggccctcacctactgtgacctacacaagatccatcgggacgacctgctggaggtgctggacatgtaccctgagttctccgaccacttctggtccagcctggagatcaccttcaacctgcgagataccaacatgatcccgggctcccccggcagtacggagttagagggtggcttcagtcggcaacgcaagcgcaagttgtccttccgcaggcgcacggacaaggacacggagcagccaggggaggtgtcggccttggggccgggccgggcgggggcagggccgagtagccggggccggccgggggggccgtggggggagagcccgtccagtggcccctccagccctgagagcagtgaggatgagggcccaggccgcagctccagccccctccgcctggtgcccttctccagccccaggccccccggagagccgccgggtggggagcccctgatggaggactgcgagaagagcagcgacacttgcaaccccctgtcaggcgccttctcaggagtgtccaacattttcagcttctggggggacagtcggggccgccagtaccaggagctccctcgatgccccgcccccacccccagcctcctcaacatccccctctccagcccgggtcggcggccccggggcgacgtggagagcaggctggatgccctccagcgccagctcaacaggctggagacccggctgagtgcagacatggccactgtcctgcagctgctacagaggcagatgacgctggtcccgcccgcctacagtgctgtgaccaccccggggcctggccccacttccacatccccgctgttgcccgtcagccccctccccaccctcaccttggactcgctttctcaggtttcccagttcatggcgtgtgaggagctgcccccgggggccccagagcttccccaagaaggccccacacgacgcctctccctaccgggccagctgggggccctcacctcccagcccctgcacagacacggctcggacccgggcagttagtggggctgcccagtgtggacacgtggctcacccagggatcaaggcgctgctgggccgctccccttggaggccctgctcaggaggccctgaccgtggaaggggagaggaactcgaaagcacagctcctcccccagcccttgggaccatcttctcctgcagtcccctgggccccagtgagaggggcaggggcagggccggcagtaggtggggcctgtggtccccccactgccctgagggcattagctggtctaactgcccggaggcacccggccctgggccttaggcacctcaaggacttttctgctatttactgctcttattgttaaggataataattaaggatcatatgaataattaatgaagatgctgatgactatgaataataaataattatcctgaggaga

SEQ ID NO: 38 - DNA, 3884 bp, Homo sapiens
  source 1..3884: mol_type = genomic DNA
  misc_feature 1..3884: note = cDNA of KCNH2 gene SNP c.121G>T (p.Val41Phe)
atgccggtgcggaggggccacgtcgcgccgcagaacaccttcctggacaccatcatccgcaagtttgagggccagagccgtaagttcatcatcgccaacgctcgggtggagaactgcgccttcatctactgcaacgacggcttctgcgagctgtgcggctactcgcgggccgaggtgatgcagcgaccctgcacctgcgacttcctgcacgggccgcgcacgcagcgccgcgctgccgcgcagatcgcgcaggcactgctgggcgccgaggagcgcaaagtggaaatcgccttctaccggaaagatgggagctgcttcctatgtctggtggatgtggtgcccgtgaagaacgaggatggggctgtcatcatgttcatcctcaatttcgaggtggtgatggagaaggacatggtggggtccccggctcatgacaccaaccaccggggcccccccaccagctggctggccccaggccgcgccaagaccttccgcctgaagctgcccgcgctgctggcgctgacggcccgggagtcgtcggtgcggtcgggcggcgcgggcggcgcgggcgccccgggggccgtggtggtggacgtggacctgacgcccgcggcacccagcagcgagtcgctggccctggacgaagtgacagccatggacaaccacgtggcagggctcgggcccgcggaggagcggcgtgcgctggtgggtcccggctctccgccccgcagcgcgcccggccagctcccatcgccccgggcgcacagcctcaaccccgacgcctcgggctccagctgcagcctggcccggacgcgctcccgagaaagctgcgccagcgtgcgccgcgcctcgtcggccgacgacatcgaggccatgcgcgccggggtgctgcccccgccaccgcgccacgccagcaccggggccatgcacccactgcgcagcggcttgctcaactccacctcggactccgacctcgtgcgctaccgcaccattagcaagattccccaaatcaccctcaactttgtggacctcaagggcgaccccttcttggcttcgcccaccagtgaccgtgagatcatagcacctaagataaaggagcgaacccacaatgtcactgagaaggtcacccaggtcctgtccctgggcgccgacgtgctgcctgagtacaagctgcaggcaccgcgcatccaccgctggaccatcctgcattacagccccttcaaggccgtgtgggactggctcatcctgctgctggtcatctacacggctgtcttcacaccctactcggctgccttcctgctgaaggagacggaagaaggcccgcctgctaccgagtgtggctacgcctgccagccgctggctgtggtggacctcatcgtggacatcatgttcattgtggacatcctcatcaacttccgcaccacctacgtcaatgccaacgaggaggtggtcagccaccccggccgcatcgccgtccactacttcaagggctggttcctcatcgacatggtggccgccatccccttcgacctgctcatcttcggctctggctctgaggagctgatcgggctgctgaagactgcgcggctgctgcggctggtgcgcgtggcgcggaagctggatcgctactcagagtacggcgcggccgtgctgttcttgctcatgtgcacctttgcgctcatcgcgcactggctagcctgcatctggtacgccatcggcaacatggagcagccacacatggactcacgcatcggctggctgcacaacctgggcgaccagataggcaaaccctacaacagcagcggcctgggcggcccctccatcaaggacaagtatgtgacggcgctctacttcaccttcagcagcctcaccagtgtgggcttcggcaacgtctctcccaacaccaactcagagaagatcttctccatctgcgtcatgctcattggctccctcatgtatgctagcatcttcggcaacgtgtcggccatcatccagcggctgtactcgggcacagcccgctaccacacacagatgctgcgggtgcgggagttcatccgcttccaccagatccccaatcccctgcgccagcgcctcgaggagtacttccagcacgcctggtcctacaccaacggcatcgacatgaacgcggtgctgaagggcttccctgagtgcctgcaggctgacatctgcctgcacctgaaccgctcactgctgcagcactgcaaacccttccgaggggccaccaagggctgccttcgggccctggccatgaagttcaagaccacacatgcaccgccaggggacacactggtgcatgctggggacctgctcaccgccctgtacttcatctcccggggctccatcgagatcctgcggggcgacgtcgtcgtggccatcctggggaagaatgacatctttggggagcctctgaacctgtatgcaaggcctggcaagtcgaacggggatgtgcgggccctcacctactgtgacctacacaagatccatcgggacgacctgctggaggtgctggacatgtaccctgagttctccgaccacttctggtccagcctggagatcaccttcaacctgcgagataccaacatgatcccgggctcccccggcagtacggagttagagggtggcttcagtcggcaacgcaagcgcaagttgtccttccgcaggcgcacggacaaggacacggagcagccaggggaggtgtcggccttggggccgggccgggcgggggcagggccgagtagccggggccggccgggggggccgtggggggagagcccgtccagtggcccctccagccctgagagcagtgaggatgagggcccaggccgcagctccagccccctccgcctggtgcccttctccagccccaggccccccggagagccgccgggtggggagcccctgatggaggactgcgagaagagcagcgacacttgcaaccccctgtcaggcgccttctcaggagtgtccaacattttcagcttctggggggacagtcggggccgccagtaccaggagctccctcgatgccccgcccccacccccagcctcctcaacatccccctctccagcccgggtcggcggccccggggcgacgtggagagcaggctggatgccctccagcgccagctcaacaggctggagacccggctgagtgcagacatggccactgtcctgcagctgctacagaggcagatgacgctggtcccgcccgcctacagtgctgtgaccaccccggggcctggccccacttccacatccccgctgttgcccgtcagccccctccccaccctcaccttggactcgctttctcaggtttcccagttcatggcgtgtgaggagctgcccccgggggccccagagcttccccaagaaggccccacacgacgcctctccctaccgggccagctgggggccctcacctcccagcccctgcacagacacggctcggacccgggcagttagtggggctgcccagtgtggacacgtggctcacccagggatcaaggcgctgctgggccgctccccttggaggccctgctcaggaggccctgaccgtggaaggggagaggaactcgaaagcacagctcctcccccagcccttgggaccatcttctcctgcagtcccctgggccccagtgagaggggcaggggcagggccggcagtaggtggggcctgtggtccccccactgccctgagggcattagctggtctaactgcccggaggcacccggccctgggccttaggcacctcaaggacttttctgctatttactgctcttattgttaaggataataattaaggatcatatgaataattaatgaagatgctgatgactatgaataataaataattatcctgaggaga

SEQ ID NO: 39 - DNA, 3884 bp, Homo sapiens
  source 1..3884: mol_type = genomic DNA
  misc_feature 1..3884: note = cDNA of KCNH2 gene SNP c.1225G>A (p.Val409Met)
atgccggtgcggaggggccacgtcgcgccgcagaacaccttcctggacaccatcatccgcaagtttgagggccagagccgtaagttcatcatcgccaacgctcgggtggagaactgcgccgtcatctactgcaacgacggcttctgcgagctgtgcggctactcgcgggccgaggtgatgcagcgaccctgcacctgcgacttcctgcacgggccgcgcacgcagcgccgcgctgccgcgcagatcgcgcaggcactgctgggcgccgaggagcgcaaagtggaaatcgccttctaccggaaagatgggagctgcttcctatgtctggtggatgtggtgcccgtgaagaacgaggatggggctgtcatcatgttcatcctcaatttcgaggtggtgatggagaaggacatggtggggtccccggctcatgacaccaaccaccggggcccccccaccagctggctggccccaggccgcgccaagaccttccgcctgaagctgcccgcgctgctggcgctgacggcccgggagtcgtcggtgcggtcgggcggcgcgggcggcgcgggcgccccgggggccgtggtggtggacgtggacctgacgcccgcggcacccagcagcgagtcgctggccctggacgaagtgacagccatggacaaccacgtggcagggctcgggcccgcggaggagcggcgtgcgctggtgggtcccggctctccgccccgcagcgcgcccggccagctcccatcgccccgggcgcacagcctcaaccccgacgcctcgggctccagctgcagcctggcccggacgcgctcccgagaaagctgcgccagcgtgcgccgcgcctcgtcggccgacgacatcgaggccatgcgcgccggggtgctgcccccgccaccgcgccacgccagcaccggggccatgcacccactgcgcagcggcttgctcaactccacctcggactccgacctcgtgcgctaccgcaccattagcaagattccccaaatcaccctcaactttgtggacctcaagggcgaccccttcttggcttcgcccaccagtgaccgtgagatcatagcacctaagataaaggagcgaacccacaatgtcactgagaaggtcacccaggtcctgtccctgggcgccgacgtgctgcctgagtacaagctgcaggcaccgcgcatccaccgctggaccatcctgcattacagccccttcaaggccatgtgggactggctcatcctgctgctggtcatctacacggctgtcttcacaccctactcggctgccttcctgctgaaggagacggaagaaggcccgcctgctaccgagtgtggctacgcctgccagccgctggctgtggtggacctcatcgtggacatcatgttcattgtggacatcctcatcaacttccgcaccacctacgtcaatgccaacgaggaggtggtcagccaccccggccgcatcgccgtccactacttcaagggctggttcctcatcgacatggtggccgccatccccttcgacctgctcatcttcggctctggctctgaggagctgatcgggctgctgaagactgcgcggctgctgcggctggtgcgcgtggcgcggaagctggatcgctactcagagtacggcgcggccgtgctgttcttgctcatgtgcacctttgcgctcatcgcgcactggctagcctgcatctggtacgccatcggcaacatggagcagccacacatggactcacgcatcggctggctgcacaacctgggcgaccagataggcaaaccctacaacagcagcggcctgggcggcccctccatcaaggacaagtatgtgacggcgctctacttcaccttcagcagcctcaccagtgtgggcttcggcaacgtctctcccaacaccaactcagagaagatcttctccatctgcgtcatgctcattggctccctcatgtatgctagcatcttcggcaacgtgtcggccatcatccagcggctgtactcgggcacagcccgctaccacacacagatgctgcgggtgcgggagttcatccgcttccaccagatccccaatcccctgcgccagcgcctcgaggagtacttccagcacgcctggtcctacaccaacggcatcgacatgaacgcggtgctgaagggcttccctgagtgcctgcaggctgacatctgcctgcacctgaaccgctcactgctgcagcactgcaaacccttccgaggggccaccaagggctgccttcgggccctggccatgaagttcaagaccacacatgcaccgccaggggacacactggtgcatgctggggacctgctcaccgccctgtacttcatctcccggggctccatcgagatcctgcggggcgacgtcgtcgtggccatcctggggaagaatgacatctttggggagcctctgaacctgtatgcaaggcctggcaagtcgaacggggatgtgcgggccctcacctactgtgacctacacaagatccatcgggacgacctgctggaggtgctggacatgtaccctgagttctccgaccacttctggtccagcctggagatcaccttcaacctgcgagataccaacatgatcccgggctcccccggcagtacggagttagagggtggcttcagtcggcaacgcaagcgcaagttgtccttccgcaggcgcacggacaaggacacggagcagccaggggaggtgtcggccttggggccgggccgggcgggggcagggccgagtagccggggccggccgggggggccgtggggggagagcccgtccagtggcccctccagccctgagagcagtgaggatgagggcccaggccgcagctccagccccctccgcctggtgcccttctccagccccaggccccccggagagccgccgggtggggagcccctgatggaggactgcgagaagagcagcgacacttgcaaccccctgtcaggcgccttctcaggagtgtccaacattttcagcttctggggggacagtcggggccgccagtaccaggagctccctcgatgccccgcccccacccccagcctcctcaacatccccctctccagcccgggtcggcggccccggggcgacgtggagagcaggctggatgccctccagcgccagctcaacaggctggagacccggctgagtgcagacatggccactgtcctgcagctgctacagaggcagatgacgctggtcccgcccgcctacagtgctgtgaccaccccggggcctggccccacttccacatccccgctgttgcccgtcagccccctccccaccctcaccttggactcgctttctcaggtttcccagttcatggcgtgtgaggagctgcccccgggggccccagagcttccccaagaaggccccacacgacgcctctccctaccgggccagctgggggccctcacctcccagcccctgcacagacacggctcggacccgggcagttagtggggctgcccagtgtggacacgtggctcacccagggatcaaggcgctgctgggccgctccccttggaggccctgctcaggaggccctgaccgtggaaggggagaggaactcgaaagcacagctcctcccccagcccttgggaccatcttctcctgcagtcccctgggccccagtgagaggggcaggggcagggccggcagtaggtggggcctgtggtccccccactgccctgagggcattagctggtctaactgcccggaggcacccggccctgggccttaggcacctcaaggacttttctgctatttactgctcttattgttaaggataataattaaggatcatatgaataattaatgaagatgctgatgactatgaataataaataattatcctgaggaga

SEQ ID NO: 40 - DNA, 3884 bp, Homo sapiens
  source 1..3884: mol_type = genomic DNA
  misc_feature 1..3884: note = cDNA of KCNH2 gene SNP c.1226T>A (p.Val409Glu)
atgccggtgcggaggggccacgtcgcgccgcagaacaccttcctggacaccatcatccgcaagtttgagggccagagccgtaagttcatcatcgccaacgctcgggtggagaactgcgccgtcatctactgcaacgacggcttctgcgagctgtgcggctactcgcgggccgaggtgatgcagcgaccctgcacctgcgacttcctgcacgggccgcgcacgcagcgccgcgctgccgcgcagatcgcgcaggcactgctgggcgccgaggagcgcaaagtggaaatcgccttctaccggaaagatgggagctgcttcctatgtctggtggatgtggtgcccgtgaagaacgaggatggggctgtcatcatgttcatcctcaatttcgaggtggtgatggagaaggacatggtggggtccccggctcatgacaccaaccaccggggcccccccaccagctggctggccccaggccgcgccaagaccttccgcctgaagctgcccgcgctgctggcgctgacggcccgggagtcgtcggtgcggtcgggcggcgcgggcggcgcgggcgccccgggggccgtggtggtggacgtggacctgacgcccgcggcacccagcagcgagtcgctggccctggacgaagtgacagccatggacaaccacgtggcagggctcgggcccgcggaggagcggcgtgcgctggtgggtcccggctctccgccccgcagcgcgcccggccagctcccatcgccccgggcgcacagcctcaaccccgacgcctcgggctccagctgcagcctggcccggacgcgctcccgagaaagctgcgccagcgtgcgccgcgcctcgtcggccgacgacatcgaggccatgcgcgccggggtgctgcccccgccaccgcgccacgccagcaccggggccatgcacccactgcgcagcggcttgctcaactccacctcggactccgacctcgtgcgctaccgcaccattagcaagattccccaaatcaccctcaactttgtggacctcaagggcgaccccttcttggcttcgcccaccagtgaccgtgagatcatagcacctaagataaaggagcgaacccacaatgtcactgagaaggtcacccaggtcctgtccctgggcgccgacgtgctgcctgagtacaagctgcaggcaccgcgcatccaccgctggaccatcctgcattacagccccttcaaggccgagtgggactggctcatcctgctgctggtcatctacacggctgtcttcacaccctactcggctgccttcctgctgaaggagacggaagaaggcccgcctgctaccgagtgtggctacgcctgccagccgctggctgtggtggacctcatcgtggacatcatgttcattgtggacatcctcatcaacttccgcaccacctacgtcaatgccaacgaggaggtggtcagccaccccggccgcatcgccgtccactacttcaagggctggttcctcatcgacatggtggccgccatccccttcgacctgctcatcttcggctctggctctgaggagctgatcgggctgctgaagactgcgcggctgctgcggctggtgcgcgtggcgcggaagctggatcgctactcagagtacggcgcggccgtgctgttcttgctcatgtgcacctttgcgctcatcgcgcactggctagcctgcatctggtacgccatcggcaacatggagcagccacacatggactcacgcatcggctggctgcacaacctgggcgaccagataggcaaaccctacaacagcagcggcctgggcggcccctccatcaaggacaagtatgtgacggcgctctacttcaccttcagcagcctcaccagtgtgggcttcggcaacgtctctcccaacaccaactcagagaagatcttctccatctgcgtcatgctcattggctccctcatgtatgctagcatcttcggcaacgtgtcggccatcatccagcggctgtactcgggcacagcccgctaccacacacagatgctgcgggtgcgggagttcatccgcttccaccagatccccaatcccctgcgccagcgcctcgaggagtacttccagcacgcctggtcctacaccaacggcatcgacatgaacgcggtgctgaagggcttccctgagtgcctgcaggctgacatctgcctgcacctgaaccgctcactgctgcagcactgcaaacccttccgaggggccaccaagggctgccttcgggccctggccatgaagttcaagaccacacatgcaccgccaggggacacactggtgcatgctggggacctgctcaccgccctgtacttcatctcccggggctccatcgagatcctgcggggcgacgtcgtcgtggccatcctggggaagaatgacatctttggggagcctctgaacctgtatgcaaggcctggcaagtcgaacggggatgtgcgggccctcacctactgtgacctacacaagatccatcgggacgacctgctggaggtgctggacatgtaccctgagttctccgaccacttctggtccagcctggagatcaccttcaacctgcgagataccaacatgatcccgggctcccccggcagtacggagttagagggtggcttcagtcggcaacgcaagcgcaagttgtccttccgcaggcgcacggacaaggacacggagcagccaggggaggtgtcggccttggggccgggccgggcgggggcagggccgagtagccggggccggccgggggggccgtggggggagagcccgtccagtggcccctccagccctgagagcagtgaggatgagggcccaggccgcagctccagccccctccgcctggtgcccttctccagccccaggccccccggagagccgccgggtggggagcccctgatggaggactgcgagaagagcagcgacacttgcaaccccctgtcaggcgccttctcaggagtgtccaacattttcagcttctggggggacagtcggggccgccagtaccaggagctccctcgatgccccgcccccacccccagcctcctcaacatccccctctccagcccgggtcggcggccccggggcgacgtggagagcaggctggatgccctccagcgccagctcaacaggctggagacccggctgagtgcagacatggccactgtcctgcagctgctacagaggcagatgacgctggtcccgcccgcctacagtgctgtgaccaccccggggcctggccccacttccacatccccgctgttgcccgtcagccccctccccaccctcaccttggactcgctttctcaggtttcccagttcatggcgtgtgaggagctgcccccgggggccccagagcttccccaagaaggccccacacgacgcctctccctaccgggccagctgggggccctcacctcccagcccctgcacagacacggctcggacccgggcagttagtggggctgcccagtgtggacacgtggctcacccagggatcaaggcgctgctgggccgctccccttggaggccctgctcaggaggccctgaccgtggaaggggagaggaactcgaaagcacagctcctcccccagcccttgggaccatcttctcctgcagtcccctgggccccagtgagaggggcaggggcagggccggcagtaggtggggcctgtggtccccccactgccctgagggcattagctggtctaactgcccggaggcacccggccctgggccttaggcacctcaaggacttttctgctatttactgctcttattgttaaggataataattaaggatcatatgaataattaatgaagatgctgatgactatgaataataaataattatcctgaggaga

SEQ ID NO: 41 - DNA, 3884 bp, Homo sapiens
  source 1..3884: mol_type = genomic DNA
  misc_feature 1..3884: note = cDNA of KCNH2 gene SNP c.1229G>A (p.Trp410Ter)
atgccggtgcggaggggccacgtcgcgccgcagaacaccttcctggacaccatcatccgcaagtttgagggccagagccgtaagttcatcatcgccaacgctcgggtggagaactgcgccgtcatctactgcaacgacggcttctgcgagctgtgcggctactcgcgggccgaggtgatgcagcgaccctgcacctgcgacttcctgcacgggccgcgcacgcagcgccgcgctgccgcgcagatcgcgcaggcactgctgggcgccgaggagcgcaaagtggaaatcgccttctaccggaaagatgggagctgcttcctatgtctggtggatgtggtgcccgtgaagaacgaggatggggctgtcatcatgttcatcctcaatttcgaggtggtgatggagaaggacatggtggggtccccggctcatgacaccaaccaccggggcccccccaccagctggctggccccaggccgcgccaagaccttccgcctgaagctgcccgcgctgctggcgctgacggcccgggagtcgtcggtgcggtcgggcggcgcgggcggcgcgggcgccccgggggccgtggtggtggacgtggacctgacgcccgcggcacccagcagcgagtcgctggccctggacgaagtgacagccatggacaaccacgtggcagggctcgggcccgcggaggagcggcgtgcgctggtgggtcccggctctccgccccgcagcgcgcccggccagctcccatcgccccgggcgcacagcctcaaccccgacgcctcgggctccagctgcagcctggcccggacgcgctcccgagaaagctgcgccagcgtgcgccgcgcctcgtcggccgacgacatcgaggccatgcgcgccggggtgctgcccccgccaccgcgccacgccagcaccggggccatgcacccactgcgcagcggcttgctcaactccacctcggactccgacctcgtgcgctaccgcaccattagcaagattccccaaatcaccctcaactttgtggacctcaagggcgaccccttcttggcttcgcccaccagtgaccgtgagatcatagcacctaagataaaggagcgaacccacaatgtcactgagaaggtcacccaggtcctgtccctgggcgccgacgtgctgcctgagtacaagctgcaggcaccgcgcatccaccgctggaccatcctgcattacagccccttcaaggccgtgtaggactggctcatcctgctgctggtcatctacacggctgtcttcacaccctactcggctgccttcctgctgaaggagacggaagaaggcccgcctgctaccgagtgtggctacgcctgccagccgctggctgtggtggacctcatcgtggacatcatgttcattgtggacatcctcatcaacttccgcaccacctacgtcaatgccaacgaggaggtggtcagccaccccggccgcatcgccgtccactacttcaagggctggttcctcatcgacatggtggccgccatccccttcgacctgctcatcttcggctctggctctgaggagctgatcgggctgctgaagactgcgcggctgctgcggctggtgcgcgtggcgcggaagctggatcgctactcagagtacggcgcggccgtgctgttcttgctcatgtgcacctttgcgctcatcgcgcactggctagcctgcatctggtacgccatcggcaacatggagcagccacacatggactcacgcatcggctggctgcacaacctgggcgaccagataggcaaaccctacaacagcagcggcctgggcggcccctccatcaaggacaagtatgtgacggcgctctacttcaccttcagcagcctcaccagtgtgggcttcggcaacgtctctcccaacaccaactcagagaagatcttctccatctgcgtcatgctcattggctccctcatgtatgctagcatcttcggcaacgtgtcggccatcatccagcggctgtactcgggcacagcccgctaccacacacagatgctgcgggtgcgggagttcatccgcttccaccagatccccaatcccctgcgccagcgcctcgaggagtacttccagcacgcctggtcctacaccaacggcatcgacatgaacgcggtgctgaagggcttccctgagtgcctgcaggctgacatctgcctgcacctgaaccgctcactgctgcagcactgcaaacccttccgaggggccaccaagggctgccttcgggccctggccatgaagttcaagaccacacatgcaccgccaggggacacactggtgcatgctggggacctgctcaccgccctgtacttcatctcccggggctccatcgagatcctgcggggcgacgtcgtcgtggccatcctggggaagaatgacatctttggggagcctctgaacctgtatgcaaggcctggcaagtcgaacggggatgtgcgggccctcacctactgtgacctacacaagatccatcgggacgacctgctggaggtgctggacatgtaccctgagttctccgaccacttctggtccagcctggagatcaccttcaacctgcgagataccaacatgatcccgggctcccccggcagtacggagttagagggtggcttcagtcggcaacgcaagcgcaagttgtccttccgcaggcgcacggacaaggacacggagcagccaggggaggtgtcggccttggggccgggccgggcgggggcagggccgagtagccggggccggccgggggggccgtggggggagagcccgtccagtggcccctccagccctgagagcagtgaggatgagggcccaggccgcagctccagccccctccgcctggtgcccttctccagccccaggccccccggagagccgccgggtggggagcccctgatggaggactgcgagaagagcagcgacacttgcaaccccctgtcaggcgccttctcaggagtgtccaacattttcagcttctggggggacagtcggggccgccagtaccaggagctccctcgatgccccgcccccacccccagcctcctcaacatccccctctccagcccgggtcggcggccccggggcgacgtggagagcaggctggatgccctccagcgccagctcaacaggctggagacccggctgagtgcagacatggccactgtcctgcagctgctacagaggcagatgacgctggtcccgcccgcctacagtgctgtgaccaccccggggcctggccccacttccacatccccgctgttgcccgtcagccccctccccaccctcaccttggactcgctttctcaggtttcccagttcatggcgtgtgaggagctgcccccgggggccccagagcttccccaagaaggccccacacgacgcctctccctaccgggccagctgggggccctcacctcccagcccctgcacagacacggctcggacccgggcagttagtggggctgcccagtgtggacacgtggctcacccagggatcaaggcgctgctgggccgctccccttggaggccctgctcaggaggccctgaccgtggaaggggagaggaactcgaaagcacagctcctcccccagcccttgggaccatcttctcctgcagtcccctgggccccagtgagaggggcaggggcagggccggcagtaggtggggcctgtggtccccccactgccctgagggcattagctggtctaactgcccggaggcacccggccctgggccttaggcacctcaaggacttttctgctatttactgctcttattgttaaggataataattaaggatcatatgaataattaatgaagatgctgatgactatgaataataaataattatcctgaggaga

SEQ ID NO: 42 - DNA, 3884 bp, Homo sapiens
  source 1..3884: mol_type = genomic DNA
  misc_feature 1..3884: note = cDNA of KCNH2 gene SNP c.1229G>C (p.Trp410Ser)
atgccggtgcggaggggccacgtcgcgccgcagaacaccttcctggacaccatcatccgcaagtttgagggccagagccgtaagttcatcatcgccaacgctcgggtggagaactgcgccgtcatctactgcaacgacggcttctgcgagctgtgcggctactcgcgggccgaggtgatgcagcgaccctgcacctgcgacttcctgcacgggccgcgcacgcagcgccgcgctgccgcgcagatcgcgcaggcactgctgggcgccgaggagcgcaaagtggaaatcgccttctaccggaaagatgggagctgcttcctatgtctggtggatgtggtgcccgtgaagaacgaggatggggctgtcatcatgttcatcctcaatttcgaggtggtgatggagaaggacatggtggggtccccggctcatgacaccaaccaccggggcccccccaccagctggctggccccaggccgcgccaagaccttccgcctgaagctgcccgcgctgctggcgctgacggcccgggagtcgtcggtgcggtcgggcggcgcgggcggcgcgggcgccccgggggccgtggtggtggacgtggacctgacgcccgcggcacccagcagcgagtcgctggccctggacgaagtgacagccatggacaaccacgtggcagggctcgggcccgcggaggagcggcgtgcgctggtgggtcccggctctccgccccgcagcgcgcccggccagctcccatcgccccgggcgcacagcctcaaccccgacgcctcgggctccagctgcagcctggcccggacgcgctcccgagaaagctgcgccagcgtgcgccgcgcctcgtcggccgacgacatcgaggccatgcgcgccggggtgctgcccccgccaccgcgccacgccagcaccggggccatgcacccactgcgcagcggcttgctcaactccacctcggactccgacctcgtgcgctaccgcaccattagcaagattccccaaatcaccctcaactttgtggacctcaagggcgaccccttcttggcttcgcccaccagtgaccgtgagatcatagcacctaagataaaggagcgaacccacaatgtcactgagaaggtcacccaggtcctgtccctgggcgccgacgtgctgcctgagtacaagctgcaggcaccgcgcatccaccgctggaccatcctgcattacagccccttcaaggccgtgtcggactggctcatcctgctgctggtcatctacacggctgtcttcacaccctactcggctgccttcctgctgaaggagacggaagaaggcccgcctgctaccgagtgtggctacgcctgccagccgctggctgtggtggacctcatcgtggacatcatgttcattgtggacatcctcatcaacttccgcaccacctacgtcaatgccaacgaggaggtggtcagccaccccggccgcatcgccgtccactacttcaagggctggttcctcatcgacatggtggccgccatccccttcgacctgctcatcttcggctctggctctgaggagctgatcgggctgctgaagactgcgcggctgctgcggctggtgcgcgtggcgcggaagctggatcgctactcagagtacggcgcggccgtgctgttcttgctcatgtgcacctttgcgctcatcgcgcactggctagcctgcatctggtacgccatcggcaacatggagcagccacacatggactcacgcatcggctggctgcacaacctgggcgaccagataggcaaaccctacaacagcagcggcctgggcggcccctccatcaaggacaagtatgtgacggcgctctacttcaccttcagcagcctcaccagtgtgggcttcggcaacgtctctcccaacaccaactcagagaagatcttctccatctgcgtcatgctcattggctccctcatgtatgctagcatcttcggcaacgtgtcggccatcatccagcggctgtactcgggcacagcccgctaccacacacagatgctgcgggtgcgggagttcatccgcttccaccagatccccaatcccctgcgccagcgcctcgaggagtacttccagcacgcctggtcctacaccaacggcatcgacatgaacgcggtgctgaagggcttccctgagtgcctgcaggctgacatctgcctgcacctgaaccgctcactgctgcagcactgcaaacccttccgaggggccaccaagggctgccttcgggccctggccatgaagttcaagaccacacatgcaccgccaggggacacactggtgcatgctggggacctgctcaccgccctgtacttcatctcccggggctccatcgagatcctgcggggcgacgtcgtcgtggccatcctggggaagaatgacatctttggggagcctctgaacctgtatgcaaggcctggcaagtcgaacggggatgtgcgggccctcacctactgtgacctacacaagatccatcgggacgacctgctggaggtgctggacatgtaccctgagttctccgaccacttctggtccagcctggagatcaccttcaacctgcgagataccaacatgatcccgggctcccccggcagtacggagttagagggtggcttcagtcggcaacgcaagcgcaagttgtccttccgcaggcgcacggacaaggacacggagcagccaggggaggtgtcggccttggggccgggccgggcgggggcagggccgagtagccggggccggccgggggggccgtggggggagagcccgtccagtggcccctccagccctgagagcagtgaggatgagggcccaggccgcagctccagccccctccgcctggtgcccttctccagccccaggccccccggagagccgccgggtggggagcccctgatggaggactgcgagaagagcagcgacacttgcaaccccctgtcaggcgccttctcaggagtgtccaacattttcagcttctggggggacagtcggggccgccagtaccaggagctccctcgatgccccgcccccacccccagcctcctcaacatccccctctccagcccgggtcggcggccccggggcgacgtggagagcaggctggatgccctccagcgccagctcaacaggctggagacccggctgagtgcagacatggccactgtcctgcagctgctacagaggcagatgacgctggtcccgcccgcctacagtgctgtgaccaccccggggcctggccccacttccacatccccgctgttgcccgtcagccccctccccaccctcaccttggactcgctttctcaggtttcccagttcatggcgtgtgaggagctgcccccgggggccccagagcttccccaagaaggccccacacgacgcctctccctaccgggccagctgggggccctcacctcccagcccctgcacagacacggctcggacccgggcagttagtggggctgcccagtgtggacacgtggctcacccagggatcaaggcgctgctgggccgctccccttggaggccctgctcaggaggccctgaccgtggaaggggagaggaactcgaaagcacagctcctcccccagcccttgggaccatcttctcctgcagtcccctgggccccagtgagaggggcaggggcagggccggcagtaggtggggcctgtggtccccccactgccctgagggcattagctggtctaactgcccggaggcacccggccctgggccttaggcacctcaaggacttttctgctatttactgctcttattgttaaggataataattaaggatcatatgaataattaatgaagatgctgatgactatgaataataaataattatcctgaggaga

SEQ ID NO: 43 - DNA, 3884 bp, Homo sapiens
  source 1..3884: mol_type = genomic DNA
  misc_feature 1..3884: note = cDNA of KCNH2 gene SNP c.122T>C (p.Val41Ala)
atgccggtgcggaggggccacgtcgcgccgcagaacaccttcctggacaccatcatccgcaagtttgagggccagagccgtaagttcatcatcgccaacgctcgggtggagaactgcgccgccatctactgcaacgacggcttctgcgagctgtgcggctactcgcgggccgaggtgatgcagcgaccctgcacctgcgacttcctgcacgggccgcgcacgcagcgccgcgctgccgcgcagatcgcgcaggcactgctgggcgccgaggagcgcaaagtggaaatcgccttctaccggaaagatgggagctgcttcctatgtctggtggatgtggtgcccgtgaagaacgaggatggggctgtcatcatgttcatcctcaatttcgaggtggtgatggagaaggacatggtggggtccccggctcatgacaccaaccaccggggcccccccaccagctggctggccccaggccgcgccaagaccttccgcctgaagctgcccgcgctgctggcgctgacggcccgggagtcgtcggtgcggtcgggcggcgcgggcggcgcgggcgccccgggggccgtggtggtggacgtggacctgacgcccgcggcacccagcagcgagtcgctggccctggacgaagtgacagccatggacaaccacgtggcagggctcgggcccgcggaggagcggcgtgcgctggtgggtcccggctctccgccccgcagcgcgcccggccagctcccatcgccccgggcgcacagcctcaaccccgacgcctcgggctccagctgcagcctggcccggacgcgctcccgagaaagctgcgccagcgtgcgccgcgcctcgtcggccgacgacatcgaggccatgcgcgccggggtgctgcccccgccaccgcgccacgccagcaccggggccatgcacccactgcgcagcggcttgctcaactccacctcggactccgacctcgtgcgctaccgcaccattagcaagattccccaaatcaccctcaactttgtggacctcaagggcgaccccttcttggcttcgcccaccagtgaccgtgagatcatagcacctaagataaaggagcgaacccacaatgtcactgagaaggtcacccaggtcctgtccctgggcgccgacgtgctgcctgagtacaagctgcaggcaccgcgcatccaccgctggaccatcctgcattacagccccttcaaggccgtgtgggactggctcatcctgctgctggtcatctacacggctgtcttcacaccctactcggctgccttcctgctgaaggagacggaagaaggcccgcctgctaccgagtgtggctacgcctgccagccgctggctgtggtggacctcatcgtggacatcatgttcattgtggacatcctcatcaacttccgcaccacctacgtcaatgccaacgaggaggtggtcagccaccccggccgcatcgccgtccactacttcaagggctggttcctcatcgacatggtggccgccatccccttcgacctgctcatcttcggctctggctctgaggagctgatcgggctgctgaagactgcgcggctgctgcggctggtgcgcgtggcgcggaagctggatcgctactcagagtacggcgcggccgtgctgttcttgctcatgtgcacctttgcgctcatcgcgcactggctagcctgcatctggtacgccatcggcaacatggagcagccacacatggactcacgcatcggctggctgcacaacctgggcgaccagataggcaaaccctacaacagcagcggcctgggcggcccctccatcaaggacaagtatgtgacggcgctctacttcaccttcagcagcctcaccagtgtgggcttcggcaacgtctctcccaacaccaactcagagaagatcttctccatctgcgtcatgctcattggctccctcatgtatgctagcatcttcggcaacgtgtcggccatcatccagcggctgtactcgggcacagcccgctaccacacacagatgctgcgggtgcgggagttcatccgcttccaccagatccccaatcccctgcgccagcgcctcgaggagtacttccagcacgcctggtcctacaccaacggcatcgacatgaacgcggtgctgaagggcttccctgagtgcctgcaggctgacatctgcctgcacctgaaccgctcactgctgcagcactgcaaacccttccgaggggccaccaagggctgccttcgggccctggccatgaagttcaagaccacacatgcaccgccaggggacacactggtgcatgctggggacctgctcaccgccctgtacttcatctcccggggctccatcgagatcctgcggggcgacgtcgtcgtggccatcctggggaagaatgacatctttggggagcctctgaacctgtatgcaaggcctggcaagtcgaacggggatgtgcgggccctcacctactgtgacctacacaagatccatcgggacgacctgctggaggtgctggacatgtaccctgagttctccgaccacttctggtccagcctggagatcaccttcaacctgcgagataccaacatgatcccgggctcccccggcagtacggagttagagggtggcttcagtcggcaacgcaagcgcaagttgtccttccgcaggcgcacggacaaggacacggagcagccaggggaggtgtcggccttggggccgggccgggcgggggcagggccgagtagccggggccggccgggggggccgtggggggagagcccgtccagtggcccctccagccctgagagcagtgaggatgagggcccaggccgcagctccagccccctccgcctggtgcccttctccagccccaggccccccggagagccgccgggtggggagcccctgatggaggactgcgagaagagcagcgacacttgcaaccccctgtcaggcgccttctcaggagtgtccaacattttcagcttctggggggacagtcggggccgccagtaccaggagctccctcgatgccccgcccccacccccagcctcctcaacatccccctctccagcccgggtcggcggccccggggcgacgtggagagcaggctggatgccctccagcgccagctcaacaggctggagacccggctgagtgcagacatggccactgtcctgcagctgctacagaggcagatgacgctggtcccgcccgcctacagtgctgtgaccaccccggggcctggccccacttccacatccccgctgttgcccgtcagccccctccccaccctcaccttggactcgctttctcaggtttcccagttcatggcgtgtgaggagctgcccccgggggccccagagcttccccaagaaggccccacacgacgcctctccctaccgggccagctgggggccctcacctcccagcccctgcacagacacggctcggacccgggcagttagtggggctgcccagtgtggacacgtggctcacccagggatcaaggcgctgctgggccgctccccttggaggccctgctcaggaggccctgaccgtggaaggggagaggaactcgaaagcacagctcctcccccagcccttgggaccatcttctcctgcagtcccctgggccccagtgagaggggcaggggcagggccggcagtaggtggggcctgtggtccccccactgccctgagggcattagctggtctaactgcccggaggcacccggccctgggccttaggcacctcaaggacttttctgctatttactgctcttattgttaaggataataattaaggatcatatgaataattaatgaagatgctgatgactatgaataataaataattatcctgaggaga

SEQ ID NO: 44 - DNA, 3884 bp, Homo sapiens
  source 1..3884: mol_type = genomic DNA
  misc_feature 1..3884: note = cDNA of KCNH2 gene SNP c.1231G>A (p.Asp411Asn)
atgccggtgcggaggggccacgtcgcgccgcagaacaccttcctggacaccatcatccgcaagtttgagggccagagccgtaagttcatcatcgccaacgctcgggtggagaactgcgccgtcatctactgcaacgacggcttctgcgagctgtgcggctactcgcgggccgaggtgatgcagcgaccctgcacctgcgacttcctgcacgggccgcgcacgcagcgccgcgctgccgcgcagatcgcgcaggcactgctgggcgccgaggagcgcaaagtggaaatcgccttctaccggaaagatgggagctgcttcctatgtctggtggatgtggtgcccgtgaagaacgaggatggggctgtcatcatgttcatcctcaatttcgaggtggtgatggagaaggacatggtggggtccccggctcatgacaccaaccaccggggcccccccaccagctggctggccccaggccgcgccaagaccttccgcctgaagctgcccgcgctgctggcgctgacggcccgggagtcgtcggtgcggtcgggcggcgcgggcggcgcgggcgccccgggggccgtggtggtggacgtggacctgacgcccgcggcacccagcagcgagtcgctggccctggacgaagtgacagccatggacaaccacgtggcagggctcgggcccgcggaggagcggcgtgcgctggtgggtcccggctctccgccccgcagcgcgcccggccagctcccatcgccccgggcgcacagcctcaaccccgacgcctcgggctccagctgcagcctggcccggacgcgctcccgagaaagctgcgccagcgtgcgccgcgcctcgtcggccgacgacatcgaggccatgcgcgccggggtgctgcccccgccaccgcgccacgccagcaccggggccatgcacccactgcgcagcggcttgctcaactccacctcggactccgacctcgtgcgctaccgcaccattagcaagattccccaaatcaccctcaactttgtggacctcaagggcgaccccttcttggcttcgcccaccagtgaccgtgagatcatagcacctaagataaaggagcgaacccacaatgtcactgagaaggtcacccaggtcctgtccctgggcgccgacgtgctgcctgagtacaagctgcaggcaccgcgcatccaccgctggaccatcctgcattacagccccttcaaggccgtgtggaactggctcatcctgctgctggtcatctacacggctgtcttcacaccctactcggctgccttcctgctgaaggagacggaagaaggcccgcctgctaccgagtgtggctacgcctgccagccgctggctgtggtggacctcatcgtggacatcatgttcattgtggacatcctcatcaacttccgcaccacctacgtcaatgccaacgaggaggtggtcagccaccccggccgcatcgccgtccactacttcaagggctggttcctcatcgacatggtggccgccatccccttcgacctgctcatcttcggctctggctctgaggagctgatcgggctgctgaagactgcgcggctgctgcggctggtgcgcgtggcgcggaagctggatcgctactcagagtacggcgcggccgtgctgttcttgctcatgtgcacctttgcgctcatcgcgcactggctagcctgcatctggtacgccatcggcaacatggagcagccacacatggactcacgcatcggctggctgcacaacctgggcgaccagataggcaaaccctacaacagcagcggcctgggcggcccctccatcaaggacaagtatgtgacggcgctctacttcaccttcagcagcctcaccagtgtgggcttcggcaacgtctctcccaacaccaactcagagaagatcttctccatctgcgtcatgctcattggctccctcatgtatgctagcatcttcggcaacgtgtcggccatcatccagcggctgtactcgggcacagcccgctaccacacacagatgctgcgggtgcgggagttcatccgcttccaccagatccccaatcccctgcgccagcgcctcgaggagtacttccagcacgcctggtcctacaccaacggcatcgacatgaacgcggtgctgaagggcttccctgagtgcctgcaggctgacatctgcctgcacctgaaccgctcactgctgcagcactgcaaacccttccgaggggccaccaagggctgccttcgggccctggccatgaagttcaagaccacacatgcaccgccaggggacacactggtgcatgctggggacctgctcaccgccctgtacttcatctcccggggctccatcgagatcctgcggggcgacgtcgtcgtggccatcctggggaagaatgacatctttggggagcctctgaacctgtatgcaaggcctggcaagtcgaacggggatgtgcgggccctcacctactgtgacctacacaagatccatcgggacgacctgctggaggtgctggacatgtaccctgagttctccgaccacttctggtccagcctggagatcaccttcaacctgcgagataccaacatgatcccgggctcccccggcagtacggagttagagggtggcttcagtcggcaacgcaagcgcaagttgtccttccgcaggcgcacggacaaggacacggagcagccaggggaggtgtcggccttggggccgggccgggcgggggcagggccgagtagccggggccggccgggggggccgtggggggagagcccgtccagtggcccctccagccctgagagcagtgaggatgagggcccaggccgcagctccagccccctccgcctggtgcccttctccagccccaggccccccggagagccgccgggtggggagcccctgatggaggactgcgagaagagcagcgacacttgcaaccccctgtcaggcgccttctcaggagtgtccaacattttcagcttctggggggacagtcggggccgccagtaccaggagctccctcgatgccccgcccccacccccagcctcctcaacatccccctctccagcccgggtcggcggccccggggcgacgtggagagcaggctggatgccctccagcgccagctcaacaggctggagacccggctgagtgcagacatggccactgtcctgcagctgctacagaggcagatgacgctggtcccgcccgcctacagtgctgtgaccaccccggggcctggccccacttccacatccccgctgttgcccgtcagccccctccccaccctcaccttggactcgctttctcaggtttcccagttcatggcgtgtgaggagctgcccccgggggccccagagcttccccaagaaggccccacacgacgcctctccctaccgggccagctgggggccctcacctcccagcccctgcacagacacggctcggacccgggcagttagtggggctgcccagtgtggacacgtggctcacccagggatcaaggcgctgctgggccgctccccttggaggccctgctcaggaggccctgaccgtggaaggggagaggaactcgaaagcacagctcctcccccagcccttgggaccatcttctcctgcagtcccctgggccccagtgagaggggcaggggcagggccggcagtaggtggggcctgtggtccccccactgccctgagggcattagctggtctaactgcccggaggcacccggccctgggccttaggcacctcaaggacttttctgctatttactgctcttattgttaaggataataattaaggatcatatgaataattaatgaagatgctgatgactatgaataataaataattatcctgaggaga

SEQ ID NO: 45 - DNA, 3884 bp, Homo sapiens
  source 1..3884: mol_type = genomic DNA
  misc_feature 1..3884: note = cDNA of KCNH2 gene SNP c.1238T>C (p.Leu413Pro)
atgccggtgcggaggggccacgtcgcgccgcagaacaccttcctggacaccatcatccgcaagtttgagggccagagccgtaagttcatcatcgccaacgctcgggtggagaactgcgccgtcatctactgcaacgacggcttctgcgagctgtgcggctactcgcgggccgaggtgatgcagcgaccctgcacctgcgacttcctgcacgggccgcgcacgcagcgccgcgctgccgcgcagatcgcgcaggcactgctgggcgccgaggagcgcaaagtggaaatcgccttctaccggaaagatgggagctgcttcctatgtctggtggatgtggtgcccgtgaagaacgaggatggggctgtcatcatgttcatcctcaatttcgaggtggtgatggagaaggacatggtggggtccccggctcatgacaccaaccaccggggcccccccaccagctggctggccccaggccgcgccaagaccttccgcctgaagctgcccgcgctgctggcgctgacggcccgggagtcgtcggtgcggtcgggcggcgcgggcggcgcgggcgccccgggggccgtggtggtggacgtggacctgacgcccgcggcacccagcagcgagtcgctggccctggacgaagtgacagccatggacaaccacgtggcagggctcgggcccgcggaggagcggcgtgcgctggtgggtcccggctctccgccccgcagcgcgcccggccagctcccatcgccccgggcgcacagcctcaaccccgacgcctcgggctccagctgcagcctggcccggacgcgctcccgagaaagctgcgccagcgtgcgccgcgcctcgtcggccgacgacatcgaggccatgcgcgccggggtgctgcccccgccaccgcgccacgccagcaccggggccatgcacccactgcgcagcggcttgctcaactccacctcggactccgacctcgtgcgctaccgcaccattagcaagattccccaaatcaccctcaactttgtggacctcaagggcgaccccttcttggcttcgcccaccagtgaccgtgagatcatagcacctaagataaaggagcgaacccacaatgtcactgagaaggtcacccaggtcctgtccctgggcgccgacgtgctgcctgagtacaagctgcaggcaccgcgcatccaccgctggaccatcctgcattacagccccttcaaggccgtgtgggactggcccatcctgctgctggtcatctacacggctgtcttcacaccctactcggctgccttcctgctgaaggagacggaagaaggcccgcctgctaccgagtgtggctacgcctgccagccgctggctgtggtggacctcatcgtggacatcatgttcattgtggacatcctcatcaacttccgcaccacctacgtcaatgccaacgaggaggtggtcagccaccccggccgcatcgccgtccactacttcaagggctggttcctcatcgacatggtggccgccatccccttcgacctgctcatcttcggctctggctctgaggagctgatcgggctgctgaagactgcgcggctgctgcggctggtgcgcgtggcgcggaagctggatcgctactcagagtacggcgcggccgtgctgttcttgctcatgtgcacctttgcgctcatcgcgcactggctagcctgcatctggtacgccatcggcaacatggagcagccacacatggactcacgcatcggctggctgcacaacctgggcgaccagataggcaaaccctacaacagcagcggcctgggcggcccctccatcaaggacaagtatgtgacggcgctctacttcaccttcagcagcctcaccagtgtgggcttcggcaacgtctctcccaacaccaactcagagaagatcttctccatctgcgtcatgctcattggctccctcatgtatgctagcatcttcggcaacgtgtcggccatcatccagcggctgtactcgggcacagcccgctaccacacacagatgctgcgggtgcgggagttcatccgcttccaccagatccccaatcccctgcgccagcgcctcgaggagtacttccagcacgcctggtcctacaccaacggcatcgacatgaacgcggtgctgaagggcttccctgagtgcctgcaggctgacatctgcctgcacctgaaccgctcactgctgcagcactgcaaacccttccgaggggccaccaagggctgccttcgggccctggccatgaagttcaagaccacacatgcaccgccaggggacacactggtgcatgctggggacctgctcaccgccctgtacttcatctcccggggctccatcgagatcctgcggggcgacgtcgtcgtggccatcctggggaagaatgacatctttggggagcctctgaacctgtatgcaaggcctggcaagtcgaacggggatgtgcgggccctcacctactgtgacctacacaagatccatcgggacgacctgctggaggtgctggacatgtaccctgagttctccgaccacttctggtccagcctggagatcaccttcaacctgcgagataccaacatgatcccgggctcccccggcagtacggagttagagggtggcttcagtcggcaacgcaagcgcaagttgtccttccgcaggcgcacggacaaggacacggagcagccaggggaggtgtcggccttggggccgggccgggcgggggcagggccgagtagccggggccggccgggggggccgtggggggagagcccgtccagtggcccctccagccctgagagcagtgaggatgagggcccaggccgcagctccagccccctccgcctggtgcccttctccagccccaggccccccggagagccgccgggtggggagcccctgatggaggactgcgagaagagcagcgacacttgcaaccccctgtcaggcgccttctcaggagtgtccaacattttcagcttctggggggacagtcggggccgccagtaccaggagctccctcgatgccccgcccccacccccagcctcctcaacatccccctctccagcccgggtcggcggccccggggcgacgtggagagcaggctggatgccctccagcgccagctcaacaggctggagacccggctgagtgcagacatggccactgtcctgcagctgctacagaggcagatgacgctggtcccgcccgcctacagtgctgtgaccaccccggggcctggccccacttccacatccccgctgttgcccgtcagccccctccccaccctcaccttggactcgctttctcaggtttcccagttcatggcgtgtgaggagctgcccccgggggccccagagcttccccaagaaggccccacacgacgcctctccctaccgggccagctgggggccctcacctcccagcccctgcacagacacggctcggacccgggcagttagtggggctgcccagtgtggacacgtggctcacccagggatcaaggcgctgctgggccgctccccttggaggccctgctcaggaggccctgaccgtggaaggggagaggaactcgaaagcacagctcctcccccagcccttgggaccatcttctcctgcagtcccctgggccccagtgagaggggcaggggcagggccggcagtaggtggggcctgtggtccccccactgccctgagggcattagctggtctaactgcccggaggcacccggccctgggccttaggcacctcaaggacttttctgctatttactgctcttattgttaaggataataattaaggatcatatgaataattaatgaagatgctgatgactatgaataataaataattatcctgaggaga

SEQ ID NO: 46 - DNA, 3884 bp, Homo sapiens
  source 1..3884: mol_type = genomic DNA
  misc_feature 1..3884: note = cDNA of KCNH2 gene SNP c.1238T>G (p.Leu413Arg)
atgccggtgcggaggggccacgtcgcgccgcagaacaccttcctggacaccatcatccgcaagtttgagggccagagccgtaagttcatcatcgccaacgctcgggtggagaactgcgccgtcatctactgcaacgacggcttctgcgagctgtgcggctactcgcgggccgaggtgatgcagcgaccctgcacctgcgacttcctgcacgggccgcgcacgcagcgccgcgctgccgcgcagatcgcgcaggcactgctgggcgccgaggagcgcaaagtggaaatcgccttctaccggaaagatgggagctgcttcctatgtctggtggatgtggtgcccgtgaagaacgaggatggggctgtcatcatgttcatcctcaatttcgaggtggtgatggagaaggacatggtggggtccccggctcatgacaccaaccaccggggcccccccaccagctggctggccccaggccgcgccaagaccttccgcctgaagctgcccgcgctgctggcgctgacggcccgggagtcgtcggtgcggtcgggcggcgcgggcggcgcgggcgccccgggggccgtggtggtggacgtggacctgacgcccgcggcacccagcagcgagtcgctggccctggacgaagtgacagccatggacaaccacgtggcagggctcgggcccgcggaggagcggcgtgcgctggtgggtcccggctctccgccccgcagcgcgcccggccagctcccatcgccccgggcgcacagcctcaaccccgacgcctcgggctccagctgcagcctggcccggacgcgctcccgagaaagctgcgccagcgtgcgccgcgcctcgtcggccgacgacatcgaggccatgcgcgccggggtgctgcccccgccaccgcgccacgccagcaccggggccatgcacccactgcgcagcggcttgctcaactccacctcggactccgacctcgtgcgctaccgcaccattagcaagattccccaaatcaccctcaactttgtggacctcaagggcgaccccttcttggcttcgcccaccagtgaccgtgagatcatagcacctaagataaaggagcgaacccacaatgtcactgagaaggtcacccaggtcctgtccctgggcgccgacgtgctgcctgagtacaagctgcaggcaccgcgcatccaccgctggaccatcctgcattacagccccttcaaggccgtgtgggactggcgcatcctgctgctggtcatctacacggctgtcttcacaccctactcggctgccttcctgctgaaggagacggaagaaggcccgcctgctaccgagtgtggctacgcctgccagccgctggctgtggtggacctcatcgtggacatcatgttcattgtggacatcctcatcaacttccgcaccacctacgtcaatgccaacgaggaggtggtcagccaccccggccgcatcgccgtccactacttcaagggctggttcctcatcgacatggtggccgccatccccttcgacctgctcatcttcggctctggctctgaggagctgatcgggctgctgaagactgcgcggctgctgcggctggtgcgcgtggcgcggaagctggatcgctactcagagtacggcgcggccgtgctgttcttgctcatgtgcacctttgcgctcatcgcgcactggctagcctgcatctggtacgccatcggcaacatggagcagccacacatggactcacgcatcggctggctgcacaacctgggcgaccagataggcaaaccctacaacagcagcggcctgggcggcccctccatcaaggacaagtatgtgacggcgctctacttcaccttcagcagcctcaccagtgtgggcttcggcaacgtctctcccaacaccaactcagagaagatcttctccatctgcgtcatgctcattggctccctcatgtatgctagcatcttcggcaacgtgtcggccatcatccagcggctgtactcgggcacagcccgctaccacacacagatgctgcgggtgcgggagttcatccgcttccaccagatccccaatcccctgcgccagcgcctcgaggagtacttccagcacgcctggtcctacaccaacggcatcgacatgaacgcggtgctgaagggcttccctgagtgcctgcaggctgacatctgcctgcacctgaaccgctcactgctgcagcactgcaaacccttccgaggggccaccaagggctgccttcgggccctggccatgaagttcaagaccacacatgcaccgccaggggacacactggtgcatgctggggacctgctcaccgccctgtacttcatctcccggggctccatcgagatcctgcggggcgacgtcgtcgtggccatcctggggaagaatgacatctttggggagcctctgaacctgtatgcaaggcctggcaagtcgaacggggatgtgcgggccctcacctactgtgacctacacaagatccatcgggacgacctgctggaggtgctggacatgtaccctgagttctccgaccacttctggtccagcctggagatcaccttcaacctgcgagataccaacatgatcccgggctcccccggcagtacggagttagagggtggcttcagtcggcaacgcaagcgcaagttgtccttccgcaggcgcacggacaaggacacggagcagccaggggaggtgtcggccttggggccgggccgggcgggggcagggccgagtagccggggccggccgggggggccgtggggggagagcccgtccagtggcccctccagccctgagagcagtgaggatgagggcccaggccgcagctccagccccctccgcctggtgcccttctccagccccaggccccccggagagccgccgggtggggagcccctgatggaggactgcgagaagagcagcgacacttgcaaccccctgtcaggcgccttctcaggagtgtccaacattttcagcttctggggggacagtcggggccgccagtaccaggagctccctcgatgccccgcccccacccccagcctcctcaacatccccctctccagcccgggtcggcggccccggggcgacgtggagagcaggctggatgccctccagcgccagctcaacaggctggagacccggctgagtgcagacatggccactgtcctgcagctgctacagaggcagatgacgctggtcccgcccgcctacagtgctgtgaccaccccggggcctggccccacttccacatccccgctgttgcccgtcagccccctccccaccctcaccttggactcgctttctcaggtttcccagttcatggcgtgtgaggagctgcccccgggggccccagagcttccccaagaaggccccacacgacgcctctccctaccgggccagctgggggccctcacctcccagcccctgcacagacacggctcggacccgggcagttagtggggctgcccagtgtggacacgtggctcacccagggatcaaggcgctgctgggccgctccccttggaggccctgctcaggaggccctgaccgtggaaggggagaggaactcgaaagcacagctcctcccccagcccttgggaccatcttctcctgcagtcccctgggccccagtgagaggggcaggggcagggccggcagtaggtggggcctgtggtccccccactgccctgagggcattagctggtctaactgcccggaggcacccggccctgggccttaggcacctcaaggacttttctgctatttactgctcttattgttaaggataataattaaggatcatatgaataattaatgaagatgctgatgactatgaataataaataattatcctgaggaga

SEQ ID NO: 47 - DNA, 3884 bp, Homo sapiens
  source 1..3884: mol_type = genomic DNA
  misc_feature 1..3884: note = cDNA of KCNH2 gene SNP c.1240A>G (p.Ile414Val)
atgccggtgcggaggggccacgtcgcgccgcagaacaccttcctggacaccatcatccgcaagtttgagggccagagccgtaagttcatcatcgccaacgctcgggtggagaactgcgccgtcatctactgcaacgacggcttctgcgagctgtgcggctactcgcgggccgaggtgatgcagcgaccctgcacctgcgacttcctgcacgggccgcgcacgcagcgccgcgctgccgcgcagatcgcgcaggcactgctgggcgccgaggagcgcaaagtggaaatcgccttctaccggaaagatgggagctgcttcctatgtctggtggatgtggtgcccgtgaagaacgaggatggggctgtcatcatgttcatcctcaatttcgaggtggtgatggagaaggacatggtggggtccccggctcatgacaccaaccaccggggcccccccaccagctggctggccccaggccgcgccaagaccttccgcctgaagctgcccgcgctgctggcgctgacggcccgggagtcgtcggtgcggtcgggcggcgcgggcggcgcgggcgccccgggggccgtggtggtggacgtggacctgacgcccgcggcacccagcagcgagtcgctggccctggacgaagtgacagccatggacaaccacgtggcagggctcgggcccgcggaggagcggcgtgcgctggtgggtcccggctctccgccccgcagcgcgcccggccagctcccatcgccccgggcgcacagcctcaaccccgacgcctcgggctccagctgcagcctggcccggacgcgctcccgagaaagctgcgccagcgtgcgccgcgcctcgtcggccgacgacatcgaggccatgcgcgccggggtgctgcccccgccaccgcgccacgccagcaccggggccatgcacccactgcgcagcggcttgctcaactccacctcggactccgacctcgtgcgctaccgcaccattagcaagattccccaaatcaccctcaactttgtggacctcaagggcgaccccttcttggcttcgcccaccagtgaccgtgagatcatagcacctaagataaaggagcgaacccacaatgtcactgagaaggtcacccaggtcctgtccctgggcgccgacgtgctgcctgagtacaagctgcaggcaccgcgcatccaccgctggaccatcctgcattacagccccttcaaggccgtgtgggactggctcgtcctgctgctggtcatctacacggctgtcttcacaccctactcggctgccttcctgctgaaggagacggaagaaggcccgcctgctaccgagtgtggctacgcctgccagccgctggctgtggtggacctcatcgtggacatcatgttcattgtggacatcctcatcaacttccgcaccacctacgtcaatgccaacgaggaggtggtcagccaccccggccgcatcgccgtccactacttcaagggctggttcctcatcgacatggtggccgccatccccttcgacctgctcatcttcggctctggctctgaggagctgatcgggctgctgaagactgcgcggctgctgcggctggtgcgcgtggcgcggaagctggatcgctactcagagtacggcgcggccgtgctgttcttgctcatgtgcacctttgcgctcatcgcgcactggctagcctgcatctggtacgccatcggcaacatggagcagccacacatggactcacgcatcggctggctgcacaacctgggcgaccagataggcaaaccctacaacagcagcggcctgggcggcccctccatcaaggacaagtatgtgacggcgctctacttcaccttcagcagcctcaccagtgtgggcttcggcaacgtctctcccaacaccaactcagagaagatcttctccatctgcgtcatgctcattggctccctcatgtatgctagcatcttcggcaacgtgtcggccatcatccagcggctgtactcgggcacagcccgctaccacacacagatgctgcgggtgcgggagttcatccgcttccaccagatccccaatcccctgcgccagcgcctcgaggagtacttccagcacgcctggtcctacaccaacggcatcgacatgaacgcggtgctgaagggcttccctgagtgcctgcaggctgacatctgcctgcacctgaaccgctcactgctgcagcactgcaaacccttccgaggggccaccaagggctgccttcgggccctggccatgaagttcaagaccacacatgcaccgccaggggacacactggtgcatgctggggacctgctcaccgccctgtacttcatctcccggggctccatcgagatcctgcggggcgacgtcgtcgtggccatcctggggaagaatgacatctttggggagcctctgaacctgtatgcaaggcctggcaagtcgaacggggatgtgcgggccctcacctactgtgacctacacaagatccatcgggacgacctgctggaggtgctggacatgtaccctgagttctccgaccacttctggtccagcctggagatcaccttcaacctgcgagataccaacatgatcccgggctcccccggcagtacggagttagagggtggcttcagtcggcaacgcaagcgcaagttgtccttccgcaggcgcacggacaaggacacggagcagccaggggaggtgtcggccttggggccgggccgggcgggggcagggccgagtagccggggccggccgggggggccgtggggggagagcccgtccagtggcccctccagccctgagagcagtgaggatgagggcccaggccgcagctccagccccctccgcctggtgcccttctccagccccaggccccccggagagccgccgggtggggagcccctgatggaggactgcgagaagagcagcgacacttgcaaccccctgtcaggcgccttctcaggagtgtccaacattttcagcttctggggggacagtcggggccgccagtaccaggagctccctcgatgccccgcccccacccccagcctcctcaacatccccctctccagcccgggtcggcggccccggggcgacgtggagagcaggctggatgccctccagcgccagctcaacaggctggagacccggctgagtgcagacatggccactgtcctgcagctgctacagaggcagatgacgctggtcccgcccgcctacagtgctgtgaccaccccggggcctggccccacttccacatccccgctgttgcccgtcagccccctccccaccctcaccttggactcgctttctcaggtttcccagttcatggcgtgtgaggagctgcccccgggggccccagagcttccccaagaaggccccacacgacgcctctccctaccgggccagctgggggccctcacctcccagcccctgcacagacacggctcggacccgggcagttagtggggctgcccagtgtggacacgtggctcacccagggatcaaggcgctgctgggccgctccccttggaggccctgctcaggaggccctgaccgtggaaggggagaggaactcgaaagcacagctcctcccccagcccttgggaccatcttctcctgcagtcccctgggccccagtgagaggggcaggggcagggccggcagtaggtggggcctgtggtccccccactgccctgagggcattagctggtctaactgcccggaggcacccggccctgggccttaggcacctcaaggacttttctgctatttactgctcttattgttaaggataataattaaggatcatatgaataattaatgaagatgctgatgactatgaataataaataattatcctgaggaga

SEQ ID NO: 48 - DNA, 3884 bp, Homo sapiens
  source 1..3884: mol_type = genomic DNA
  misc_feature 1..3884: note = cDNA of KCNH2 gene SNP c.1259A>G (p.Tyr420Cys)
atgccggtgcggaggggccacgtcgcgccgcagaacaccttcctggacaccatcatccgcaagtttgagggccagagccgtaagttcatcatcgccaacgctcgggtggagaactgcgccgtcatctactgcaacgacggcttctgcgagctgtgcggctactcgcgggccgaggtgatgcagcgaccctgcacctgcgacttcctgcacgggccgcgcacgcagcgccgcgctgccgcgcagatcgcgcaggcactgctgggcgccgaggagcgcaaagtggaaatcgccttctaccggaaagatgggagctgcttcctatgtctggtggatgtggtgcccgtgaagaacgaggatggggctgtcatcatgttcatcctcaatttcgaggtggtgatggagaaggacatggtggggtccccggctcatgacaccaaccaccggggcccccccaccagctggctggccccaggccgcgccaagaccttccgcctgaagctgcccgcgctgctggcgctgacggcccgggagtcgtcggtgcggtcgggcggcgcgggcggcgcgggcgccccgggggccgtggtggtggacgtggacctgacgcccgcggcacccagcagcgagtcgctggccctggacgaagtgacagccatggacaaccacgtggcagggctcgggcccgcggaggagcggcgtgcgctggtgggtcccggctctccgccccgcagcgcgcccggccagctcccatcgccccgggcgcacagcctcaaccccgacgcctcgggctccagctgcagcctggcccggacgcgctcccgagaaagctgcgccagcgtgcgccgcgcctcgtcggccgacgacatcgaggccatgcgcgccggggtgctgcccccgccaccgcgccacgccagcaccggggccatgcacccactgcgcagcggcttgctcaactccacctcggactccgacctcgtgcgctaccgcaccattagcaagattccccaaatcaccctcaactttgtggacctcaagggcgaccccttcttggcttcgcccaccagtgaccgtgagatcatagcacctaagataaaggagcgaacccacaatgtcactgagaaggtcacccaggtcctgtccctgggcgccgacgtgctgcctgagtacaagctgcaggcaccgcgcatccaccgctggaccatcctgcattacagccccttcaaggccgtgtgggactggctcatcctgctgctggtcatctgcacggctgtcttcacaccctactcggctgccttcctgctgaaggagacggaagaaggcccgcctgctaccgagtgtggctacgcctgccagccgctggctgtggtggacctcatcgtggacatcatgttcattgtggacatcctcatcaacttccgcaccacctacgtcaatgccaacgaggaggtggtcagccaccccggccgcatcgccgtccactacttcaagggctggttcctcatcgacatggtggccgccatccccttcgacctgctcatcttcggctctggctctgaggagctgatcgggctgctgaagactgcgcggctgctgcggctggtgcgcgtggcgcggaagctggatcgctactcagagtacggcgcggccgtgctgttcttgctcatgtgcacctttgcgctcatcgcgcactggctagcctgcatctggtacgccatcggcaacatggagcagccacacatggactcacgcatcggctggctgcacaacctgggcgaccagataggcaaaccctacaacagcagcggcctgggcggcccctccatcaaggacaagtatgtgacggcgctctacttcaccttcagcagcctcaccagtgtgggcttcggcaacgtctctcccaacaccaactcagagaagatcttctccatctgcgtcatgctcattggctccctcatgtatgctagcatcttcggcaacgtgtcggccatcatccagcggctgtactcgggcacagcccgctaccacacacagatgctgcgggtgcgggagttcatccgcttccaccagatccccaatcccctgcgccagcgcctcgaggagtacttccagcacgcctggtcctacaccaacggcatcgacatgaacgcggtgctgaagggcttccctgagtgcctgcaggctgacatctgcctgcacctgaaccgctcactgctgcagcactgcaaacccttccgaggggccaccaagggctgccttcgggccctggccatgaagttcaagaccacacatgcaccgccaggggacacactggtgcatgctggggacctgctcaccgccctgtacttcatctcccggggctccatcgagatcctgcggggcgacgtcgtcgtggccatcctggggaagaatgacatctttggggagcctctgaacctgtatgcaaggcctggcaagtcgaacggggatgtgcgggccctcacctactgtgacctacacaagatccatcgggacgacctgctggaggtgctggacatgtaccctgagttctccgaccacttctggtccagcctggagatcaccttcaacctgcgagataccaacatgatcccgggctcccccggcagtacggagttagagggtggcttcagtcggcaacgcaagcgcaagttgtccttccgcaggcgcacggacaaggacacggagcagccaggggaggtgtcggccttggggccgggccgggcgggggcagggccgagtagccggggccggccgggggggccgtggggggagagcccgtccagtggcccctccagccctgagagcagtgaggatgagggcccaggccgcagctccagccccctccgcctggtgcccttctccagccccaggccccccggagagccgccgggtggggagcccctgatggaggactgcgagaagagcagcgacacttgcaaccccctgtcaggcgccttctcaggagtgtccaacattttcagcttctggggggacagtcggggccgccagtaccaggagctccctcgatgccccgcccccacccccagcctcctcaacatccccctctccagcccgggtcggcggccccggggcgacgtggagagcaggctggatgccctccagcgccagctcaacaggctggagacccggctgagtgcagacatggccactgtcctgcagctgctacagaggcagatgacgctggtcccgcccgcctacagtgctgtgaccaccccggggcctggccccacttccacatccccgctgttgcccgtcagccccctccccaccctcaccttggactcgctttctcaggtttcccagttcatggcgtgtgaggagctgcccccgggggccccagagcttccccaagaaggccccacacgacgcctctccctaccgggccagctgggggccctcacctcccagcccctgcacagacacggctcggacccgggcagttagtggggctgcccagtgtggacacgtggctcacccagggatcaaggcgctgctgggccgctccccttggaggccctgctcaggaggccctgaccgtggaaggggagaggaactcgaaagcacagctcctcccccagcccttgggaccatcttctcctgcagtcccctgggccccagtgagaggggcaggggcagggccggcagtaggtggggcctgtggtccccccactgccctgagggcattagctggtctaactgcccggaggcacccggccctgggccttaggcacctcaaggacttttctgctatttactgctcttattgttaaggataataattaaggatcatatgaataattaatgaagatgctgatgactatgaataataaataattatcctgaggaga

SEQ ID NO: 49 - DNA, 3884 bp, Homo sapiens
  source 1..3884: mol_type = genomic DNA
  misc_feature 1..3884: note = cDNA of KCNH2 gene SNP c.125T>A (p.Ile42Asn)
atgccggtgcggaggggccacgtcgcgccgcagaacaccttcctggacaccatcatccgcaagtttgagggccagagccgtaagttcatcatcgccaacgctcgggtggagaactgcgccgtcaactactgcaacgacggcttctgcgagctgtgcggctactcgcgggccgaggtgatgcagcgaccctgcacctgcgacttcctgcacgggccgcgcacgcagcgccgcgctgccgcgcagatcgcgcaggcactgctgggcgccgaggagcgcaaagtggaaatcgccttctaccggaaagatgggagctgcttcctatgtctggtggatgtggtgcccgtgaagaacgaggatggggctgtcatcatgttcatcctcaatttcgaggtggtgatggagaaggacatggtggggtccccggctcatgacaccaaccaccggggcccccccaccagctggctggccccaggccgcgccaagaccttccgcctgaagctgcccgcgctgctggcgctgacggcccgggagtcgtcggtgcggtcgggcggcgcgggcggcgcgggcgccccgggggccgtggtggtggacgtggacctgacgcccgcggcacccagcagcgagtcgctggccctggacgaagtgacagccatggacaaccacgtggcagggctcgggcccgcggaggagcggcgtgcgctggtgggtcccggctctccgccccgcagcgcgcccggccagctcccatcgccccgggcgcacagcctcaaccccgacgcctcgggctccagctgcagcctggcccggacgcgctcccgagaaagctgcgccagcgtgcgccgcgcctcgtcggccgacgacatcgaggccatgcgcgccggggtgctgcccccgccaccgcgccacgccagcaccggggccatgcacccactgcgcagcggcttgctcaactccacctcggactccgacctcgtgcgctaccgcaccattagcaagattccccaaatcaccctcaactttgtggacctcaagggcgaccccttcttggcttcgcccaccagtgaccgtgagatcatagcacctaagataaaggagcgaacccacaatgtcactgagaaggtcacccaggtcctgtccctgggcgccgacgtgctgcctgagtacaagctgcaggcaccgcgcatccaccgctggaccatcctgcattacagccccttcaaggccgtgtgggactggctcatcctgctgctggtcatctacacggctgtcttcacaccctactcggctgccttcctgctgaaggagacggaagaaggcccgcctgctaccgagtgtggctacgcctgccagccgctggctgtggtggacctcatcgtggacatcatgttcattgtggacatcctcatcaacttccgcaccacctacgtcaatgccaacgaggaggtggtcagccaccccggccgcatcgccgtccactacttcaagggctggttcctcatcgacatggtggccgccatccccttcgacctgctcatcttcggctctggctctgaggagctgatcgggctgctgaagactgcgcggctgctgcggctggtgcgcgtggcgcggaagctggatcgctactcagagtacggcgcggccgtgctgttcttgctcatgtgcacctttgcgctcatcgcgcactggctagcctgcatctggtacgccatcggcaacatggagcagccacacatggactcacgcatcggctggctgcacaacctgggcgaccagataggcaaaccctacaacagcagcggcctgggcggcccctccatcaaggacaagtatgtgacggcgctctacttcaccttcagcagcctcaccagtgtgggcttcggcaacgtctctcccaacaccaactcagagaagatcttctccatctgcgtcatgctcattggctccctcatgtatgctagcatcttcggcaacgtgtcggccatcatccagcggctgtactcgggcacagcccgctaccacacacagatgctgcgggtgcgggagttcatccgcttccaccagatccccaatcccctgcgccagcgcctcgaggagtacttccagcacgcctggtcctacaccaacggcatcgacatgaacgcggtgctgaagggcttccctgagtgcctgcaggctgacatctgcctgcacctgaaccgctcactgctgcagcactgcaaacccttccgaggggccaccaagggctgccttcgggccctggccatgaagttcaagaccacacatgcaccgccaggggacacactggtgcatgctggggacctgctcaccgccctgtacttcatctcccggggctccatcgagatcctgcggggcgacgtcgtcgtggccatcctggggaagaatgacatctttggggagcctctgaacctgtatgcaaggcctggcaagtcgaacggggatgtgcgggccctcacctactgtgacctacacaagatccatcgggacgacctgctggaggtgctggacatgtaccctgagttctccgaccacttctggtccagcctggagatcaccttcaacctgcgagataccaacatgatcccgggctcccccggcagtacggagttagagggtggcttcagtcggcaacgcaagcgcaagttgtccttccgcaggcgcacggacaaggacacggagcagccaggggaggtgtcggccttggggccgggccgggcgggggcagggccgagtagccggggccggccgggggggccgtggggggagagcccgtccagtggcccctccagccctgagagcagtgaggatgagggcccaggccgcagctccagccccctccgcctggtgcccttctccagccccaggccccccggagagccgccgggtggggagcccctgatggaggactgcgagaagagcagcgacacttgcaaccccctgtcaggcgccttctcaggagtgtccaacattttcagcttctggggggacagtcggggccgccagtaccaggagctccctcgatgccccgcccccacccccagcctcctcaacatccccctctccagcccgggtcggcggccccggggcgacgtggagagcaggctggatgccctccagcgccagctcaacaggctggagacccggctgagtgcagacatggccactgtcctgcagctgctacagaggcagatgacgctggtcccgcccgcctacagtgctgtgaccaccccggggcctggccccacttccacatccccgctgttgcccgtcagccccctccccaccctcaccttggactcgctttctcaggtttcccagttcatggcgtgtgaggagctgcccccgggggccccagagcttccccaagaaggccccacacgacgcctctccctaccgggccagctgggggccctcacctcccagcccctgcacagacacggctcggacccgggcagttagtggggctgcccagtgtggacacgtggctcacccagggatcaaggcgctgctgggccgctccccttggaggccctgctcaggaggccctgaccgtggaaggggagaggaactcgaaagcacagctcctcccccagcccttgggaccatcttctcctgcagtcccctgggccccagtgagaggggcaggggcagggccggcagtaggtggggcctgtggtccccccactgccctgagggcattagctggtctaactgcccggaggcacccggccctgggccttaggcacctcaaggacttttctgctatttactgctcttattgttaaggataataattaaggatcatatgaataattaatgaagatgctgatgactatgaataataaataattatcctgaggaga

SEQ ID NO: 50 - DNA, 3884 bp, Homo sapiens
  source 1..3884: mol_type = genomic DNA
  misc_feature 1..3884: note = cDNA of KCNH2 gene SNP c.125T>C (p.Ile42Thr)
atgccggtgcggaggggccacgtcgcgccgcagaacaccttcctggacaccatcatccgcaagtttgagggccagagccgtaagttcatcatcgccaacgctcgggtggagaactgcgccgtcacctactgcaacgacggcttctgcgagctgtgcggctactcgcgggccgaggtgatgcagcgaccctgcacctgcgacttcctgcacgggccgcgcacgcagcgccgcgctgccgcgcagatcgcgcaggcactgctgggcgccgaggagcgcaaagtggaaatcgccttctaccggaaagatgggagctgcttcctatgtctggtggatgtggtgcccgtgaagaacgaggatggggctgtcatcatgttcatcctcaatttcgaggtggtgatggagaaggacatggtggggtccccggctcatgacaccaaccaccggggcccccccaccagctggctggccccaggccgcgccaagaccttccgcctgaagctgcccgcgctgctggcgctgacggcccgggagtcgtcggtgcggtcgggcggcgcgggcggcgcgggcgccccgggggccgtggtggtggacgtggacctgacgcccgcggcacccagcagcgagtcgctggccctggacgaagtgacagccatggacaaccacgtggcagggctcgggcccgcggaggagcggcgtgcgctggtgggtcccggctctccgccccgcagcgcgcccggccagctcccatcgccccgggcgcacagcctcaaccccgacgcctcgggctccagctgcagcctggcccggacgcgctcccgagaaagctgcgccagcgtgcgccgcgcctcgtcggccgacgacatcgaggccatgcgcgccggggtgctgcccccgccaccgcgccacgccagcaccggggccatgcacccactgcgcagcggcttgctcaactccacctcggactccgacctcgtgcgctaccgcaccattagcaagattccccaaatcaccctcaactttgtggacctcaagggcgaccccttcttggcttcgcccaccagtgaccgtgagatcatagcacctaagataaaggagcgaacccacaatgtcactgagaaggtcacccaggtcctgtccctgggcgccgacgtgctgcctgagtacaagctgcaggcaccgcgcatccaccgctggaccatcctgcattacagccccttcaaggccgtgtgggactggctcatcctgctgctggtcatctacacggctgtcttcacaccctactcggctgccttcctgctgaaggagacggaagaaggcccgcctgctaccgagtgtggctacgcctgccagccgctggctgtggtggacctcatcgtggacatcatgttcattgtggacatcctcatcaacttccgcaccacctacgtcaatgccaacgaggaggtggtcagccaccccggccgcatcgccgtccactacttcaagggctggttcctcatcgacatggtggccgccatccccttcgacctgctcatcttcggctctggctctgaggagctgatcgggctgctgaagactgcgcggctgctgcggctggtgcgcgtggcgcggaagctggatcgctactcagagtacggcgcggccgtgctgttcttgctcatgtgcacctttgcgctcatcgcgcactggctagcctgcatctggtacgccatcggcaacatggagcagccacacatggactcacgcatcggctggctgcacaacctgggcgaccagataggcaaaccctacaacagcagcggcctgggcggcccctccatcaaggacaagtatgtgacggcgctctacttcaccttcagcagcctcaccagtgtgggcttcggcaacgtctctcccaacaccaactcagagaagatcttctccatctgcgtcatgctcattggctccctcatgtatgctagcatcttcggcaacgtgtcggccatcatccagcggctgtactcgggcacagcccgctaccacacacagatgctgcgggtgcgggagttcatccgcttccaccagatccccaatcccctgcgccagcgcctcgaggagtacttccagcacgcctggtcctacaccaacggcatcgacatgaacgcggtgctgaagggcttccctgagtgcctgcaggctgacatctgcctgcacctgaaccgctcactgctgcagcactgcaaacccttccgaggggccaccaagggctgccttcgggccctggccatgaagttcaagaccacacatgcaccgccaggggacacactggtgcatgctggggacctgctcaccgccctgtacttcatctcccggggctccatcgagatcctgcggggcgacgtcgtcgtggccatcctggggaagaatgacatctttggggagcctctgaacctgtatgcaaggcctggcaagtcgaacggggatgtgcgggccctcacctactgtgacctacacaagatccatcgggacgacctgctggaggtgctggacatgtaccctgagttctccgaccacttctggtccagcctggagatcaccttcaacctgcgagataccaacatgatcccgggctcccccggcagtacggagttagagggtggcttcagtcggcaacgcaagcgcaagttgtccttccgcaggcgcacggacaaggacacggagcagccaggggaggtgtcggccttggggccgggccgggcgggggcagggccgagtagccggggccggccgggggggccgtggggggagagcccgtccagtggcccctccagccctgagagcagtgaggatgagggcccaggccgcagctccagccccctccgcctggtgcccttctccagccccaggccccccggagagccgccgggtggggagcccctgatggaggactgcgagaagagcagcgacacttgcaaccccctgtcaggcgccttctcaggagtgtccaacattttcagcttctggggggacagtcggggccgccagtaccaggagctccctcgatgccccgcccccacccccagcctcctcaacatccccctctccagcccgggtcggcggccccggggcgacgtggagagcaggctggatgccctccagcgccagctcaacaggctggagacccggctgagtgcagacatggccactgtcctgcagctgctacagaggcagatgacgctggtcccgcccgcctacagtgctgtgaccaccccggggcctggccccacttccacatccccgctgttgcccgtcagccccctccccaccctcaccttggactcgctttctcaggtttcccagttcatggcgtgtgaggagctgcccccgggggccccagagcttccccaagaaggccccacacgacgcctctccctaccgggccagctgggggccctcacctcccagcccctgcacagacacggctcggacccgggcagttagtggggctgcccagtgtggacacgtggctcacccagggatcaaggcgctgctgggccgctccccttggaggccctgctcaggaggccctgaccgtggaaggggagaggaactcgaaagcacagctcctcccccagcccttgggaccatcttctcctgcagtcccctgggccccagtgagaggggcaggggcagggccggcagtaggtggggcctgtggtccccccactgccctgagggcattagctggtctaactgcccggaggcacccggccctgggccttaggcacctcaaggacttttctgctatttactgctcttattgttaaggataataattaaggatcatatgaataattaatgaagatgctgatgactatgaataataaataattatcctgaggaga

SEQ ID NO: 51 - DNA, 3884 bp, Homo sapiens
  source 1..3884: mol_type = genomic DNA
  misc_feature 1..3884: note = cDNA of KCNH2 gene SNP c.1262C>A (p.Thr421Lys)
atgccggtgcggaggggccacgtcgcgccgcagaacaccttcctggacaccatcatccgcaagtttgagggccagagccgtaagttcatcatcgccaacgctcgggtggagaactgcgccgtcatctactgcaacgacggcttctgcgagctgtgcggctactcgcgggccgaggtgatgcagcgaccctgcacctgcgacttcctgcacgggccgcgcacgcagcgccgcgctgccgcgcagatcgcgcaggcactgctgggcgccgaggagcgcaaagtggaaatcgccttctaccggaaagatgggagctgcttcctatgtctggtggatgtggtgcccgtgaagaacgaggatggggctgtcatcatgttcatcctcaatttcgaggtggtgatggagaaggacatggtggggtccccggctcatgacaccaaccaccggggcccccccaccagctggctggccccaggccgcgccaagaccttccgcctgaagctgcccgcgctgctggcgctgacggcccgggagtcgtcggtgcggtcgggcggcgcgggcggcgcgggcgccccgggggccgtggtggtggacgtggacctgacgcccgcggcacccagcagcgagtcgctggccctggacgaagtgacagccatggacaaccacgtggcagggctcgggcccgcggaggagcggcgtgcgctggtgggtcccggctctccgccccgcagcgcgcccggccagctcccatcgccccgggcgcacagcctcaaccccgacgcctcgggctccagctgcagcctggcccggacgcgctcccgagaaagctgcgccagcgtgcgccgcgcctcgtcggccgacgacatcgaggccatgcgcgccggggtgctgcccccgccaccgcgccacgccagcaccggggccatgcacccactgcgcagcggcttgctcaactccacctcggactccgacctcgtgcgctaccgcaccattagcaagattccccaaatcaccctcaactttgtggacctcaagggcgaccccttcttggcttcgcccaccagtgaccgtgagatcatagcacctaagataaaggagcgaacccacaatgtcactgagaaggtcacccaggtcctgtccctgggcgccgacgtgctgcctgagtacaagctgcaggcaccgcgcatccaccgctggaccatcctgcattacagccccttcaaggccgtgtgggactggctcatcctgctgctggtcatctacaaggctgtcttcacaccctactcggctgccttcctgctgaaggagacggaagaaggcccgcctgctaccgagtgtggctacgcctgccagccgctggctgtggtggacctcatcgtggacatcatgttcattgtggacatcctcatcaacttccgcaccacctacgtcaatgccaacgaggaggtggtcagccaccccggccgcatcgccgtccactacttcaagggctggttcctcatcgacatggtggccgccatccccttcgacctgctcatcttcggctctggctctgaggagctgatcgggctgctgaagactgcgcggctgctgcggctggtgcgcgtggcgcggaagctggatcgctactcagagtacggcgcggccgtgctgttcttgctcatgtgcacctttgcgctcatcgcgcactggctagcctgcatctggtacgccatcggcaacatggagcagccacacatggactcacgcatcggctggctgcacaacctgggcgaccagataggcaaaccctacaacagcagcggcctgggcggcccctccatcaaggacaagtatgtgacggcgctctacttcaccttcagcagcctcaccagtgtgggcttcggcaacgtctctcccaacaccaactcagagaagatcttctccatctgcgtcatgctcattggctccctcatgtatgctagcatcttcggcaacgtgtcggccatcatccagcggctgtactcgggcacagcccgctaccacacacagatgctgcgggtgcgggagttcatccgcttccaccagatccccaatcccctgcgccagcgcctcgaggagtacttccagcacgcctggtcctacaccaacggcatcgacatgaacgcggtgctgaagggcttccctgagtgcctgcaggctgacatctgcctgcacctgaaccgctcactgctgcagcactgcaaacccttccgaggggccaccaagggctgccttcgggccctggccatgaagttcaagaccacacatgcaccgccaggggacacactggtgcatgctggggacctgctcaccgccctgtacttcatctcccggggctccatcgagatcctgcggggcgacgtcgtcgtggccatcctggggaagaatgacatctttggggagcctctgaacctgtatgcaaggcctggcaagtcgaacggggatgtgcgggccctcacctactgtgacctacacaagatccatcgggacgacctgctggaggtgctggacatgtaccctgagttctccgaccacttctggtccagcctggagatcaccttcaacctgcgagataccaacatgatcccgggctcccccggcagtacggagttagagggtggcttcagtcggcaacgcaagcgcaagttgtccttccgcaggcgcacggacaaggacacggagcagccaggggaggtgtcggccttggggccgggccgggcgggggcagggccgagtagccggggccggccgggggggccgtggggggagagcccgtccagtggcccctccagccctgagagcagtgaggatgagggcccaggccgcagctccagccccctccgcctggtgcccttctccagccccaggccccccggagagccgccgggtggggagcccctgatggaggactgcgagaagagcagcgacacttgcaaccccctgtcaggcgccttctcaggagtgtccaacattttcagcttctggggggacagtcggggccgccagtaccaggagctccctcgatgccccgcccccacccccagcctcctcaacatccccctctccagcccgggtcggcggccccggggcgacgtggagagcaggctggatgccctccagcgccagctcaacaggctggagacccggctgagtgcagacatggccactgtcctgcagctgctacagaggcagatgacgctggtcccgcccgcctacagtgctgtgaccaccccggggcctggccccacttccacatccccgctgttgcccgtcagccccctccccaccctcaccttggactcgctttctcaggtttcccagttcatggcgtgtgaggagctgcccccgggggccccagagcttccccaagaaggccccacacgacgcctctccctaccgggccagctgggggccctcacctcccagcccctgcacagacacggctcggacccgggcagttagtggggctgcccagtgtggacacgtggctcacccagggatcaaggcgctgctgggccgctccccttggaggccctgctcaggaggccctgaccgtggaaggggagaggaactcgaaagcacagctcctcccccagcccttgggaccatcttctcctgcagtcccctgggccccagtgagaggggcaggggcagggccggcagtaggtggggcctgtggtccccccactgccctgagggcattagctggtctaactgcccggaggcacccggccctgggccttaggcacctcaaggacttttctgctatttactgctcttattgttaaggataataattaaggatcatatgaataattaatgaagatgctgatgactatgaataataaataattatcctgaggaga

SEQ ID NO: 52 - DNA, 3884 bp, Homo sapiens
  source 1..3884: mol_type = genomic DNA
  misc_feature 1..3884: note = cDNA of KCNH2 gene SNP c.1262C>T (p.Thr421Met)
atgccggtgcggaggggccacgtcgcgccgcagaacaccttcctggacaccatcatccgcaagtttgagggccagagccgtaagttcatcatcgccaacgctcgggtggagaactgcgccgtcatctactgcaacgacggcttctgcgagctgtgcggctactcgcgggccgaggtgatgcagcgaccctgcacctgcgacttcctgcacgggccgcgcacgcagcgccgcgctgccgcgcagatcgcgcaggcactgctgggcgccgaggagcgcaaagtggaaatcgccttctaccggaaagatgggagctgcttcctatgtctggtggatgtggtgcccgtgaagaacgaggatggggctgtcatcatgttcatcctcaatttcgaggtggtgatggagaaggacatggtggggtccccggctcatgacaccaaccaccggggcccccccaccagctggctggccccaggccgcgccaagaccttccgcctgaagctgcccgcgctgctggcgctgacggcccgggagtcgtcggtgcggtcgggcggcgcgggcggcgcgggcgccccgggggccgtggtggtggacgtggacctgacgcccgcggcacccagcagcgagtcgctggccctggacgaagtgacagccatggacaaccacgtggcagggctcgggcccgcggaggagcggcgtgcgctggtgggtcccggctctccgccccgcagcgcgcccggccagctcccatcgccccgggcgcacagcctcaaccccgacgcctcgggctccagctgcagcctggcccggacgcgctcccgagaaagctgcgccagcgtgcgccgcgcctcgtcggccgacgacatcgaggccatgcgcgccggggtgctgcccccgccaccgcgccacgccagcaccggggccatgcacccactgcgcagcggcttgctcaactccacctcggactccgacctcgtgcgctaccgcaccattagcaagattccccaaatcaccctcaactttgtggacctcaagggcgaccccttcttggcttcgcccaccagtgaccgtgagatcatagcacctaagataaaggagcgaacccacaatgtcactgagaaggtcacccaggtcctgtccctgggcgccgacgtgctgcctgagtacaagctgcaggcaccgcgcatccaccgctggaccatcctgcattacagccccttcaaggccgtgtgggactggctcatcctgctgctggtcatctacatggctgtcttcacaccctactcggctgccttcctgctgaaggagacggaagaaggcccgcctgctaccgagtgtggctacgcctgccagccgctggctgtggtggacctcatcgtggacatcatgttcattgtggacatcctcatcaacttccgcaccacctacgtcaatgccaacgaggaggtggtcagccaccccggccgcatcgccgtccactacttcaagggctggttcctcatcgacatggtggccgccatccccttcgacctgctcatcttcggctctggctctgaggagctgatcgggctgctgaagactgcgcggctgctgcggctggtgcgcgtggcgcggaagctggatcgctactcagagtacggcgcggccgtgctgttcttgctcatgtgcacctttgcgctcatcgcgcactggctagcctgcatctggtacgccatcggcaacatggagcagccacacatggactcacgcatcggctggctgcacaacctgggcgaccagataggcaaaccctacaacagcagcggcctgggcggcccctccatcaaggacaagtatgtgacggcgctctacttcaccttcagcagcctcaccagtgtgggcttcggcaacgtctctcccaacaccaactcagagaagatcttctccatctgcgtcatgctcattggctccctcatgtatgctagcatcttcggcaacgtgtcggccatcatccagcggctgtactcgggcacagcccgctaccacacacagatgctgcgggtgcgggagttcatccgcttccaccagatccccaatcccctgcgccagcgcctcgaggagtacttccagcacgcctggtcctacaccaacggcatcgacatgaacgcggtgctgaagggcttccctgagtgcctgcaggctgacatctgcctgcacctgaaccgctcactgctgcagcactgcaaacccttccgaggggccaccaagggctgccttcgggccctggccatgaagttcaagaccacacatgcaccgccaggggacacactggtgcatgctggggacctgctcaccgccctgtacttcatctcccggggctccatcgagatcctgcggggcgacgtcgtcgtggccatcctggggaagaatgacatctttggggagcctctgaacctgtatgcaaggcctggcaagtcgaacggggatgtgcgggccctcacctactgtgacctacacaagatccatcgggacgacctgctggaggtgctggacatgtaccctgagttctccgaccacttctggtccagcctggagatcaccttcaacctgcgagataccaacatgatcccgggctcccccggcagtacggagttagagggtggcttcagtcggcaacgcaagcgcaagttgtccttccgcaggcgcacggacaaggacacggagcagccaggggaggtgtcggccttggggccgggccgggcgggggcagggccgagtagccggggccggccgggggggccgtggggggagagcccgtccagtggcccctccagccctgagagcagtgaggatgagggcccaggccgcagctccagccccctccgcctggtgcccttctccagccccaggccccccggagagccgccgggtggggagcccctgatggaggactgcgagaagagcagcgacacttgcaaccccctgtcaggcgccttctcaggagtgtccaacattttcagcttctggggggacagtcggggccgccagtaccaggagctccctcgatgccccgcccccacccccagcctcctcaacatccccctctccagcccgggtcggcggccccggggcgacgtggagagcaggctggatgccctccagcgccagctcaacaggctggagacccggctgagtgcagacatggccactgtcctgcagctgctacagaggcagatgacgctggtcccgcccgcctacagtgctgtgaccaccccggggcctggccccacttccacatccccgctgttgcccgtcagccccctccccaccctcaccttggactcgctttctcaggtttcccagttcatggcgtgtgaggagctgcccccgggggccccagagcttccccaagaaggccccacacgacgcctctccctaccgggccagctgggggccctcacctcccagcccctgcacagacacggctcggacccgggcagttagtggggctgcccagtgtggacacgtggctcacccagggatcaaggcgctgctgggccgctccccttggaggccctgctcaggaggccctgaccgtggaaggggagaggaactcgaaagcacagctcctcccccagcccttgggaccatcttctcctgcagtcccctgggccccagtgagaggggcaggggcagggccggcagtaggtggggcctgtggtccccccactgccctgagggcattagctggtctaactgcccggaggcacccggccctgggccttaggcacctcaaggacttttctgctatttactgctcttattgttaaggataataattaaggatcatatgaataattaatgaagatgctgatgactatgaataataaataattatcctgaggaga

SEQ ID NO: 53 - DNA, 3884 bp, Homo sapiens
  source 1..3884: mol_type = genomic DNA
  misc_feature 1..3884: note = cDNA of KCNH2 gene SNP c.1264G>A (p.Ala422Thr)
atgccggtgcggaggggccacgtcgcgccgcagaacaccttcctggacaccatcatccgcaagtttgagggccagagccgtaagttcatcatcgccaacgctcgggtggagaactgcgccgtcatctactgcaacgacggcttctgcgagctgtgcggctactcgcgggccgaggtgatgcagcgaccctgcacctgcgacttcctgcacgggccgcgcacgcagcgccgcgctgccgcgcagatcgcgcaggcactgctgggcgccgaggagcgcaaagtggaaatcgccttctaccggaaagatgggagctgcttcctatgtctggtggatgtggtgcccgtgaagaacgaggatggggctgtcatcatgttcatcctcaatttcgaggtggtgatggagaaggacatggtggggtccccggctcatgacaccaaccaccggggcccccccaccagctggctggccccaggccgcgccaagaccttccgcctgaagctgcccgcgctgctggcgctgacggcccgggagtcgtcggtgcggtcgggcggcgcgggcggcgcgggcgccccgggggccgtggtggtggacgtggacctgacgcccgcggcacccagcagcgagtcgctggccctggacgaagtgacagccatggacaaccacgtggcagggctcgggcccgcggaggagcggcgtgcgctggtgggtcccggctctccgccccgcagcgcgcccggccagctcccatcgccccgggcgcacagcctcaaccccgacgcctcgggctccagctgcagcctggcccggacgcgctcccgagaaagctgcgccagcgtgcgccgcgcctcgtcggccgacgacatcgaggccatgcgcgccggggtgctgcccccgccaccgcgccacgccagcaccggggccatgcacccactgcgcagcggcttgctcaactccacctcggactccgacctcgtgcgctaccgcaccattagcaagattccccaaatcaccctcaactttgtggacctcaagggcgaccccttcttggcttcgcccaccagtgaccgtgagatcatagcacctaagataaaggagcgaacccacaatgtcactgagaaggtcacccaggtcctgtccctgggcgccgacgtgctgcctgagtacaagctgcaggcaccgcgcatccaccgctggaccatcctgcattacagccccttcaaggccgtgtgggactggctcatcctgctgctggtcatctacacgactgtcttcacaccctactcggctgccttcctgctgaaggagacggaagaaggcccgcctgctaccgagtgtggctacgcctgccagccgctggctgtggtggacctcatcgtggacatcatgttcattgtggacatcctcatcaacttccgcaccacctacgtcaatgccaacgaggaggtggtcagccaccccggccgcatcgccgtccactacttcaagggctggttcctcatcgacatggtggccgccatccccttcgacctgctcatcttcggctctggctctgaggagctgatcgggctgctgaagactgcgcggctgctgcggctggtgcgcgtggcgcggaagctggatcgctactcagagtacggcgcggccgtgctgttcttgctcatgtgcacctttgcgctcatcgcgcactggctagcctgcatctggtacgccatcggcaacatggagcagccacacatggactcacgcatcggctggctgcacaacctgggcgaccagataggcaaaccctacaacagcagcggcctgggcggcccctccatcaaggacaagtatgtgacggcgctctacttcaccttcagcagcctcaccagtgtgggcttcggcaacgtctctcccaacaccaactcagagaagatcttctccatctgcgtcatgctcattggctccctcatgtatgctagcatcttcggcaacgtgtcggccatcatccagcggctgtactcgggcacagcccgctaccacacacagatgctgcgggtgcgggagttcatccgcttccaccagatccccaatcccctgcgccagcgcctcgaggagtacttccagcacgcctggtcctacaccaacggcatcgacatgaacgcggtgctgaagggcttccctgagtgcctgcaggctgacatctgcctgcacctgaaccgctcactgctgcagcactgcaaacccttccgaggggccaccaagggctgccttcgggccctggccatgaagttcaagaccacacatgcaccgccaggggacacactggtgcatgctggggacctgctcaccgccctgtacttcatctcccggggctccatcgagatcctgcggggcgacgtcgtcgtggccatcctggggaagaatgacatctttggggagcctctgaacctgtatgcaaggcctggcaagtcgaacggggatgtgcgggccctcacctactgtgacctacacaagatccatcgggacgacctgctggaggtgctggacatgtaccctgagttctccgaccacttctggtccagcctggagatcaccttcaacctgcgagataccaacatgatcccgggctcccccggcagtacggagttagagggtggcttcagtcggcaacgcaagcgcaagttgtccttccgcaggcgcacggacaaggacacggagcagccaggggaggtgtcggccttggggccgggccgggcgggggcagggccgagtagccggggccggccgggggggccgtggggggagagcccgtccagtggcccctccagccctgagagcagtgaggatgagggcccaggccgcagctccagccccctccgcctggtgcccttctccagccccaggccccccggagagccgccgggtggggagcccctgatggaggactgcgagaagagcagcgacacttgcaaccccctgtcaggcgccttctcaggagtgtccaacattttcagcttctggggggacagtcggggccgccagtaccaggagctccctcgatgccccgcccccacccccagcctcctcaacatccccctctccagcccgggtcggcggccccggggcgacgtggagagcaggctggatgccctccagcgccagctcaacaggctggagacccggctgagtgcagacatggccactgtcctgcagctgctacagaggcagatgacgctggtcccgcccgcctacagtgctgtgaccaccccggggcctggccccacttccacatccccgctgttgcccgtcagccccctccccaccctcaccttggactcgctttctcaggtttcccagttcatggcgtgtgaggagctgcccccgggggccccagagcttccccaagaaggccccacacgacgcctctccctaccgggccagctgggggccctcacctcccagcccctgcacagacacggctcggacccgggcagttagtggggctgcccagtgtggacacgtggctcacccagggatcaaggcgctgctgggccgctccccttggaggccctgctcaggaggccctgaccgtggaaggggagaggaactcgaaagcacagctcctcccccagcccttgggaccatcttctcctgcagtcccctgggccccagtgagaggggcaggggcagggccggcagtaggtggggcctgtggtccccccactgccctgagggcattagctggtctaactgcccggaggcacccggccctgggccttaggcacctcaaggacttttctgctatttactgctcttattgttaaggataataattaaggatcatatgaataattaatgaagatgctgatgactatgaataataaataattatcctgaggaga

SEQ ID NO: 54 - DNA, 3884 bp, Homo sapiens
  source 1..3884: mol_type = genomic DNA
  misc_feature 1..3884: note = cDNA of KCNH2 gene SNP c.1277C>A (p.Pro426His)
atgccggtgcggaggggccacgtcgcgccgcagaacaccttcctggacaccatcatccgcaagtttgagggccagagccgtaagttcatcatcgccaacgctcgggtggagaactgcgccgtcatctactgcaacgacggcttctgcgagctgtgcggctactcgcgggccgaggtgatgcagcgaccctgcacctgcgacttcctgcacgggccgcgcacgcagcgccgcgctgccgcgcagatcgcgcaggcactgctgggcgccgaggagcgcaaagtggaaatcgccttctaccggaaagatgggagctgcttcctatgtctggtggatgtggtgcccgtgaagaacgaggatggggctgtcatcatgttcatcctcaatttcgaggtggtgatggagaaggacatggtggggtccccggctcatgacaccaaccaccggggcccccccaccagctggctggccccaggccgcgccaagaccttccgcctgaagctgcccgcgctgctggcgctgacggcccgggagtcgtcggtgcggtcgggcggcgcgggcggcgcgggcgccccgggggccgtggtggtggacgtggacctgacgcccgcggcacccagcagcgagtcgctggccctggacgaagtgacagccatggacaaccacgtggcagggctcgggcccgcggaggagcggcgtgcgctggtgggtcccggctctccgccccgcagcgcgcccggccagctcccatcgccccgggcgcacagcctcaaccccgacgcctcgggctccagctgcagcctggcccggacgcgctcccgagaaagctgcgccagcgtgcgccgcgcctcgtcggccgacgacatcgaggccatgcgcgccggggtgctgcccccgccaccgcgccacgccagcaccggggccatgcacccactgcgcagcggcttgctcaactccacctcggactccgacctcgtgcgctaccgcaccattagcaagattccccaaatcaccctcaactttgtggacctcaagggcgaccccttcttggcttcgcccaccagtgaccgtgagatcatagcacctaagataaaggagcgaacccacaatgtcactgagaaggtcacccaggtcctgtccctgggcgccgacgtgctgcctgagtacaagctgcaggcaccgcgcatccaccgctggaccatcctgcattacagccccttcaaggccgtgtgggactggctcatcctgctgctggtcatctacacggctgtcttcacacactactcggctgccttcctgctgaaggagacggaagaaggcccgcctgctaccgagtgtggctacgcctgccagccgctggctgtggtggacctcatcgtggacatcatgttcattgtggacatcctcatcaacttccgcaccacctacgtcaatgccaacgaggaggtggtcagccaccccggccgcatcgccgtccactacttcaagggctggttcctcatcgacatggtggccgccatccccttcgacctgctcatcttcggctctggctctgaggagctgatcgggctgctgaagactgcgcggctgctgcggctggtgcgcgtggcgcggaagctggatcgctactcagagtacggcgcggccgtgctgttcttgctcatgtgcacctttgcgctcatcgcgcactggctagcctgcatctggtacgccatcggcaacatggagcagccacacatggactcacgcatcggctggctgcacaacctgggcgaccagataggcaaaccctacaacagcagcggcctgggcggcccctccatcaaggacaagtatgtgacggcgctctacttcaccttcagcagcctcaccagtgtgggcttcggcaacgtctctcccaacaccaactcagagaagatcttctccatctgcgtcatgctcattggctccctcatgtatgctagcatcttcggcaacgtgtcggccatcatccagcggctgtactcgggcacagcccgctaccacacacagatgctgcgggtgcgggagttcatccgcttccaccagatccccaatcccctgcgccagcgcctcgaggagtacttccagcacgcctggtcctacaccaacggcatcgacatgaacgcggtgctgaagggcttccctgagtgcctgcaggctgacatctgcctgcacctgaaccgctcactgctgcagcactgcaaacccttccgaggggccaccaagggctgccttcgggccctggccatgaagttcaagaccacacatgcaccgccaggggacacactggtgcatgctggggacctgctcaccgccctgtacttcatctcccggggctccatcgagatcctgcggggcgacgtcgtcgtggccatcctggggaagaatgacatctttggggagcctctgaacctgtatgcaaggcctggcaagtcgaacggggatgtgcgggccctcacctactgtgacctacacaagatccatcgggacgacctgctggaggtgctggacatgtaccctgagttctccgaccacttctggtccagcctggagatcaccttcaacctgcgagataccaacatgatcccgggctcccccggcagtacggagttagagggtggcttcagtcggcaacgcaagcgcaagttgtccttccgcaggcgcacggacaaggacacggagcagccaggggaggtgtcggccttggggccgggccgggcgggggcagggccgagtagccggggccggccgggggggccgtggggggagagcccgtccagtggcccctccagccctgagagcagtgaggatgagggcccaggccgcagctccagccccctccgcctggtgcccttctccagccccaggccccccggagagccgccgggtggggagcccctgatggaggactgcgagaagagcagcgacacttgcaaccccctgtcaggcgccttctcaggagtgtccaacattttcagcttctggggggacagtcggggccgccagtaccaggagctccctcgatgccccgcccccacccccagcctcctcaacatccccctctccagcccgggtcggcggccccggggcgacgtggagagcaggctggatgccctccagcgccagctcaacaggctggagacccggctgagtgcagacatggccactgtcctgcagctgctacagaggcagatgacgctggtcccgcccgcctacagtgctgtgaccaccccggggcctggccccacttccacatccccgctgttgcccgtcagccccctccccaccctcaccttggactcgctttctcaggtttcccagttcatggcgtgtgaggagctgcccccgggggccccagagcttccccaagaaggccccacacgacgcctctccctaccgggccagctgggggccctcacctcccagcccctgcacagacacggctcggacccgggcagttagtggggctgcccagtgtggacacgtggctcacccagggatcaaggcgctgctgggccgctccccttggaggccctgctcaggaggccctgaccgtggaaggggagaggaactcgaaagcacagctcctcccccagcccttgggaccatcttctcctgcagtcccctgggccccagtgagaggggcaggggcagggccggcagtaggtggggcctgtggtccccccactgccctgagggcattagctggtctaactgcccggaggcacccggccctgggccttaggcacctcaaggacttttctgctatttactgctcttattgttaaggataataattaaggatcatatgaataattaatgaagatgctgatgactatgaataataaataattatcctgaggaga

SEQ ID NO: 55 - DNA, 3884 bp, Homo sapiens
  source 1..3884: mol_type = genomic DNA
  misc_feature 1..3884: note = cDNA of KCNH2 gene SNP c.1279T>C (p.Tyr427His)
atgccggtgcggaggggccacgtcgcgccgcagaacaccttcctggacaccatcatccgcaagtttgagggccagagccgtaagttcatcatcgccaacgctcgggtggagaactgcgccgtcatctactgcaacgacggcttctgcgagctgtgcggctactcgcgggccgaggtgatgcagcgaccctgcacctgcgacttcctgcacgggccgcgcacgcagcgccgcgctgccgcgcagatcgcgcaggcactgctgggcgccgaggagcgcaaagtggaaatcgccttctaccggaaagatgggagctgcttcctatgtctggtggatgtggtgcccgtgaagaacgaggatggggctgtcatcatgttcatcctcaatttcgaggtggtgatggagaaggacatggtggggtccccggctcatgacaccaaccaccggggcccccccaccagctggctggccccaggccgcgccaagaccttccgcctgaagctgcccgcgctgctggcgctgacggcccgggagtcgtcggtgcggtcgggcggcgcgggcggcgcgggcgccccgggggccgtggtggtggacgtggacctgacgcccgcggcacccagcagcgagtcgctggccctggacgaagtgacagccatggacaaccacgtggcagggctcgggcccgcggaggagcggcgtgcgctggtgggtcccggctctccgccccgcagcgcgcccggccagctcccatcgccccgggcgcacagcctcaaccccgacgcctcgggctccagctgcagcctggcccggacgcgctcccgagaaagctgcgccagcgtgcgccgcgcctcgtcggccgacgacatcgaggccatgcgcgccggggtgctgcccccgccaccgcgccacgccagcaccggggccatgcacccactgcgcagcggcttgctcaactccacctcggactccgacctcgtgcgctaccgcaccattagcaagattccccaaatcaccctcaactttgtggacctcaagggcgaccccttcttggcttcgcccaccagtgaccgtgagatcatagcacctaagataaaggagcgaacccacaatgtcactgagaaggtcacccaggtcctgtccctgggcgccgacgtgctgcctgagtacaagctgcaggcaccgcgcatccaccgctggaccatcctgcattacagccccttcaaggccgtgtgggactggctcatcctgctgctggtcatctacacggctgtcttcacaccccactcggctgccttcctgctgaaggagacggaagaaggcccgcctgctaccgagtgtggctacgcctgccagccgctggctgtggtggacctcatcgtggacatcatgttcattgtggacatcctcatcaacttccgcaccacctacgtcaatgccaacgaggaggtggtcagccaccccggccgcatcgccgtccactacttcaagggctggttcctcatcgacatggtggccgccatccccttcgacctgctcatcttcggctctggctctgaggagctgatcgggctgctgaagactgcgcggctgctgcggctggtgcgcgtggcgcggaagctggatcgctactcagagtacggcgcggccgtgctgttcttgctcatgtgcacctttgcgctcatcgcgcactggctagcctgcatctggtacgccatcggcaacatggagcagccacacatggactcacgcatcggctggctgcacaacctgggcgaccagataggcaaaccctacaacagcagcggcctgggcggcccctccatcaaggacaagtatgtgacggcgctctacttcaccttcagcagcctcaccagtgtgggcttcggcaacgtctctcccaacaccaactcagagaagatcttctccatctgcgtcatgctcattggctccctcatgtatgctagcatcttcggcaacgtgtcggccatcatccagcggctgtactcgggcacagcccgctaccacacacagatgctgcgggtgcgggagttcatccgcttccaccagatccccaatcccctgcgccagcgcctcgaggagtacttccagcacgcctggtcctacaccaacggcatcgacatgaacgcggtgctgaagggcttccctgagtgcctgcaggctgacatctgcctgcacctgaaccgctcactgctgcagcactgcaaacccttccgaggggccaccaagggctgccttcgggccctggccatgaagttcaagaccacacatgcaccgccaggggacacactggtgcatgctggggacctgctcaccgccctgtacttcatctcccggggctccatcgagatcctgcggggcgacgtcgtcgtggccatcctggggaagaatgacatctttggggagcctctgaacctgtatgcaaggcctggcaagtcgaacggggatgtgcgggccctcacctactgtgacctacacaagatccatcgggacgacctgctggaggtgctggacatgtaccctgagttctccgaccacttctggtccagcctggagatcaccttcaacctgcgagataccaacatgatcccgggctcccccggcagtacggagttagagggtggcttcagtcggcaacgcaagcgcaagttgtccttccgcaggcgcacggacaaggacacggagcagccaggggaggtgtcggccttggggccgggccgggcgggggcagggccgagtagccggggccggccgggggggccgtggggggagagcccgtccagtggcccctccagccctgagagcagtgaggatgagggcccaggccgcagctccagccccctccgcctggtgcccttctccagccccaggccccccggagagccgccgggtggggagcccctgatggaggactgcgagaagagcagcgacacttgcaaccccctgtcaggcgccttctcaggagtgtccaacattttcagcttctggggggacagtcggggccgccagtaccaggagctccctcgatgccccgcccccacccccagcctcctcaacatccccctctccagcccgggtcggcggccccggggcgacgtggagagcaggctggatgccctccagcgccagctcaacaggctggagacccggctgagtgcagacatggccactgtcctgcagctgctacagaggcagatgacgctggtcccgcccgcctacagtgctgtgaccaccccggggcctggccccacttccacatccccgctgttgcccgtcagccccctccccaccctcaccttggactcgctttctcaggtttcccagttcatggcgtgtgaggagctgcccccgggggccccagagcttccccaagaaggccccacacgacgcctctccctaccgggccagctgggggccctcacctcccagcccctgcacagacacggctcggacccgggcagttagtggggctgcccagtgtggacacgtggctcacccagggatcaaggcgctgctgggccgctccccttggaggccctgctcaggaggccctgaccgtggaaggggagaggaactcgaaagcacagctcctcccccagcccttgggaccatcttctcctgcagtcccctgggccccagtgagaggggcaggggcagggccggcagtaggtggggcctgtggtccccccactgccctgagggcattagctggtctaactgcccggaggcacccggccctgggccttaggcacctcaaggacttttctgctatttactgctcttattgttaaggataataattaaggatcatatgaataattaatgaagatgctgatgactatgaataataaataattatcctgaggaga

SEQ ID NO: 56 - DNA, 3884 bp, Homo sapiens
  source 1..3884: mol_type = genomic DNA
  misc_feature 1..3884: note = cDNA of KCNH2 gene SNP c.127T>G (p.Tyr43Asp)
atgccggtgcggaggggccacgtcgcgccgcagaacaccttcctggacaccatcatccgcaagtttgagggccagagccgtaagttcatcatcgccaacgctcgggtggagaactgcgccgtcatcgactgcaacgacggcttctgcgagctgtgcggctactcgcgggccgaggtgatgcagcgaccctgcacctgcgacttcctgcacgggccgcgcacgcagcgccgcgctgccgcgcagatcgcgcaggcactgctgggcgccgaggagcgcaaagtggaaatcgccttctaccggaaagatgggagctgcttcctatgtctggtggatgtggtgcccgtgaagaacgaggatggggctgtcatcatgttcatcctcaatttcgaggtggtgatggagaaggacatggtggggtccccggctcatgacaccaaccaccggggcccccccaccagctggctggccccaggccgcgccaagaccttccgcctgaagctgcccgcgctgctggcgctgacggcccgggagtcgtcggtgcggtcgggcggcgcgggcggcgcgggcgccccgggggccgtggtggtggacgtggacctgacgcccgcggcacccagcagcgagtcgctggccctggacgaagtgacagccatggacaaccacgtggcagggctcgggcccgcggaggagcggcgtgcgctggtgggtcccggctctccgccccgcagcgcgcccggccagctcccatcgccccgggcgcacagcctcaaccccgacgcctcgggctccagctgcagcctggcccggacgcgctcccgagaaagctgcgccagcgtgcgccgcgcctcgtcggccgacgacatcgaggccatgcgcgccggggtgctgcccccgccaccgcgccacgccagcaccggggccatgcacccactgcgcagcggcttgctcaactccacctcggactccgacctcgtgcgctaccgcaccattagcaagattccccaaatcaccctcaactttgtggacctcaagggcgaccccttcttggcttcgcccaccagtgaccgtgagatcatagcacctaagataaaggagcgaacccacaatgtcactgagaaggtcacccaggtcctgtccctgggcgccgacgtgctgcctgagtacaagctgcaggcaccgcgcatccaccgctggaccatcctgcattacagccccttcaaggccgtgtgggactggctcatcctgctgctggtcatctacacggctgtcttcacaccctactcggctgccttcctgctgaaggagacggaagaaggcccgcctgctaccgagtgtggctacgcctgccagccgctggctgtggtggacctcatcgtggacatcatgttcattgtggacatcctcatcaacttccgcaccacctacgtcaatgccaacgaggaggtggtcagccaccccggccgcatcgccgtccactacttcaagggctggttcctcatcgacatggtggccgccatccccttcgacctgctcatcttcggctctggctctgaggagctgatcgggctgctgaagactgcgcggctgctgcggctggtgcgcgtggcgcggaagctggatcgctactcagagtacggcgcggccgtgctgttcttgctcatgtgcacctttgcgctcatcgcgcactggctagcctgcatctggtacgccatcggcaacatggagcagccacacatggactcacgcatcggctggctgcacaacctgggcgaccagataggcaaaccctacaacagcagcggcctgggcggcccctccatcaaggacaagtatgtgacggcgctctacttcaccttcagcagcctcaccagtgtgggcttcggcaacgtctctcccaacaccaactcagagaagatcttctccatctgcgtcatgctcattggctccctcatgtatgctagcatcttcggcaacgtgtcggccatcatccagcggctgtactcgggcacagcccgctaccacacacagatgctgcgggtgcgggagttcatccgcttccaccagatccccaatcccctgcgccagcgcctcgaggagtacttccagcacgcctggtcctacaccaacggcatcgacatgaacgcggtgctgaagggcttccctgagtgcctgcaggctgacatctgcctgcacctgaaccgctcactgctgcagcactgcaaacccttccgaggggccaccaagggctgccttcgggccctggccatgaagttcaagaccacacatgcaccgccaggggacacactggtgcatgctggggacctgctcaccgccctgtacttcatctcccggggctccatcgagatcctgcggggcgacgtcgtcgtggccatcctggggaagaatgacatctttggggagcctctgaacctgtatgcaaggcctggcaagtcgaacggggatgtgcgggccctcacctactgtgacctacacaagatccatcgggacgacctgctggaggtgctggacatgtaccctgagttctccgaccacttctggtccagcctggagatcaccttcaacctgcgagataccaacatgatcccgggctcccccggcagtacggagttagagggtggcttcagtcggcaacgcaagcgcaagttgtccttccgcaggcgcacggacaaggacacggagcagccaggggaggtgtcggccttggggccgggccgggcgggggcagggccgagtagccggggccggccgggggggccgtggggggagagcccgtccagtggcccctccagccctgagagcagtgaggatgagggcccaggccgcagctccagccccctccgcctggtgcccttctccagccccaggccccccggagagccgccgggtggggagcccctgatggaggactgcgagaagagcagcgacacttgcaaccccctgtcaggcgccttctcaggagtgtccaacattttcagcttctggggggacagtcggggccgccagtaccaggagctccctcgatgccccgcccccacccccagcctcctcaacatccccctctccagcccgggtcggcggccccggggcgacgtggagagcaggctggatgccctccagcgccagctcaacaggctggagacccggctgagtgcagacatggccactgtcctgcagctgctacagaggcagatgacgctggtcccgcccgcctacagtgctgtgaccaccccggggcctggccccacttccacatccccgctgttgcccgtcagccccctccccaccctcaccttggactcgctttctcaggtttcccagttcatggcgtgtgaggagctgcccccgggggccccagagcttccccaagaaggccccacacgacgcctctccctaccgggccagctgggggccctcacctcccagcccctgcacagacacggctcggacccgggcagttagtggggctgcccagtgtggacacgtggctcacccagggatcaaggcgctgctgggccgctccccttggaggccctgctcaggaggccctgaccgtggaaggggagaggaactcgaaagcacagctcctcccccagcccttgggaccatcttctcctgcagtcccctgggccccagtgagaggggcaggggcagggccggcagtaggtggggcctgtggtccccccactgccctgagggcattagctggtctaactgcccggaggcacccggccctgggccttaggcacctcaaggacttttctgctatttactgctcttattgttaaggataataattaaggatcatatgaataattaatgaagatgctgatgactatgaataataaataattatcctgaggaga

SEQ ID NO: 57 - DNA, 3884 bp, Homo sapiens
  source 1..3884: mol_type = genomic DNA
  misc_feature 1..3884: note = cDNA of KCNH2 gene SNP c.1280A>C (p.Tyr427Ser)
atgccggtgcggaggggccacgtcgcgccgcagaacaccttcctggacaccatcatccgcaagtttgagggccagagccgtaagttcatcatcgccaacgctcgggtggagaactgcgccgtcatctactgcaacgacggcttctgcgagctgtgcggctactcgcgggccgaggtgatgcagcgaccctgcacctgcgacttcctgcacgggccgcgcacgcagcgccgcgctgccgcgcagatcgcgcaggcactgctgggcgccgaggagcgcaaagtggaaatcgccttctaccggaaagatgggagctgcttcctatgtctggtggatgtggtgcccgtgaagaacgaggatggggctgtcatcatgttcatcctcaatttcgaggtggtgatggagaaggacatggtggggtccccggctcatgacaccaaccaccggggcccccccaccagctggctggccccaggccgcgccaagaccttccgcctgaagctgcccgcgctgctggcgctgacggcccgggagtcgtcggtgcggtcgggcggcgcgggcggcgcgggcgccccgggggccgtggtggtggacgtggacctgacgcccgcggcacccagcagcgagtcgctggccctggacgaagtgacagccatggacaaccacgtggcagggctcgggcccgcggaggagcggcgtgcgctggtgggtcccggctctccgccccgcagcgcgcccggccagctcccatcgccccgggcgcacagcctcaaccccgacgcctcgggctccagctgcagcctggcccggacgcgctcccgagaaagctgcgccagcgtgcgccgcgcctcgtcggccgacgacatcgaggccatgcgcgccggggtgctgcccccgccaccgcgccacgccagcaccggggccatgcacccactgcgcagcggcttgctcaactccacctcggactccgacctcgtgcgctaccgcaccattagcaagattccccaaatcaccctcaactttgtggacctcaagggcgaccccttcttggcttcgcccaccagtgaccgtgagatcatagcacctaagataaaggagcgaacccacaatgtcactgagaaggtcacccaggtcctgtccctgggcgccgacgtgctgcctgagtacaagctgcaggcaccgcgcatccaccgctggaccatcctgcattacagccccttcaaggccgtgtgggactggctcatcctgctgctggtcatctacacggctgtcttcacaccctcctcggctgccttcctgctgaaggagacggaagaaggcccgcctgctaccgagtgtggctacgcctgccagccgctggctgtggtggacctcatcgtggacatcatgttcattgtggacatcctcatcaacttccgcaccacctacgtcaatgccaacgaggaggtggtcagccaccccggccgcatcgccgtccactacttcaagggctggttcctcatcgacatggtggccgccatccccttcgacctgctcatcttcggctctggctctgaggagctgatcgggctgctgaagactgcgcggctgctgcggctggtgcgcgtggcgcggaagctggatcgctactcagagtacggcgcggccgtgctgttcttgctcatgtgcacctttgcgctcatcgcgcactggctagcctgcatctggtacgccatcggcaacatggagcagccacacatggactcacgcatcggctggctgcacaacctgggcgaccagataggcaaaccctacaacagcagcggcctgggcggcccctccatcaaggacaagtatgtgacggcgctctacttcaccttcagcagcctcaccagtgtgggcttcggcaacgtctctcccaacaccaactcagagaagatcttctccatctgcgtcatgctcattggctccctcatgtatgctagcatcttcggcaacgtgtcggccatcatccagcggctgtactcgggcacagcccgctaccacacacagatgctgcgggtgcgggagttcatccgcttccaccagatccccaatcccctgcgccagcgcctcgaggagtacttccagcacgcctggtcctacaccaacggcatcgacatgaacgcggtgctgaagggcttccctgagtgcctgcaggctgacatctgcctgcacctgaaccgctcactgctgcagcactgcaaacccttccgaggggccaccaagggctgccttcgggccctggccatgaagttcaagaccacacatgcaccgccaggggacacactggtgcatgctggggacctgctcaccgccctgtacttcatctcccggggctccatcgagatcctgcggggcgacgtcgtcgtggccatcctggggaagaatgacatctttggggagcctctgaacctgtatgcaaggcctggcaagtcgaacggggatgtgcgggccctcacctactgtgacctacacaagatccatcgggacgacctgctggaggtgctggacatgtaccctgagttctccgaccacttctggtccagcctggagatcaccttcaacctgcgagataccaacatgatcccgggctcccccggcagtacggagttagagggtggcttcagtcggcaacgcaagcgcaagttgtccttccgcaggcgcacggacaaggacacggagcagccaggggaggtgtcggccttggggccgggccgggcgggggcagggccgagtagccggggccggccgggggggccgtggggggagagcccgtccagtggcccctccagccctgagagcagtgaggatgagggcccaggccgcagctccagccccctccgcctggtgcccttctccagccccaggccccccggagagccgccgggtggggagcccctgatggaggactgcgagaagagcagcgacacttgcaaccccctgtcaggcgccttctcaggagtgtccaacattttcagcttctggggggacagtcggggccgccagtaccaggagctccctcgatgccccgcccccacccccagcctcctcaacatccccctctccagcccgggtcggcggccccggggcgacgtggagagcaggctggatgccctccagcgccagctcaacaggctggagacccggctgagtgcagacatggccactgtcctgcagctgctacagaggcagatgacgctggtcccgcccgcctacagtgctgtgaccaccccggggcctggccccacttccacatccccgctgttgcccgtcagccccctccccaccctcaccttggactcgctttctcaggtttcccagttcatggcgtgtgaggagctgcccccgggggccccagagcttccccaagaaggccccacacgacgcctctccctaccgggccagctgggggccctcacctcccagcccctgcacagacacggctcggacccgggcagttagtggggctgcccagtgtggacacgtggctcacccagggatcaaggcgctgctgggccgctccccttggaggccctgctcaggaggccctgaccgtggaaggggagaggaactcgaaagcacagctcctcccccagcccttgggaccatcttctcctgcagtcccctgggccccagtgagaggggcaggggcagggccggcagtaggtggggcctgtggtccccccactgccctgagggcattagctggtctaactgcccggaggcacccggccctgggccttaggcacctcaaggacttttctgctatttactgctcttattgttaaggataataattaaggatcatatgaataattaatgaagatgctgatgactatgaataataaataattatcctgaggaga

SEQ ID NO: 58 - DNA, 3884 bp, Homo sapiens
  source 1..3884: mol_type = genomic DNA
  misc_feature 1..3884: note = cDNA of KCNH2 gene SNP c.1280A>G (p.Tyr427Cys)
atgccggtgcggaggggccacgtcgcgccgcagaacaccttcctggacaccatcatccgcaagtttgagggccagagccgtaagttcatcatcgccaacgctcgggtggagaactgcgccgtcatctactgcaacgacggcttctgcgagctgtgcggctactcgcgggccgaggtgatgcagcgaccctgcacctgcgacttcctgcacgggccgcgcacgcagcgccgcgctgccgcgcagatcgcgcaggcactgctgggcgccgaggagcgcaaagtggaaatcgccttctaccggaaagatgggagctgcttcctatgtctggtggatgtggtgcccgtgaagaacgaggatggggctgtcatcatgttcatcctcaatttcgaggtggtgatggagaaggacatggtggggtccccggctcatgacaccaaccaccggggcccccccaccagctggctggccccaggccgcgccaagaccttccgcctgaagctgcccgcgctgctggcgctgacggcccgggagtcgtcggtgcggtcgggcggcgcgggcggcgcgggcgccccgggggccgtggtggtggacgtggacctgacgcccgcggcacccagcagcgagtcgctggccctggacgaagtgacagccatggacaaccacgtggcagggctcgggcccgcggaggagcggcgtgcgctggtgggtcccggctctccgccccgcagcgcgcccggccagctcccatcgccccgggcgcacagcctcaaccccgacgcctcgggctccagctgcagcctggcccggacgcgctcccgagaaagctgcgccagcgtgcgccgcgcctcgtcggccgacgacatcgaggccatgcgcgccggggtgctgcccccgccaccgcgccacgccagcaccggggccatgcacccactgcgcagcggcttgctcaactccacctcggactccgacctcgtgcgctaccgcaccattagcaagattccccaaatcaccctcaactttgtggacctcaagggcgaccccttcttggcttcgcccaccagtgaccgtgagatcatagcacctaagataaaggagcgaacccacaatgtcactgagaaggtcacccaggtcctgtccctgggcgccgacgtgctgcctgagtacaagctgcaggcaccgcgcatccaccgctggaccatcctgcattacagccccttcaaggccgtgtgggactggctcatcctgctgctggtcatctacacggctgtcttcacaccctgctcggctgccttcctgctgaaggagacggaagaaggcccgcctgctaccgagtgtggctacgcctgccagccgctggctgtggtggacctcatcgtggacatcatgttcattgtggacatcctcatcaacttccgcaccacctacgtcaatgccaacgaggaggtggtcagccaccccggccgcatcgccgtccactacttcaagggctggttcctcatcgacatggtggccgccatccccttcgacctgctcatcttcggctctggctctgaggagctgatcgggctgctgaagactgcgcggctgctgcggctggtgcgcgtggcgcggaagctggatcgctactcagagtacggcgcggccgtgctgttcttgctcatgtgcacctttgcgctcatcgcgcactggctagcctgcatctggtacgccatcggcaacatggagcagccacacatggactcacgcatcggctggctgcacaacctgggcgaccagataggcaaaccctacaacagcagcggcctgggcggcccctccatcaaggacaagtatgtgacggcgctctacttcaccttcagcagcctcaccagtgtgggcttcggcaacgtctctcccaacaccaactcagagaagatcttctccatctgcgtcatgctcattggctccctcatgtatgctagcatcttcggcaacgtgtcggccatcatccagcggctgtactcgggcacagcccgctaccacacacagatgctgcgggtgcgggagttcatccgcttccaccagatccccaatcccctgcgccagcgcctcgaggagtacttccagcacgcctggtcctacaccaacggcatcgacatgaacgcggtgctgaagggcttccctgagtgcctgcaggctgacatctgcctgcacctgaaccgctcactgctgcagcactgcaaacccttccgaggggccaccaagggctgccttcgggccctggccatgaagttcaagaccacacatgcaccgccaggggacacactggtgcatgctggggacctgctcaccgccctgtacttcatctcccggggctccatcgagatcctgcggggcgacgtcgtcgtggccatcctggggaagaatgacatctttggggagcctctgaacctgtatgcaaggcctggcaagtcgaacggggatgtgcgggccctcacctactgtgacctacacaagatccatcgggacgacctgctggaggtgctggacatgtaccctgagttctccgaccacttctggtccagcctggagatcaccttcaacctgcgagataccaacatgatcccgggctcccccggcagtacggagttagagggtggcttcagtcggcaacgcaagcgcaagttgtccttccgcaggcgcacggacaaggacacggagcagccaggggaggtgtcggccttggggccgggccgggcgggggcagggccgagtagccggggccggccgggggggccgtggggggagagcccgtccagtggcccctccagccctgagagcagtgaggatgagggcccaggccgcagctccagccccctccgcctggtgcccttctccagccccaggccccccggagagccgccgggtggggagcccctgatggaggactgcgagaagagcagcgacacttgcaaccccctgtcaggcgccttctcaggagtgtccaacattttcagcttctggggggacagtcggggccgccagtaccaggagctccctcgatgccccgcccccacccccagcctcctcaacatccccctctccagcccgggtcggcggccccggggcgacgtggagagcaggctggatgccctccagcgccagctcaacaggctggagacccggctgagtgcagacatggccactgtcctgcagctgctacagaggcagatgacgctggtcccgcccgcctacagtgctgtgaccaccccggggcctggccccacttccacatccccgctgttgcccgtcagccccctccccaccctcaccttggactcgctttctcaggtttcccagttcatggcgtgtgaggagctgcccccgggggccccagagcttccccaagaaggccccacacgacgcctctccctaccgggccagctgggggccctcacctcccagcccctgcacagacacggctcggacccgggcagttagtggggctgcccagtgtggacacgtggctcacccagggatcaaggcgctgctgggccgctccccttggaggccctgctcaggaggccctgaccgtggaaggggagaggaactcgaaagcacagctcctcccccagcccttgggaccatcttctcctgcagtcccctgggccccagtgagaggggcaggggcagggccggcagtaggtggggcctgtggtccccccactgccctgagggcattagctggtctaactgcccggaggcacccggccctgggccttaggcacctcaaggacttttctgctatttactgctcttattgttaaggataataattaaggatcatatgaataattaatgaagatgctgatgactatgaataataaataattatcctgaggaga

SEQ ID NO: 59 - DNA, 3884 bp, Homo sapiens
  source 1..3884: mol_type = genomic DNA
  misc_feature 1..3884: note = cDNA of KCNH2 gene SNP c.1282T>C (p.Ser428Pro)
atgccggtgcggaggggccacgtcgcgccgcagaacaccttcctggacaccatcatccgcaagtttgagggccagagccgtaagttcatcatcgccaacgctcgggtggagaactgcgccgtcatctactgcaacgacggcttctgcgagctgtgcggctactcgcgggccgaggtgatgcagcgaccctgcacctgcgacttcctgcacgggccgcgcacgcagcgccgcgctgccgcgcagatcgcgcaggcactgctgggcgccgaggagcgcaaagtggaaatcgccttctaccggaaagatgggagctgcttcctatgtctggtggatgtggtgcccgtgaagaacgaggatggggctgtcatcatgttcatcctcaatttcgaggtggtgatggagaaggacatggtggggtccccggctcatgacaccaaccaccggggcccccccaccagctggctggccccaggccgcgccaagaccttccgcctgaagctgcccgcgctgctggcgctgacggcccgggagtcgtcggtgcggtcgggcggcgcgggcggcgcgggcgccccgggggccgtggtggtggacgtggacctgacgcccgcggcacccagcagcgagtcgctggccctggacgaagtgacagccatggacaaccacgtggcagggctcgggcccgcggaggagcggcgtgcgctggtgggtcccggctctccgccccgcagcgcgcccggccagctcccatcgccccgggcgcacagcctcaaccccgacgcctcgggctccagctgcagcctggcccggacgcgctcccgagaaagctgcgccagcgtgcgccgcgcctcgtcggccgacgacatcgaggccatgcgcgccggggtgctgcccccgccaccgcgccacgccagcaccggggccatgcacccactgcgcagcggcttgctcaactccacctcggactccgacctcgtgcgctaccgcaccattagcaagattccccaaatcaccctcaactttgtggacctcaagggcgaccccttcttggcttcgcccaccagtgaccgtgagatcatagcacctaagataaaggagcgaacccacaatgtcactgagaaggtcacccaggtcctgtccctgggcgccgacgtgctgcctgagtacaagctgcaggcaccgcgcatccaccgctggaccatcctgcattacagccccttcaaggccgtgtgggactggctcatcctgctgctggtcatctacacggctgtcttcacaccctacccggctgccttcctgctgaaggagacggaagaaggcccgcctgctaccgagtgtggctacgcctgccagccgctggctgtggtggacctcatcgtggacatcatgttcattgtggacatcctcatcaacttccgcaccacctacgtcaatgccaacgaggaggtggtcagccaccccggccgcatcgccgtccactacttcaagggctggttcctcatcgacatggtggccgccatccccttcgacctgctcatcttcggctctggctctgaggagctgatcgggctgctgaagactgcgcggctgctgcggctggtgcgcgtggcgcggaagctggatcgctactcagagtacggcgcggccgtgctgttcttgctcatgtgcacctttgcgctcatcgcgcactggctagcctgcatctggtacgccatcggcaacatggagcagccacacatggactcacgcatcggctggctgcacaacctgggcgaccagataggcaaaccctacaacagcagcggcctgggcggcccctccatcaaggacaagtatgtgacggcgctctacttcaccttcagcagcctcaccagtgtgggcttcggcaacgtctctcccaacaccaactcagagaagatcttctccatctgcgtcatgctcattggctccctcatgtatgctagcatcttcggcaacgtgtcggccatcatccagcggctgtactcgggcacagcccgctaccacacacagatgctgcgggtgcgggagttcatccgcttccaccagatccccaatcccctgcgccagcgcctcgaggagtacttccagcacgcctggtcctacaccaacggcatcgacatgaacgcggtgctgaagggcttccctgagtgcctgcaggctgacatctgcctgcacctgaaccgctcactgctgcagcactgcaaacccttccgaggggccaccaagggctgccttcgggccctggccatgaagttcaagaccacacatgcaccgccaggggacacactggtgcatgctggggacctgctcaccgccctgtacttcatctcccggggctccatcgagatcctgcggggcgacgtcgtcgtggccatcctggggaagaatgacatctttggggagcctctgaacctgtatgcaaggcctggcaagtcgaacggggatgtgcgggccctcacctactgtgacctacacaagatccatcgggacgacctgctggaggtgctggacatgtaccctgagttctccgaccacttctggtccagcctggagatcaccttcaacctgcgagataccaacatgatcccgggctcccccggcagtacggagttagagggtggcttcagtcggcaacgcaagcgcaagttgtccttccgcaggcgcacggacaaggacacggagcagccaggggaggtgtcggccttggggccgggccgggcgggggcagggccgagtagccggggccggccgggggggccgtggggggagagcccgtccagtggcccctccagccctgagagcagtgaggatgagggcccaggccgcagctccagccccctccgcctggtgcccttctccagccccaggccccccggagagccgccgggtggggagcccctgatggaggactgcgagaagagcagcgacacttgcaaccccctgtcaggcgccttctcaggagtgtccaacattttcagcttctggggggacagtcggggccgccagtaccaggagctccctcgatgccccgcccccacccccagcctcctcaacatccccctctccagcccgggtcggcggccccggggcgacgtggagagcaggctggatgccctccagcgccagctcaacaggctggagacccggctgagtgcagacatggccactgtcctgcagctgctacagaggcagatgacgctggtcccgcccgcctacagtgctgtgaccaccccggggcctggccccacttccacatccccgctgttgcccgtcagccccctccccaccctcaccttggactcgctttctcaggtttcccagttcatggcgtgtgaggagctgcccccgggggccccagagcttccccaagaaggccccacacgacgcctctccctaccgggccagctgggggccctcacctcccagcccctgcacagacacggctcggacccgggcagttagtggggctgcccagtgtggacacgtggctcacccagggatcaaggcgctgctgggccgctccccttggaggccctgctcaggaggccctgaccgtggaaggggagaggaactcgaaagcacagctcctcccccagcccttgggaccatcttctcctgcagtcccctgggccccagtgagaggggcaggggcagggccggcagtaggtggggcctgtggtccccccactgccctgagggcattagctggtctaactgcccggaggcacccggccctgggccttaggcacctcaaggacttttctgctatttactgctcttattgttaaggataataattaaggatcatatgaataattaatgaagatgctgatgactatgaataataaataattatcctgaggaga

SEQ ID NO: 60 - DNA, 3884 bp, Homo sapiens
  source 1..3884: mol_type = genomic DNA
  misc_feature 1..3884: note = cDNA of KCNH2 gene SNP c.1283C>T (p.Ser428Leu)
atgccggtgcggaggggccacgtcgcgccgcagaacaccttcctggacaccatcatccgcaagtttgagggccagagccgtaagttcatcatcgccaacgctcgggtggagaactgcgccgtcatctactgcaacgacggcttctgcgagctgtgcggctactcgcgggccgaggtgatgcagcgaccctgcacctgcgacttcctgcacgggccgcgcacgcagcgccgcgctgccgcgcagatcgcgcaggcactgctgggcgccgaggagcgcaaagtggaaatcgccttctaccggaaagatgggagctgcttcctatgtctggtggatgtggtgcccgtgaagaacgaggatggggctgtcatcatgttcatcctcaatttcgaggtggtgatggagaaggacatggtggggtccccggctcatgacaccaaccaccggggcccccccaccagctggctggccccaggccgcgccaagaccttccgcctgaagctgcccgcgctgctggcgctgacggcccgggagtcgtcggtgcggtcgggcggcgcgggcggcgcgggcgccccgggggccgtggtggtggacgtggacctgacgcccgcggcacccagcagcgagtcgctggccctggacgaagtgacagccatggacaaccacgtggcagggctcgggcccgcggaggagcggcgtgcgctggtgggtcccggctctccgccccgcagcgcgcccggccagctcccatcgccccgggcgcacagcctcaaccccgacgcctcgggctccagctgcagcctggcccggacgcgctcccgagaaagctgcgccagcgtgcgccgcgcctcgtcggccgacgacatcgaggccatgcgcgccggggtgctgcccccgccaccgcgccacgccagcaccggggccatgcacccactgcgcagcggcttgctcaactccacctcggactccgacctcgtgcgctaccgcaccattagcaagattccccaaatcaccctcaactttgtggacctcaagggcgaccccttcttggcttcgcccaccagtgaccgtgagatcatagcacctaagataaaggagcgaacccacaatgtcactgagaaggtcacccaggtcctgtccctgggcgccgacgtgctgcctgagtacaagctgcaggcaccgcgcatccaccgctggaccatcctgcattacagccccttcaaggccgtgtgggactggctcatcctgctgctggtcatctacacggctgtcttcacaccctacttggctgccttcctgctgaaggagacggaagaaggcccgcctgctaccgagtgtggctacgcctgccagccgctggctgtggtggacctcatcgtggacatcatgttcattgtggacatcctcatcaacttccgcaccacctacgtcaatgccaacgaggaggtggtcagccaccccggccgcatcgccgtccactacttcaagggctggttcctcatcgacatggtggccgccatccccttcgacctgctcatcttcggctctggctctgaggagctgatcgggctgctgaagactgcgcggctgctgcggctggtgcgcgtggcgcggaagctggatcgctactcagagtacggcgcggccgtgctgttcttgctcatgtgcacctttgcgctcatcgcgcactggctagcctgcatctggtacgccatcggcaacatggagcagccacacatggactcacgcatcggctggctgcacaacctgggcgaccagataggcaaaccctacaacagcagcggcctgggcggcccctccatcaaggacaagtatgtgacggcgctctacttcaccttcagcagcctcaccagtgtgggcttcggcaacgtctctcccaacaccaactcagagaagatcttctccatctgcgtcatgctcattggctccctcatgtatgctagcatcttcggcaacgtgtcggccatcatccagcggctgtactcgggcacagcccgctaccacacacagatgctgcgggtgcgggagttcatccgcttccaccagatccccaatcccctgcgccagcgcctcgaggagtacttccagcacgcctggtcctacaccaacggcatcgacatgaacgcggtgctgaagggcttccctgagtgcctgcaggctgacatctgcctgcacctgaaccgctcactgctgcagcactgcaaacccttccgaggggccaccaagggctgccttcgggccctggccatgaagttcaagaccacacatgcaccgccaggggacacactggtgcatgctggggacctgctcaccgccctgtacttcatctcccggggctccatcgagatcctgcggggcgacgtcgtcgtggccatcctggggaagaatgacatctttggggagcctctgaacctgtatgcaaggcctggcaagtcgaacggggatgtgcgggccctcacctactgtgacctacacaagatccatcgggacgacctgctggaggtgctggacatgtaccctgagttctccgaccacttctggtccagcctggagatcaccttcaacctgcgagataccaacatgatcccgggctcccccggcagtacggagttagagggtggcttcagtcggcaacgcaagcgcaagttgtccttccgcaggcgcacggacaaggacacggagcagccaggggaggtgtcggccttggggccgggccgggcgggggcagggccgagtagccggggccggccgggggggccgtggggggagagcccgtccagtggcccctccagccctgagagcagtgaggatgagggcccaggccgcagctccagccccctccgcctggtgcccttctccagccccaggccccccggagagccgccgggtggggagcccctgatggaggactgcgagaagagcagcgacacttgcaaccccctgtcaggcgccttctcaggagtgtccaacattttcagcttctggggggacagtcggggccgccagtaccaggagctccctcgatgccccgcccccacccccagcctcctcaacatccccctctccagcccgggtcggcggccccggggcgacgtggagagcaggctggatgccctccagcgccagctcaacaggctggagacccggctgagtgcagacatggccactgtcctgcagctgctacagaggcagatgacgctggtcccgcccgcctacagtgctgtgaccaccccggggcctggccccacttccacatccccgctgttgcccgtcagccccctccccaccctcaccttggactcgctttctcaggtttcccagttcatggcgtgtgaggagctgcccccgggggccccagagcttccccaagaaggccccacacgacgcctctccctaccgggccagctgggggccctcacctcccagcccctgcacagacacggctcggacccgggcagttagtggggctgcccagtgtggacacgtggctcacccagggatcaaggcgctgctgggccgctccccttggaggccctgctcaggaggccctgaccgtggaaggggagaggaactcgaaagcacagctcctcccccagcccttgggaccatcttctcctgcagtcccctgggccccagtgagaggggcaggggcagggccggcagtaggtggggcctgtggtccccccactgccctgagggcattagctggtctaactgcccggaggcacccggccctgggccttaggcacctcaaggacttttctgctatttactgctcttattgttaaggataataattaaggatcatatgaataattaatgaagatgctgatgactatgaataataaataattatcctgaggaga

SEQ ID NO: 61 - DNA, 3884 bp, Homo sapiens
  source 1..3884: mol_type = genomic DNA
  misc_feature 1..3884: note = cDNA of KCNH2 gene SNP c.1285G>C (p.Ala429Pro)
atgccggtgcggaggggccacgtcgcgccgcagaacaccttcctggacaccatcatccgcaagtttgagggccagagccgtaagttcatcatcgccaacgctcgggtggagaactgcgccgtcatctactgcaacgacggcttctgcgagctgtgcggctactcgcgggccgaggtgatgcagcgaccctgcacctgcgacttcctgcacgggccgcgcacgcagcgccgcgctgccgcgcagatcgcgcaggcactgctgggcgccgaggagcgcaaagtggaaatcgccttctaccggaaagatgggagctgcttcctatgtctggtggatgtggtgcccgtgaagaacgaggatggggctgtcatcatgttcatcctcaatttcgaggtggtgatggagaaggacatggtggggtccccggctcatgacaccaaccaccggggcccccccaccagctggctggccccaggccgcgccaagaccttccgcctgaagctgcccgcgctgctggcgctgacggcccgggagtcgtcggtgcggtcgggcggcgcgggcggcgcgggcgccccgggggccgtggtggtggacgtggacctgacgcccgcggcacccagcagcgagtcgctggccctggacgaagtgacagccatggacaaccacgtggcagggctcgggcccgcggaggagcggcgtgcgctggtgggtcccggctctccgccccgcagcgcgcccggccagctcccatcgccccgggcgcacagcctcaaccccgacgcctcgggctccagctgcagcctggcccggacgcgctcccgagaaagctgcgccagcgtgcgccgcgcctcgtcggccgacgacatcgaggccatgcgcgccggggtgctgcccccgccaccgcgccacgccagcaccggggccatgcacccactgcgcagcggcttgctcaactccacctcggactccgacctcgtgcgctaccgcaccattagcaagattccccaaatcaccctcaactttgtggacctcaagggcgaccccttcttggcttcgcccaccagtgaccgtgagatcatagcacctaagataaaggagcgaacccacaatgtcactgagaaggtcacccaggtcctgtccctgggcgccgacgtgctgcctgagtacaagctgcaggcaccgcgcatccaccgctggaccatcctgcattacagccccttcaaggccgtgtgggactggctcatcctgctgctggtcatctacacggctgtcttcacaccctactcgcctgccttcctgctgaaggagacggaagaaggcccgcctgctaccgagtgtggctacgcctgccagccgctggctgtggtggacctcatcgtggacatcatgttcattgtggacatcctcatcaacttccgcaccacctacgtcaatgccaacgaggaggtggtcagccaccccggccgcatcgccgtccactacttcaagggctggttcctcatcgacatggtggccgccatccccttcgacctgctcatcttcggctctggctctgaggagctgatcgggctgctgaagactgcgcggctgctgcggctggtgcgcgtggcgcggaagctggatcgctactcagagtacggcgcggccgtgctgttcttgctcatgtgcacctttgcgctcatcgcgcactggctagcctgcatctggtacgccatcggcaacatggagcagccacacatggactcacgcatcggctggctgcacaacctgggcgaccagataggcaaaccctacaacagcagcggcctgggcggcccctccatcaaggacaagtatgtgacggcgctctacttcaccttcagcagcctcaccagtgtgggcttcggcaacgtctctcccaacaccaactcagagaagatcttctccatctgcgtcatgctcattggctccctcatgtatgctagcatcttcggcaacgtgtcggccatcatccagcggctgtactcgggcacagcccgctaccacacacagatgctgcgggtgcgggagttcatccgcttccaccagatccccaatcccctgcgccagcgcctcgaggagtacttccagcacgcctggtcctacaccaacggcatcgacatgaacgcggtgctgaagggcttccctgagtgcctgcaggctgacatctgcctgcacctgaaccgctcactgctgcagcactgcaaacccttccgaggggccaccaagggctgccttcgggccctggccatgaagttcaagaccacacatgcaccgccaggggacacactggtgcatgctggggacctgctcaccgccctgtacttcatctcccggggctccatcgagatcctgcggggcgacgtcgtcgtggccatcctggggaagaatgacatctttggggagcctctgaacctgtatgcaaggcctggcaagtcgaacggggatgtgcgggccctcacctactgtgacctacacaagatccatcgggacgacctgctggaggtgctggacatgtaccctgagttctccgaccacttctggtccagcctggagatcaccttcaacctgcgagataccaacatgatcccgggctcccccggcagtacggagttagagggtggcttcagtcggcaacgcaagcgcaagttgtccttccgcaggcgcacggacaaggacacggagcagccaggggaggtgtcggccttggggccgggccgggcgggggcagggccgagtagccggggccggccgggggggccgtggggggagagcccgtccagtggcccctccagccctgagagcagtgaggatgagggcccaggccgcagctccagccccctccgcctggtgcccttctccagccccaggccccccggagagccgccgggtggggagcccctgatggaggactgcgagaagagcagcgacacttgcaaccccctgtcaggcgccttctcaggagtgtccaacattttcagcttctggggggacagtcggggccgccagtaccaggagctccctcgatgccccgcccccacccccagcctcctcaacatccccctctccagcccgggtcggcggccccggggcgacgtggagagcaggctggatgccctccagcgccagctcaacaggctggagacccggctgagtgcagacatggccactgtcctgcagctgctacagaggcagatgacgctggtcccgcccgcctacagtgctgtgaccaccccggggcctggccccacttccacatccccgctgttgcccgtcagccccctccccaccctcaccttggactcgctttctcaggtttcccagttcatggcgtgtgaggagctgcccccgggggccccagagcttccccaagaaggccccacacgacgcctctccctaccgggccagctgggggccctcacctcccagcccctgcacagacacggctcggacccgggcagttagtggggctgcccagtgtggacacgtggctcacccagggatcaaggcgctgctgggccgctccccttggaggccctgctcaggaggccctgaccgtggaaggggagaggaactcgaaagcacagctcctcccccagcccttgggaccatcttctcctgcagtcccctgggccccagtgagaggggcaggggcagggccggcagtaggtggggcctgtggtccccccactgccctgagggcattagctggtctaactgcccggaggcacccggccctgggccttaggcacctcaaggacttttctgctatttactgctcttattgttaaggataataattaaggatcatatgaataattaatgaagatgctgatgactatgaataataaataattatcctgaggaga

SEQ ID NO: 62 - DNA, 3884 bp, Homo sapiens
  source 1..3884: mol_type = genomic DNA
  misc_feature 1..3884: note = cDNA of KCNH2 gene SNP c.128A>G (p.Tyr43Cys)
atgccggtgcggaggggccacgtcgcgccgcagaacaccttcctggacaccatcatccgcaagtttgagggccagagccgtaagttcatcatcgccaacgctcgggtggagaactgcgccgtcatctgctgcaacgacggcttctgcgagctgtgcggctactcgcgggccgaggtgatgcagcgaccctgcacctgcgacttcctgcacgggccgcgcacgcagcgccgcgctgccgcgcagatcgcgcaggcactgctgggcgccgaggagcgcaaagtggaaatcgccttctaccggaaagatgggagctgcttcctatgtctggtggatgtggtgcccgtgaagaacgaggatggggctgtcatcatgttcatcctcaatttcgaggtggtgatggagaaggacatggtggggtccccggctcatgacaccaaccaccggggcccccccaccagctggctggccccaggccgcgccaagaccttccgcctgaagctgcccgcgctgctggcgctgacggcccgggagtcgtcggtgcggtcgggcggcgcgggcggcgcgggcgccccgggggccgtggtggtggacgtggacctgacgcccgcggcacccagcagcgagtcgctggccctggacgaagtgacagccatggacaaccacgtggcagggctcgggcccgcggaggagcggcgtgcgctggtgggtcccggctctccgccccgcagcgcgcccggccagctcccatcgccccgggcgcacagcctcaaccccgacgcctcgggctccagctgcagcctggcccggacgcgctcccgagaaagctgcgccagcgtgcgccgcgcctcgtcggccgacgacatcgaggccatgcgcgccggggtgctgcccccgccaccgcgccacgccagcaccggggccatgcacccactgcgcagcggcttgctcaactccacctcggactccgacctcgtgcgctaccgcaccattagcaagattccccaaatcaccctcaactttgtggacctcaagggcgaccccttcttggcttcgcccaccagtgaccgtgagatcatagcacctaagataaaggagcgaacccacaatgtcactgagaaggtcacccaggtcctgtccctgggcgccgacgtgctgcctgagtacaagctgcaggcaccgcgcatccaccgctggaccatcctgcattacagccccttcaaggccgtgtgggactggctcatcctgctgctggtcatctacacggctgtcttcacaccctactcggctgccttcctgctgaaggagacggaagaaggcccgcctgctaccgagtgtggctacgcctgccagccgctggctgtggtggacctcatcgtggacatcatgttcattgtggacatcctcatcaacttccgcaccacctacgtcaatgccaacgaggaggtggtcagccaccccggccgcatcgccgtccactacttcaagggctggttcctcatcgacatggtggccgccatccccttcgacctgctcatcttcggctctggctctgaggagctgatcgggctgctgaagactgcgcggctgctgcggctggtgcgcgtggcgcggaagctggatcgctactcagagtacggcgcggccgtgctgttcttgctcatgtgcacctttgcgctcatcgcgcactggctagcctgcatctggtacgccatcggcaacatggagcagccacacatggactcacgcatcggctggctgcacaacctgggcgaccagataggcaaaccctacaacagcagcggcctgggcggcccctccatcaaggacaagtatgtgacggcgctctacttcaccttcagcagcctcaccagtgtgggcttcggcaacgtctctcccaacaccaactcagagaagatcttctccatctgcgtcatgctcattggctccctcatgtatgctagcatcttcggcaacgtgtcggccatcatccagcggctgtactcgggcacagcccgctaccacacacagatgctgcgggtgcgggagttcatccgcttccaccagatccccaatcccctgcgccagcgcctcgaggagtacttccagcacgcctggtcctacaccaacggcatcgacatgaacgcggtgctgaagggcttccctgagtgcctgcaggctgacatctgcctgcacctgaaccgctcactgctgcagcactgcaaacccttccgaggggccaccaagggctgccttcgggccctggccatgaagttcaagaccacacatgcaccgccaggggacacactggtgcatgctggggacctgctcaccgccctgtacttcatctcccggggctccatcgagatcctgcggggcgacgtcgtcgtggccatcctggggaagaatgacatctttggggagcctctgaacctgtatgcaaggcctggcaagtcgaacggggatgtgcgggccctcacctactgtgacctacacaagatccatcgggacgacctgctggaggtgctggacatgtaccctgagttctccgaccacttctggtccagcctggagatcaccttcaacctgcgagataccaacatgatcccgggctcccccggcagtacggagttagagggtggcttcagtcggcaacgcaagcgcaagttgtccttccgcaggcgcacggacaaggacacggagcagccaggggaggtgtcggccttggggccgggccgggcgggggcagggccgagtagccggggccggccgggggggccgtggggggagagcccgtccagtggcccctccagccctgagagcagtgaggatgagggcccaggccgcagctccagccccctccgcctggtgcccttctccagccccaggccccccggagagccgccgggtggggagcccctgatggaggactgcgagaagagcagcgacacttgcaaccccctgtcaggcgccttctcaggagtgtccaacattttcagcttctggggggacagtcggggccgccagtaccaggagctccctcgatgccccgcccccacccccagcctcctcaacatccccctctccagcccgggtcggcggccccggggcgacgtggagagcaggctggatgccctccagcgccagctcaacaggctggagacccggctgagtgcagacatggccactgtcctgcagctgctacagaggcagatgacgctggtcccgcccgcctacagtgctgtgaccaccccggggcctggccccacttccacatccccgctgttgcccgtcagccccctccccaccctcaccttggactcgctttctcaggtttcccagttcatggcgtgtgaggagctgcccccgggggccccagagcttccccaagaaggccccacacgacgcctctccctaccgggccagctgggggccctcacctcccagcccctgcacagacacggctcggacccgggcagttagtggggctgcccagtgtggacacgtggctcacccagggatcaaggcgctgctgggccgctccccttggaggccctgctcaggaggccctgaccgtggaaggggagaggaactcgaaagcacagctcctcccccagcccttgggaccatcttctcctgcagtcccctgggccccagtgagaggggcaggggcagggccggcagtaggtggggcctgtggtccccccactgccctgagggcattagctggtctaactgcccggaggcacccggccctgggccttaggcacctcaaggacttttctgctatttactgctcttattgttaaggataataattaaggatcatatgaataattaatgaagatgctgatgactatgaataataaataattatcctgaggaga

SEQ ID NO: 63 - DNA, 3884 bp, Homo sapiens
  source 1..3884: mol_type = genomic DNA
  misc_feature 1..3884: note = cDNA of KCNH2 gene SNP c.1291T>C (p.Phe431Leu)
atgccggtgcggaggggccacgtcgcgccgcagaacaccttcctggacaccatcatccgcaagtttgagggccagagccgtaagttcatcatcgccaacgctcgggtggagaactgcgccgtcatctactgcaacgacggcttctgcgagctgtgcggctactcgcgggccgaggtgatgcagcgaccctgcacctgcgacttcctgcacgggccgcgcacgcagcgccgcgctgccgcgcagatcgcgcaggcactgctgggcgccgaggagcgcaaagtggaaatcgccttctaccggaaagatgggagctgcttcctatgtctggtggatgtggtgcccgtgaagaacgaggatggggctgtcatcatgttcatcctcaatttcgaggtggtgatggagaaggacatggtggggtccccggctcatgacaccaaccaccggggcccccccaccagctggctggccccaggccgcgccaagaccttccgcctgaagctgcccgcgctgctggcgctgacggcccgggagtcgtcggtgcggtcgggcggcgcgggcggcgcgggcgccccgggggccgtggtggtggacgtggacctgacgcccgcggcacccagcagcgagtcgctggccctggacgaagtgacagccatggacaaccacgtggcagggctcgggcccgcggaggagcggcgtgcgctggtgggtcccggctctccgccccgcagcgcgcccggccagctcccatcgccccgggcgcacagcctcaaccccgacgcctcgggctccagctgcagcctggcccggacgcgctcccgagaaagctgcgccagcgtgcgccgcgcctcgtcggccgacgacatcgaggccatgcgcgccggggtgctgcccccgccaccgcgccacgccagcaccggggccatgcacccactgcgcagcggcttgctcaactccacctcggactccgacctcgtgcgctaccgcaccattagcaagattccccaaatcaccctcaactttgtggacctcaagggcgaccccttcttggcttcgcccaccagtgaccgtgagatcatagcacctaagataaaggagcgaacccacaatgtcactgagaaggtcacccaggtcctgtccctgggcgccgacgtgctgcctgagtacaagctgcaggcaccgcgcatccaccgctggaccatcctgcattacagccccttcaaggccgtgtgggactggctcatcctgctgctggtcatctacacggctgtcttcacaccctactcggctgccctcctgctgaaggagacggaagaaggcccgcctgctaccgagtgtggctacgcctgccagccgctggctgtggtggacctcatcgtggacatcatgttcattgtggacatcctcatcaacttccgcaccacctacgtcaatgccaacgaggaggtggtcagccaccccggccgcatcgccgtccactacttcaagggctggttcctcatcgacatggtggccgccatccccttcgacctgctcatcttcggctctggctctgaggagctgatcgggctgctgaagactgcgcggctgctgcggctggtgcgcgtggcgcggaagctggatcgctactcagagtacggcgcggccgtgctgttcttgctcatgtgcacctttgcgctcatcgcgcactggctagcctgcatctggtacgccatcggcaacatggagcagccacacatggactcacgcatcggctggctgcacaacctgggcgaccagataggcaaaccctacaacagcagcggcctgggcggcccctccatcaaggacaagtatgtgacggcgctctacttcaccttcagcagcctcaccagtgtgggcttcggcaacgtctctcccaacaccaactcagagaagatcttctccatctgcgtcatgctcattggctccctcatgtatgctagcatcttcggcaacgtgtcggccatcatccagcggctgtactcgggcacagcccgctaccacacacagatgctgcgggtgcgggagttcatccgcttccaccagatccccaatcccctgcgccagcgcctcgaggagtacttccagcacgcctggtcctacaccaacggcatcgacatgaacgcggtgctgaagggcttccctgagtgcctgcaggctgacatctgcctgcacctgaaccgctcactgctgcagcactgcaaacccttccgaggggccaccaagggctgccttcgggccctggccatgaagttcaagaccacacatgcaccgccaggggacacactggtgcatgctggggacctgctcaccgccctgtacttcatctcccggggctccatcgagatcctgcggggcgacgtcgtcgtggccatcctggggaagaatgacatctttggggagcctctgaacctgtatgcaaggcctggcaagtcgaacggggatgtgcgggccctcacctactgtgacctacacaagatccatcgggacgacctgctggaggtgctggacatgtaccctgagttctccgaccacttctggtccagcctggagatcaccttcaacctgcgagataccaacatgatcccgggctcccccggcagtacggagttagagggtggcttcagtcggcaacgcaagcgcaagttgtccttccgcaggcgcacggacaaggacacggagcagccaggggaggtgtcggccttggggccgggccgggcgggggcagggccgagtagccggggccggccgggggggccgtggggggagagcccgtccagtggcccctccagccctgagagcagtgaggatgagggcccaggccgcagctccagccccctccgcctggtgcccttctccagccccaggccccccggagagccgccgggtggggagcccctgatggaggactgcgagaagagcagcgacacttgcaaccccctgtcaggcgccttctcaggagtgtccaacattttcagcttctggggggacagtcggggccgccagtaccaggagctccctcgatgccccgcccccacccccagcctcctcaacatccccctctccagcccgggtcggcggccccggggcgacgtggagagcaggctggatgccctccagcgccagctcaacaggctggagacccggctgagtgcagacatggccactgtcctgcagctgctacagaggcagatgacgctggtcccgcccgcctacagtgctgtgaccaccccggggcctggccccacttccacatccccgctgttgcccgtcagccccctccccaccctcaccttggactcgctttctcaggtttcccagttcatggcgtgtgaggagctgcccccgggggccccagagcttccccaagaaggccccacacgacgcctctccctaccgggccagctgggggccctcacctcccagcccctgcacagacacggctcggacccgggcagttagtggggctgcccagtgtggacacgtggctcacccagggatcaaggcgctgctgggccgctccccttggaggccctgctcaggaggccctgaccgtggaaggggagaggaactcgaaagcacagctcctcccccagcccttgggaccatcttctcctgcagtcccctgggccccagtgagaggggcaggggcagggccggcagtaggtggggcctgtggtccccccactgccctgagggcattagctggtctaactgcccggaggcacccggccctgggccttaggcacctcaaggacttttctgctatttactgctcttattgttaaggataataattaaggatcatatgaataattaatgaagatgctgatgactatgaataataaataattatcctgaggaga

SEQ ID NO: 64 - DNA, 3884 bp, Homo sapiens
  source 1..3884: mol_type = genomic DNA
  misc_feature 1..3884: note = cDNA of KCNH2 gene SNP c.1293C>A (p.Phe431Leu)
atgccggtgcggaggggccacgtcgcgccgcagaacaccttcctggacaccatcatccgcaagtttgagggccagagccgtaagttcatcatcgccaacgctcgggtggagaactgcgccgtcatctactgcaacgacggcttctgcgagctgtgcggctactcgcgggccgaggtgatgcagcgaccctgcacctgcgacttcctgcacgggccgcgcacgcagcgccgcgctgccgcgcagatcgcgcaggcactgctgggcgccgaggagcgcaaagtggaaatcgccttctaccggaaagatgggagctgcttcctatgtctggtggatgtggtgcccgtgaagaacgaggatggggctgtcatcatgttcatcctcaatttcgaggtggtgatggagaaggacatggtggggtccccggctcatgacaccaaccaccggggcccccccaccagctggctggccccaggccgcgccaagaccttccgcctgaagctgcccgcgctgctggcgctgacggcccgggagtcgtcggtgcggtcgggcggcgcgggcggcgcgggcgccccgggggccgtggtggtggacgtggacctgacgcccgcggcacccagcagcgagtcgctggccctggacgaagtgacagccatggacaaccacgtggcagggctcgggcccgcggaggagcggcgtgcgctggtgggtcccggctctccgccccgcagcgcgcccggccagctcccatcgccccgggcgcacagcctcaaccccgacgcctcgggctccagctgcagcctggcccggacgcgctcccgagaaagctgcgccagcgtgcgccgcgcctcgtcggccgacgacatcgaggccatgcgcgccggggtgctgcccccgccaccgcgccacgccagcaccggggccatgcacccactgcgcagcggcttgctcaactccacctcggactccgacctcgtgcgctaccgcaccattagcaagattccccaaatcaccctcaactttgtggacctcaagggcgaccccttcttggcttcgcccaccagtgaccgtgagatcatagcacctaagataaaggagcgaacccacaatgtcactgagaaggtcacccaggtcctgtccctgggcgccgacgtgctgcctgagtacaagctgcaggcaccgcgcatccaccgctggaccatcctgcattacagccccttcaaggccgtgtgggactggctcatcctgctgctggtcatctacacggctgtcttcacaccctactcggctgccttactgctgaaggagacggaagaaggcccgcctgctaccgagtgtggctacgcctgccagccgctggctgtggtggacctcatcgtggacatcatgttcattgtggacatcctcatcaacttccgcaccacctacgtcaatgccaacgaggaggtggtcagccaccccggccgcatcgccgtccactacttcaagggctggttcctcatcgacatggtggccgccatccccttcgacctgctcatcttcggctctggctctgaggagctgatcgggctgctgaagactgcgcggctgctgcggctggtgcgcgtggcgcggaagctggatcgctactcagagtacggcgcggccgtgctgttcttgctcatgtgcacctttgcgctcatcgcgcactggctagcctgcatctggtacgccatcggcaacatggagcagccacacatggactcacgcatcggctggctgcacaacctgggcgaccagataggcaaaccctacaacagcagcggcctgggcggcccctccatcaaggacaagtatgtgacggcgctctacttcaccttcagcagcctcaccagtgtgggcttcggcaacgtctctcccaacaccaactcagagaagatcttctccatctgcgtcatgctcattggctccctcatgtatgctagcatcttcggcaacgtgtcggccatcatccagcggctgtactcgggcacagcccgctaccacacacagatgctgcgggtgcgggagttcatccgcttccaccagatccccaatcccctgcgccagcgcctcgaggagtacttccagcacgcctggtcctacaccaacggcatcgacatgaacgcggtgctgaagggcttccctgagtgcctgcaggctgacatctgcctgcacctgaaccgctcactgctgcagcactgcaaacccttccgaggggccaccaagggctgccttcgggccctggccatgaagttcaagaccacacatgcaccgccaggggacacactggtgcatgctggggacctgctcaccgccctgtacttcatctcccggggctccatcgagatcctgcggggcgacgtcgtcgtggccatcctggggaagaatgacatctttggggagcctctgaacctgtatgcaaggcctggcaagtcgaacggggatgtgcgggccctcacctactgtgacctacacaagatccatcgggacgacctgctggaggtgctggacatgtaccctgagttctccgaccacttctggtccagcctggagatcaccttcaacctgcgagataccaacatgatcccgggctcccccggcagtacggagttagagggtggcttcagtcggcaacgcaagcgcaagttgtccttccgcaggcgcacggacaaggacacggagcagccaggggaggtgtcggccttggggccgggccgggcgggggcagggccgagtagccggggccggccgggggggccgtggggggagagcccgtccagtggcccctccagccctgagagcagtgaggatgagggcccaggccgcagctccagccccctccgcctggtgcccttctccagccccaggccccccggagagccgccgggtggggagcccctgatggaggactgcgagaagagcagcgacacttgcaaccccctgtcaggcgccttctcaggagtgtccaacattttcagcttctggggggacagtcggggccgccagtaccaggagctccctcgatgccccgcccccacccccagcctcctcaacatccccctctccagcccgggtcggcggccccggggcgacgtggagagcaggctggatgccctccagcgccagctcaacaggctggagacccggctgagtgcagacatggccactgtcctgcagctgctacagaggcagatgacgctggtcccgcccgcctacagtgctgtgaccaccccggggcctggccccacttccacatccccgctgttgcccgtcagccccctccccaccctcaccttggactcgctttctcaggtttcccagttcatggcgtgtgaggagctgcccccgggggccccagagcttccccaagaaggccccacacgacgcctctccctaccgggccagctgggggccctcacctcccagcccctgcacagacacggctcggacccgggcagttagtggggctgcccagtgtggacacgtggctcacccagggatcaaggcgctgctgggccgctccccttggaggccctgctcaggaggccctgaccgtggaaggggagaggaactcgaaagcacagctcctcccccagcccttgggaccatcttctcctgcagtcccctgggccccagtgagaggggcaggggcagggccggcagtaggtggggcctgtggtccccccactgccctgagggcattagctggtctaactgcccggaggcacccggccctgggccttaggcacctcaaggacttttctgctatttactgctcttattgttaaggataataattaaggatcatatgaataattaatgaagatgctgatgactatgaataataaataattatcctgaggaga

SEQ ID NO: 65 - DNA, 3884 bp, Homo sapiens
  source 1..3884: mol_type = genomic DNA
  misc_feature 1..3884: note = cDNA of KCNH2 gene SNP c.1307C>T (p.Thr436Met)
atgccggtgcggaggggccacgtcgcgccgcagaacaccttcctggacaccatcatccgcaagtttgagggccagagccgtaagttcatcatcgccaacgctcgggtggagaactgcgccgtcatctactgcaacgacggcttctgcgagctgtgcggctactcgcgggccgaggtgatgcagcgaccctgcacctgcgacttcctgcacgggccgcgcacgcagcgccgcgctgccgcgcagatcgcgcaggcactgctgggcgccgaggagcgcaaagtggaaatcgccttctaccggaaagatgggagctgcttcctatgtctggtggatgtggtgcccgtgaagaacgaggatggggctgtcatcatgttcatcctcaatttcgaggtggtgatggagaaggacatggtggggtccccggctcatgacaccaaccaccggggcccccccaccagctggctggccccaggccgcgccaagaccttccgcctgaagctgcccgcgctgctggcgctgacggcccgggagtcgtcggtgcggtcgggcggcgcgggcggcgcgggcgccccgggggccgtggtggtggacgtggacctgacgcccgcggcacccagcagcgagtcgctggccctggacgaagtgacagccatggacaaccacgtggcagggctcgggcccgcggaggagcggcgtgcgctggtgggtcccggctctccgccccgcagcgcgcccggccagctcccatcgccccgggcgcacagcctcaaccccgacgcctcgggctccagctgcagcctggcccggacgcgctcccgagaaagctgcgccagcgtgcgccgcgcctcgtcggccgacgacatcgaggccatgcgcgccggggtgctgcccccgccaccgcgccacgccagcaccggggccatgcacccactgcgcagcggcttgctcaactccacctcggactccgacctcgtgcgctaccgcaccattagcaagattccccaaatcaccctcaactttgtggacctcaagggcgaccccttcttggcttcgcccaccagtgaccgtgagatcatagcacctaagataaaggagcgaacccacaatgtcactgagaaggtcacccaggtcctgtccctgggcgccgacgtgctgcctgagtacaagctgcaggcaccgcgcatccaccgctggaccatcctgcattacagccccttcaaggccgtgtgggactggctcatcctgctgctggtcatctacacggctgtcttcacaccctactcggctgccttcctgctgaaggagatggaagaaggcccgcctgctaccgagtgtggctacgcctgccagccgctggctgtggtggacctcatcgtggacatcatgttcattgtggacatcctcatcaacttccgcaccacctacgtcaatgccaacgaggaggtggtcagccaccccggccgcatcgccgtccactacttcaagggctggttcctcatcgacatggtggccgccatccccttcgacctgctcatcttcggctctggctctgaggagctgatcgggctgctgaagactgcgcggctgctgcggctggtgcgcgtggcgcggaagctggatcgctactcagagtacggcgcggccgtgctgttcttgctcatgtgcacctttgcgctcatcgcgcactggctagcctgcatctggtacgccatcggcaacatggagcagccacacatggactcacgcatcggctggctgcacaacctgggcgaccagataggcaaaccctacaacagcagcggcctgggcggcccctccatcaaggacaagtatgtgacggcgctctacttcaccttcagcagcctcaccagtgtgggcttcggcaacgtctctcccaacaccaactcagagaagatcttctccatctgcgtcatgctcattggctccctcatgtatgctagcatcttcggcaacgtgtcggccatcatccagcggctgtactcgggcacagcccgctaccacacacagatgctgcgggtgcgggagttcatccgcttccaccagatccccaatcccctgcgccagcgcctcgaggagtacttccagcacgcctggtcctacaccaacggcatcgacatgaacgcggtgctgaagggcttccctgagtgcctgcaggctgacatctgcctgcacctgaaccgctcactgctgcagcactgcaaacccttccgaggggccaccaagggctgccttcgggccctggccatgaagttcaagaccacacatgcaccgccaggggacacactggtgcatgctggggacctgctcaccgccctgtacttcatctcccggggctccatcgagatcctgcggggcgacgtcgtcgtggccatcctggggaagaatgacatctttggggagcctctgaacctgtatgcaaggcctggcaagtcgaacggggatgtgcgggccctcacctactgtgacctacacaagatccatcgggacgacctgctggaggtgctggacatgtaccctgagttctccgaccacttctggtccagcctggagatcaccttcaacctgcgagataccaacatgatcccgggctcccccggcagtacggagttagagggtggcttcagtcggcaacgcaagcgcaagttgtccttccgcaggcgcacggacaaggacacggagcagccaggggaggtgtcggccttggggccgggccgggcgggggcagggccgagtagccggggccggccgggggggccgtggggggagagcccgtccagtggcccctccagccctgagagcagtgaggatgagggcccaggccgcagctccagccccctccgcctggtgcccttctccagccccaggccccccggagagccgccgggtggggagcccctgatggaggactgcgagaagagcagcgacacttgcaaccccctgtcaggcgccttctcaggagtgtccaacattttcagcttctggggggacagtcggggccgccagtaccaggagctccctcgatgccccgcccccacccccagcctcctcaacatccccctctccagcccgggtcggcggccccggggcgacgtggagagcaggctggatgccctccagcgccagctcaacaggctggagacccggctgagtgcagacatggccactgtcctgcagctgctacagaggcagatgacgctggtcccgcccgcctacagtgctgtgaccaccccggggcctggccccacttccacatccccgctgttgcccgtcagccccctccccaccctcaccttggactcgctttctcaggtttcccagttcatggcgtgtgaggagctgcccccgggggccccagagcttccccaagaaggccccacacgacgcctctccctaccgggccagctgggggccctcacctcccagcccctgcacagacacggctcggacccgggcagttagtggggctgcccagtgtggacacgtggctcacccagggatcaaggcgctgctgggccgctccccttggaggccctgctcaggaggccctgaccgtggaaggggagaggaactcgaaagcacagctcctcccccagcccttgggaccatcttctcctgcagtcccctgggccccagtgagaggggcaggggcagggccggcagtaggtggggcctgtggtccccccactgccctgagggcattagctggtctaactgcccggaggcacccggccctgggccttaggcacctcaaggacttttctgctatttactgctcttattgttaaggataataattaaggatcatatgaataattaatgaagatgctgatgactatgaataataaataattatcctgaggaga

SEQ ID NO: 66 - DNA, 3884 bp, Homo sapiens
  source 1..3884: mol_type = genomic DNA
  misc_feature 1..3884: note = cDNA of KCNH2 gene SNP c.1319C>T (p.Pro440Leu)
atgccggtgcggaggggccacgtcgcgccgcagaacaccttcctggacaccatcatccgcaagtttgagggccagagccgtaagttcatcatcgccaacgctcgggtggagaactgcgccgtcatctactgcaacgacggcttctgcgagctgtgcggctactcgcgggccgaggtgatgcagcgaccctgcacctgcgacttcctgcacgggccgcgcacgcagcgccgcgctgccgcgcagatcgcgcaggcactgctgggcgccgaggagcgcaaagtggaaatcgccttctaccggaaagatgggagctgcttcctatgtctggtggatgtggtgcccgtgaagaacgaggatggggctgtcatcatgttcatcctcaatttcgaggtggtgatggagaaggacatggtggggtccccggctcatgacaccaaccaccggggcccccccaccagctggctggccccaggccgcgccaagaccttccgcctgaagctgcccgcgctgctggcgctgacggcccgggagtcgtcggtgcggtcgggcggcgcgggcggcgcgggcgccccgggggccgtggtggtggacgtggacctgacgcccgcggcacccagcagcgagtcgctggccctggacgaagtgacagccatggacaaccacgtggcagggctcgggcccgcggaggagcggcgtgcgctggtgggtcccggctctccgccccgcagcgcgcccggccagctcccatcgccccgggcgcacagcctcaaccccgacgcctcgggctccagctgcagcctggcccggacgcgctcccgagaaagctgcgccagcgtgcgccgcgcctcgtcggccgacgacatcgaggccatgcgcgccggggtgctgcccccgccaccgcgccacgccagcaccggggccatgcacccactgcgcagcggcttgctcaactccacctcggactccgacctcgtgcgctaccgcaccattagcaagattccccaaatcaccctcaactttgtggacctcaagggcgaccccttcttggcttcgcccaccagtgaccgtgagatcatagcacctaagataaaggagcgaacccacaatgtcactgagaaggtcacccaggtcctgtccctgggcgccgacgtgctgcctgagtacaagctgcaggcaccgcgcatccaccgctggaccatcctgcattacagccccttcaaggccgtgtgggactggctcatcctgctgctggtcatctacacggctgtcttcacaccctactcggctgccttcctgctgaaggagacggaagaaggcctgcctgctaccgagtgtggctacgcctgccagccgctggctgtggtggacctcatcgtggacatcatgttcattgtggacatcctcatcaacttccgcaccacctacgtcaatgccaacgaggaggtggtcagccaccccggccgcatcgccgtccactacttcaagggctggttcctcatcgacatggtggccgccatccccttcgacctgctcatcttcggctctggctctgaggagctgatcgggctgctgaagactgcgcggctgctgcggctggtgcgcgtggcgcggaagctggatcgctactcagagtacggcgcggccgtgctgttcttgctcatgtgcacctttgcgctcatcgcgcactggctagcctgcatctggtacgccatcggcaacatggagcagccacacatggactcacgcatcggctggctgcacaacctgggcgaccagataggcaaaccctacaacagcagcggcctgggcggcccctccatcaaggacaagtatgtgacggcgctctacttcaccttcagcagcctcaccagtgtgggcttcggcaacgtctctcccaacaccaactcagagaagatcttctccatctgcgtcatgctcattggctccctcatgtatgctagcatcttcggcaacgtgtcggccatcatccagcggctgtactcgggcacagcccgctaccacacacagatgctgcgggtgcgggagttcatccgcttccaccagatccccaatcccctgcgccagcgcctcgaggagtacttccagcacgcctggtcctacaccaacggcatcgacatgaacgcggtgctgaagggcttccctgagtgcctgcaggctgacatctgcctgcacctgaaccgctcactgctgcagcactgcaaacccttccgaggggccaccaagggctgccttcgggccctggccatgaagttcaagaccacacatgcaccgccaggggacacactggtgcatgctggggacctgctcaccgccctgtacttcatctcccggggctccatcgagatcctgcggggcgacgtcgtcgtggccatcctggggaagaatgacatctttggggagcctctgaacctgtatgcaaggcctggcaagtcgaacggggatgtgcgggccctcacctactgtgacctacacaagatccatcgggacgacctgctggaggtgctggacatgtaccctgagttctccgaccacttctggtccagcctggagatcaccttcaacctgcgagataccaacatgatcccgggctcccccggcagtacggagttagagggtggcttcagtcggcaacgcaagcgcaagttgtccttccgcaggcgcacggacaaggacacggagcagccaggggaggtgtcggccttggggccgggccgggcgggggcagggccgagtagccggggccggccgggggggccgtggggggagagcccgtccagtggcccctccagccctgagagcagtgaggatgagggcccaggccgcagctccagccccctccgcctggtgcccttctccagccccaggccccccggagagccgccgggtggggagcccctgatggaggactgcgagaagagcagcgacacttgcaaccccctgtcaggcgccttctcaggagtgtccaacattttcagcttctggggggacagtcggggccgccagtaccaggagctccctcgatgccccgcccccacccccagcctcctcaacatccccctctccagcccgggtcggcggccccggggcgacgtggagagcaggctggatgccctccagcgccagctcaacaggctggagacccggctgagtgcagacatggccactgtcctgcagctgctacagaggcagatgacgctggtcccgcccgcctacagtgctgtgaccaccccggggcctggccccacttccacatccccgctgttgcccgtcagccccctccccaccctcaccttggactcgctttctcaggtttcccagttcatggcgtgtgaggagctgcccccgggggccccagagcttccccaagaaggccccacacgacgcctctccctaccgggccagctgggggccctcacctcccagcccctgcacagacacggctcggacccgggcagttagtggggctgcccagtgtggacacgtggctcacccagggatcaaggcgctgctgggccgctccccttggaggccctgctcaggaggccctgaccgtggaaggggagaggaactcgaaagcacagctcctcccccagcccttgggaccatcttctcctgcagtcccctgggccccagtgagaggggcaggggcagggccggcagtaggtggggcctgtggtccccccactgccctgagggcattagctggtctaactgcccggaggcacccggccctgggccttaggcacctcaaggacttttctgctatttactgctcttattgttaaggataataattaaggatcatatgaataattaatgaagatgctgatgactatgaataataaataattatcctgaggaga

SEQ ID NO: 67 - DNA, 3884 bp, Homo sapiens
  source 1..3884: mol_type = genomic DNA
  misc_feature 1..3884: note = cDNA of KCNH2 gene SNP c.131G>A (p.Cys44Tyr)
atgccggtgcggaggggccacgtcgcgccgcagaacaccttcctggacaccatcatccgcaagtttgagggccagagccgtaagttcatcatcgccaacgctcgggtggagaactgcgccgtcatctactacaacgacggcttctgcgagctgtgcggctactcgcgggccgaggtgatgcagcgaccctgcacctgcgacttcctgcacgggccgcgcacgcagcgccgcgctgccgcgcagatcgcgcaggcactgctgggcgccgaggagcgcaaagtggaaatcgccttctaccggaaagatgggagctgcttcctatgtctggtggatgtggtgcccgtgaagaacgaggatggggctgtcatcatgttcatcctcaatttcgaggtggtgatggagaaggacatggtggggtccccggctcatgacaccaaccaccggggcccccccaccagctggctggccccaggccgcgccaagaccttccgcctgaagctgcccgcgctgctggcgctgacggcccgggagtcgtcggtgcggtcgggcggcgcgggcggcgcgggcgccccgggggccgtggtggtggacgtggacctgacgcccgcggcacccagcagcgagtcgctggccctggacgaagtgacagccatggacaaccacgtggcagggctcgggcccgcggaggagcggcgtgcgctggtgggtcccggctctccgccccgcagcgcgcccggccagctcccatcgccccgggcgcacagcctcaaccccgacgcctcgggctccagctgcagcctggcccggacgcgctcccgagaaagctgcgccagcgtgcgccgcgcctcgtcggccgacgacatcgaggccatgcgcgccggggtgctgcccccgccaccgcgccacgccagcaccggggccatgcacccactgcgcagcggcttgctcaactccacctcggactccgacctcgtgcgctaccgcaccattagcaagattccccaaatcaccctcaactttgtggacctcaagggcgaccccttcttggcttcgcccaccagtgaccgtgagatcatagcacctaagataaaggagcgaacccacaatgtcactgagaaggtcacccaggtcctgtccctgggcgccgacgtgctgcctgagtacaagctgcaggcaccgcgcatccaccgctggaccatcctgcattacagccccttcaaggccgtgtgggactggctcatcctgctgctggtcatctacacggctgtcttcacaccctactcggctgccttcctgctgaaggagacggaagaaggcccgcctgctaccgagtgtggctacgcctgccagccgctggctgtggtggacctcatcgtggacatcatgttcattgtggacatcctcatcaacttccgcaccacctacgtcaatgccaacgaggaggtggtcagccaccccggccgcatcgccgtccactacttcaagggctggttcctcatcgacatggtggccgccatccccttcgacctgctcatcttcggctctggctctgaggagctgatcgggctgctgaagactgcgcggctgctgcggctggtgcgcgtggcgcggaagctggatcgctactcagagtacggcgcggccgtgctgttcttgctcatgtgcacctttgcgctcatcgcgcactggctagcctgcatctggtacgccatcggcaacatggagcagccacacatggactcacgcatcggctggctgcacaacctgggcgaccagataggcaaaccctacaacagcagcggcctgggcggcccctccatcaaggacaagtatgtgacggcgctctacttcaccttcagcagcctcaccagtgtgggcttcggcaacgtctctcccaacaccaactcagagaagatcttctccatctgcgtcatgctcattggctccctcatgtatgctagcatcttcggcaacgtgtcggccatcatccagcggctgtactcgggcacagcccgctaccacacacagatgctgcgggtgcgggagttcatccgcttccaccagatccccaatcccctgcgccagcgcctcgaggagtacttccagcacgcctggtcctacaccaacggcatcgacatgaacgcggtgctgaagggcttccctgagtgcctgcaggctgacatctgcctgcacctgaaccgctcactgctgcagcactgcaaacccttccgaggggccaccaagggctgccttcgggccctggccatgaagttcaagaccacacatgcaccgccaggggacacactggtgcatgctggggacctgctcaccgccctgtacttcatctcccggggctccatcgagatcctgcggggcgacgtcgtcgtggccatcctggggaagaatgacatctttggggagcctctgaacctgtatgcaaggcctggcaagtcgaacggggatgtgcgggccctcacctactgtgacctacacaagatccatcgggacgacctgctggaggtgctggacatgtaccctgagttctccgaccacttctggtccagcctggagatcaccttcaacctgcgagataccaacatgatcccgggctcccccggcagtacggagttagagggtggcttcagtcggcaacgcaagcgcaagttgtccttccgcaggcgcacggacaaggacacggagcagccaggggaggtgtcggccttggggccgggccgggcgggggcagggccgagtagccggggccggccgggggggccgtggggggagagcccgtccagtggcccctccagccctgagagcagtgaggatgagggcccaggccgcagctccagccccctccgcctggtgcccttctccagccccaggccccccggagagccgccgggtggggagcccctgatggaggactgcgagaagagcagcgacacttgcaaccccctgtcaggcgccttctcaggagtgtccaacattttcagcttctggggggacagtcggggccgccagtaccaggagctccctcgatgccccgcccccacccccagcctcctcaacatccccctctccagcccgggtcggcggccccggggcgacgtggagagcaggctggatgccctccagcgccagctcaacaggctggagacccggctgagtgcagacatggccactgtcctgcagctgctacagaggcagatgacgctggtcccgcccgcctacagtgctgtgaccaccccggggcctggccccacttccacatccccgctgttgcccgtcagccccctccccaccctcaccttggactcgctttctcaggtttcccagttcatggcgtgtgaggagctgcccccgggggccccagagcttccccaagaaggccccacacgacgcctctccctaccgggccagctgggggccctcacctcccagcccctgcacagacacggctcggacccgggcagttagtggggctgcccagtgtggacacgtggctcacccagggatcaaggcgctgctgggccgctccccttggaggccctgctcaggaggccctgaccgtggaaggggagaggaactcgaaagcacagctcctcccccagcccttgggaccatcttctcctgcagtcccctgggccccagtgagaggggcaggggcagggccggcagtaggtggggcctgtggtccccccactgccctgagggcattagctggtctaactgcccggaggcacccggccctgggccttaggcacctcaaggacttttctgctatttactgctcttattgttaaggataataattaaggatcatatgaataattaatgaagatgctgatgactatgaataataaataattatcctgaggaga

SEQ ID NO: 68 - DNA, 3884 bp, Homo sapiens
  source 1..3884: mol_type = genomic DNA
  misc_feature 1..3884: note = cDNA of KCNH2 gene SNP c.131G>T (p.Cys44Phe)
atgccggtgcggaggggccacgtcgcgccgcagaacaccttcctggacaccatcatccgcaagtttgagggccagagccgtaagttcatcatcgccaacgctcgggtggagaactgcgccgtcatctacttcaacgacggcttctgcgagctgtgcggctactcgcgggccgaggtgatgcagcgaccctgcacctgcgacttcctgcacgggccgcgcacgcagcgccgcgctgccgcgcagatcgcgcaggcactgctgggcgccgaggagcgcaaagtggaaatcgccttctaccggaaagatgggagctgcttcctatgtctggtggatgtggtgcccgtgaagaacgaggatggggctgtcatcatgttcatcctcaatttcgaggtggtgatggagaaggacatggtggggtccccggctcatgacaccaaccaccggggcccccccaccagctggctggccccaggccgcgccaagaccttccgcctgaagctgcccgcgctgctggcgctgacggcccgggagtcgtcggtgcggtcgggcggcgcgggcggcgcgggcgccccgggggccgtggtggtggacgtggacctgacgcccgcggcacccagcagcgagtcgctggccctggacgaagtgacagccatggacaaccacgtggcagggctcgggcccgcggaggagcggcgtgcgctggtgggtcccggctctccgccccgcagcgcgcccggccagctcccatcgccccgggcgcacagcctcaaccccgacgcctcgggctccagctgcagcctggcccggacgcgctcccgagaaagctgcgccagcgtgcgccgcgcctcgtcggccgacgacatcgaggccatgcgcgccggggtgctgcccccgccaccgcgccacgccagcaccggggccatgcacccactgcgcagcggcttgctcaactccacctcggactccgacctcgtgcgctaccgcaccattagcaagattccccaaatcaccctcaactttgtggacctcaagggcgaccccttcttggcttcgcccaccagtgaccgtgagatcatagcacctaagataaaggagcgaacccacaatgtcactgagaaggtcacccaggtcctgtccctgggcgccgacgtgctgcctgagtacaagctgcaggcaccgcgcatccaccgctggaccatcctgcattacagccccttcaaggccgtgtgggactggctcatcctgctgctggtcatctacacggctgtcttcacaccctactcggctgccttcctgctgaaggagacggaagaaggcccgcctgctaccgagtgtggctacgcctgccagccgctggctgtggtggacctcatcgtggacatcatgttcattgtggacatcctcatcaacttccgcaccacctacgtcaatgccaacgaggaggtggtcagccaccccggccgcatcgccgtccactacttcaagggctggttcctcatcgacatggtggccgccatccccttcgacctgctcatcttcggctctggctctgaggagctgatcgggctgctgaagactgcgcggctgctgcggctggtgcgcgtggcgcggaagctggatcgctactcagagtacggcgcggccgtgctgttcttgctcatgtgcacctttgcgctcatcgcgcactggctagcctgcatctggtacgccatcggcaacatggagcagccacacatggactcacgcatcggctggctgcacaacctgggcgaccagataggcaaaccctacaacagcagcggcctgggcggcccctccatcaaggacaagtatgtgacggcgctctacttcaccttcagcagcctcaccagtgtgggcttcggcaacgtctctcccaacaccaactcagagaagatcttctccatctgcgtcatgctcattggctccctcatgtatgctagcatcttcggcaacgtgtcggccatcatccagcggctgtactcgggcacagcccgctaccacacacagatgctgcgggtgcgggagttcatccgcttccaccagatccccaatcccctgcgccagcgcctcgaggagtacttccagcacgcctggtcctacaccaacggcatcgacatgaacgcggtgctgaagggcttccctgagtgcctgcaggctgacatctgcctgcacctgaaccgctcactgctgcagcactgcaaacccttccgaggggccaccaagggctgccttcgggccctggccatgaagttcaagaccacacatgcaccgccaggggacacactggtgcatgctggggacctgctcaccgccctgtacttcatctcccggggctccatcgagatcctgcggggcgacgtcgtcgtggccatcctggggaagaatgacatctttggggagcctctgaacctgtatgcaaggcctggcaagtcgaacggggatgtgcgggccctcacctactgtgacctacacaagatccatcgggacgacctgctggaggtgctggacatgtaccctgagttctccgaccacttctggtccagcctggagatcaccttcaacctgcgagataccaacatgatcccgggctcccccggcagtacggagttagagggtggcttcagtcggcaacgcaagcgcaagttgtccttccgcaggcgcacggacaaggacacggagcagccaggggaggtgtcggccttggggccgggccgggcgggggcagggccgagtagccggggccggccgggggggccgtggggggagagcccgtccagtggcccctccagccctgagagcagtgaggatgagggcccaggccgcagctccagccccctccgcctggtgcccttctccagccccaggccccccggagagccgccgggtggggagcccctgatggaggactgcgagaagagcagcgacacttgcaaccccctgtcaggcgccttctcaggagtgtccaacattttcagcttctggggggacagtcggggccgccagtaccaggagctccctcgatgccccgcccccacccccagcctcctcaacatccccctctccagcccgggtcggcggccccggggcgacgtggagagcaggctggatgccctccagcgccagctcaacaggctggagacccggctgagtgcagacatggccactgtcctgcagctgctacagaggcagatgacgctggtcccgcccgcctacagtgctgtgaccaccccggggcctggccccacttccacatccccgctgttgcccgtcagccccctccccaccctcaccttggactcgctttctcaggtttcccagttcatggcgtgtgaggagctgcccccgggggccccagagcttccccaagaaggccccacacgacgcctctccctaccgggccagctgggggccctcacctcccagcccctgcacagacacggctcggacccgggcagttagtggggctgcccagtgtggacacgtggctcacccagggatcaaggcgctgctgggccgctccccttggaggccctgctcaggaggccctgaccgtggaaggggagaggaactcgaaagcacagctcctcccccagcccttgggaccatcttctcctgcagtcccctgggccccagtgagaggggcaggggcagggccggcagtaggtggggcctgtggtccccccactgccctgagggcattagctggtctaactgcccggaggcacccggccctgggccttaggcacctcaaggacttttctgctatttactgctcttattgttaaggataataattaaggatcatatgaataattaatgaagatgctgatgactatgaataataaataattatcctgaggaga

SEQ ID NO: 69 - DNA, 3884 bp, Homo sapiens
  source 1..3884: mol_type = genomic DNA
  misc_feature 1..3884: note = cDNA of KCNH2 gene SNP c.1325C>T (p.Ala442Val)
atgccggtgcggaggggccacgtcgcgccgcagaacaccttcctggacaccatcatccgcaagtttgagggccagagccgtaagttcatcatcgccaacgctcgggtggagaactgcgccgtcatctactgcaacgacggcttctgcgagctgtgcggctactcgcgggccgaggtgatgcagcgaccctgcacctgcgacttcctgcacgggccgcgcacgcagcgccgcgctgccgcgcagatcgcgcaggcactgctgggcgccgaggagcgcaaagtggaaatcgccttctaccggaaagatgggagctgcttcctatgtctggtggatgtggtgcccgtgaagaacgaggatggggctgtcatcatgttcatcctcaatttcgaggtggtgatggagaaggacatggtggggtccccggctcatgacaccaaccaccggggcccccccaccagctggctggccccaggccgcgccaagaccttccgcctgaagctgcccgcgctgctggcgctgacggcccgggagtcgtcggtgcggtcgggcggcgcgggcggcgcgggcgccccgggggccgtggtggtggacgtggacctgacgcccgcggcacccagcagcgagtcgctggccctggacgaagtgacagccatggacaaccacgtggcagggctcgggcccgcggaggagcggcgtgcgctggtgggtcccggctctccgccccgcagcgcgcccggccagctcccatcgccccgggcgcacagcctcaaccccgacgcctcgggctccagctgcagcctggcccggacgcgctcccgagaaagctgcgccagcgtgcgccgcgcctcgtcggccgacgacatcgaggccatgcgcgccggggtgctgcccccgccaccgcgccacgccagcaccggggccatgcacccactgcgcagcggcttgctcaactccacctcggactccgacctcgtgcgctaccgcaccattagcaagattccccaaatcaccctcaactttgtggacctcaagggcgaccccttcttggcttcgcccaccagtgaccgtgagatcatagcacctaagataaaggagcgaacccacaatgtcactgagaaggtcacccaggtcctgtccctgggcgccgacgtgctgcctgagtacaagctgcaggcaccgcgcatccaccgctggaccatcctgcattacagccccttcaaggccgtgtgggactggctcatcctgctgctggtcatctacacggctgtcttcacaccctactcggctgccttcctgctgaaggagacggaagaaggcccgcctgttaccgagtgtggctacgcctgccagccgctggctgtggtggacctcatcgtggacatcatgttcattgtggacatcctcatcaacttccgcaccacctacgtcaatgccaacgaggaggtggtcagccaccccggccgcatcgccgtccactacttcaagggctggttcctcatcgacatggtggccgccatccccttcgacctgctcatcttcggctctggctctgaggagctgatcgggctgctgaagactgcgcggctgctgcggctggtgcgcgtggcgcggaagctggatcgctactcagagtacggcgcggccgtgctgttcttgctcatgtgcacctttgcgctcatcgcgcactggctagcctgcatctggtacgccatcggcaacatggagcagccacacatggactcacgcatcggctggctgcacaacctgggcgaccagataggcaaaccctacaacagcagcggcctgggcggcccctccatcaaggacaagtatgtgacggcgctctacttcaccttcagcagcctcaccagtgtgggcttcggcaacgtctctcccaacaccaactcagagaagatcttctccatctgcgtcatgctcattggctccctcatgtatgctagcatcttcggcaacgtgtcggccatcatccagcggctgtactcgggcacagcccgctaccacacacagatgctgcgggtgcgggagttcatccgcttccaccagatccccaatcccctgcgccagcgcctcgaggagtacttccagcacgcctggtcctacaccaacggcatcgacatgaacgcggtgctgaagggcttccctgagtgcctgcaggctgacatctgcctgcacctgaaccgctcactgctgcagcactgcaaacccttccgaggggccaccaagggctgccttcgggccctggccatgaagttcaagaccacacatgcaccgccaggggacacactggtgcatgctggggacctgctcaccgccctgtacttcatctcccggggctccatcgagatcctgcggggcgacgtcgtcgtggccatcctggggaagaatgacatctttggggagcctctgaacctgtatgcaaggcctggcaagtcgaacggggatgtgcgggccctcacctactgtgacctacacaagatccatcgggacgacctgctggaggtgctggacatgtaccctgagttctccgaccacttctggtccagcctggagatcaccttcaacctgcgagataccaacatgatcccgggctcccccggcagtacggagttagagggtggcttcagtcggcaacgcaagcgcaagttgtccttccgcaggcgcacggacaaggacacggagcagccaggggaggtgtcggccttggggccgggccgggcgggggcagggccgagtagccggggccggccgggggggccgtggggggagagcccgtccagtggcccctccagccctgagagcagtgaggatgagggcccaggccgcagctccagccccctccgcctggtgcccttctccagccccaggccccccggagagccgccgggtggggagcccctgatggaggactgcgagaagagcagcgacacttgcaaccccctgtcaggcgccttctcaggagtgtccaacattttcagcttctggggggacagtcggggccgccagtaccaggagctccctcgatgccccgcccccacccccagcctcctcaacatccccctctccagcccgggtcggcggccccggggcgacgtggagagcaggctggatgccctccagcgccagctcaacaggctggagacccggctgagtgcagacatggccactgtcctgcagctgctacagaggcagatgacgctggtcccgcccgcctacagtgctgtgaccaccccggggcctggccccacttccacatccccgctgttgcccgtcagccccctccccaccctcaccttggactcgctttctcaggtttcccagttcatggcgtgtgaggagctgcccccgggggccccagagcttccccaagaaggccccacacgacgcctctccctaccgggccagctgggggccctcacctcccagcccctgcacagacacggctcggacccgggcagttagtggggctgcccagtgtggacacgtggctcacccagggatcaaggcgctgctgggccgctccccttggaggccctgctcaggaggccctgaccgtggaaggggagaggaactcgaaagcacagctcctcccccagcccttgggaccatcttctcctgcagtcccctgggccccagtgagaggggcaggggcagggccggcagtaggtggggcctgtggtccccccactgccctgagggcattagctggtctaactgcccggaggcacccggccctgggccttaggcacctcaaggacttttctgctatttactgctcttattgttaaggataataattaaggatcatatgaataattaatgaagatgctgatgactatgaataataaataattatcctgaggaga

SEQ ID NO: 70 - DNA, 3884 bp, Homo sapiens
  source 1..3884: mol_type = genomic DNA
  misc_feature 1..3884: note = cDNA of KCNH2 gene SNP c.132C>G (p.Cys44Trp)
atgccggtgcggaggggccacgtcgcgccgcagaacaccttcctggacaccatcatccgcaagtttgagggccagagccgtaagttcatcatcgccaacgctcgggtggagaactgcgccgtcatctactggaacgacggcttctgcgagctgtgcggctactcgcgggccgaggtgatgcagcgaccctgcacctgcgacttcctgcacgggccgcgcacgcagcgccgcgctgccgcgcagatcgcgcaggcactgctgggcgccgaggagcgcaaagtggaaatcgccttctaccggaaagatgggagctgcttcctatgtctggtggatgtggtgcccgtgaagaacgaggatggggctgtcatcatgttcatcctcaatttcgaggtggtgatggagaaggacatggtggggtccccggctcatgacaccaaccaccggggcccccccaccagctggctggccccaggccgcgccaagaccttccgcctgaagctgcccgcgctgctggcgctgacggcccgggagtcgtcggtgcggtcgggcggcgcgggcggcgcgggcgccccgggggccgtggtggtggacgtggacctgacgcccgcggcacccagcagcgagtcgctggccctggacgaagtgacagccatggacaaccacgtggcagggctcgggcccgcggaggagcggcgtgcgctggtgggtcccggctctccgccccgcagcgcgcccggccagctcccatcgccccgggcgcacagcctcaaccccgacgcctcgggctccagctgcagcctggcccggacgcgctcccgagaaagctgcgccagcgtgcgccgcgcctcgtcggccgacgacatcgaggccatgcgcgccggggtgctgcccccgccaccgcgccacgccagcaccggggccatgcacccactgcgcagcggcttgctcaactccacctcggactccgacctcgtgcgctaccgcaccattagcaagattccccaaatcaccctcaactttgtggacctcaagggcgaccccttcttggcttcgcccaccagtgaccgtgagatcatagcacctaagataaaggagcgaacccacaatgtcactgagaaggtcacccaggtcctgtccctgggcgccgacgtgctgcctgagtacaagctgcaggcaccgcgcatccaccgctggaccatcctgcattacagccccttcaaggccgtgtgggactggctcatcctgctgctggtcatctacacggctgtcttcacaccctactcggctgccttcctgctgaaggagacggaagaaggcccgcctgctaccgagtgtggctacgcctgccagccgctggctgtggtggacctcatcgtggacatcatgttcattgtggacatcctcatcaacttccgcaccacctacgtcaatgccaacgaggaggtggtcagccaccccggccgcatcgccgtccactacttcaagggctggttcctcatcgacatggtggccgccatccccttcgacctgctcatcttcggctctggctctgaggagctgatcgggctgctgaagactgcgcggctgctgcggctggtgcgcgtggcgcggaagctggatcgctactcagagtacggcgcggccgtgctgttcttgctcatgtgcacctttgcgctcatcgcgcactggctagcctgcatctggtacgccatcggcaacatggagcagccacacatggactcacgcatcggctggctgcacaacctgggcgaccagataggcaaaccctacaacagcagcggcctgggcggcccctccatcaaggacaagtatgtgacggcgctctacttcaccttcagcagcctcaccagtgtgggcttcggcaacgtctctcccaacaccaactcagagaagatcttctccatctgcgtcatgctcattggctccctcatgtatgctagcatcttcggcaacgtgtcggccatcatccagcggctgtactcgggcacagcccgctaccacacacagatgctgcgggtgcgggagttcatccgcttccaccagatccccaatcccctgcgccagcgcctcgaggagtacttccagcacgcctggtcctacaccaacggcatcgacatgaacgcggtgctgaagggcttccctgagtgcctgcaggctgacatctgcctgcacctgaaccgctcactgctgcagcactgcaaacccttccgaggggccaccaagggctgccttcgggccctggccatgaagttcaagaccacacatgcaccgccaggggacacactggtgcatgctggggacctgctcaccgccctgtacttcatctcccggggctccatcgagatcctgcggggcgacgtcgtcgtggccatcctggggaagaatgacatctttggggagcctctgaacctgtatgcaaggcctggcaagtcgaacggggatgtgcgggccctcacctactgtgacctacacaagatccatcgggacgacctgctggaggtgctggacatgtaccctgagttctccgaccacttctggtccagcctggagatcaccttcaacctgcgagataccaacatgatcccgggctcccccggcagtacggagttagagggtggcttcagtcggcaacgcaagcgcaagttgtccttccgcaggcgcacggacaaggacacggagcagccaggggaggtgtcggccttggggccgggccgggcgggggcagggccgagtagccggggccggccgggggggccgtggggggagagcccgtccagtggcccctccagccctgagagcagtgaggatgagggcccaggccgcagctccagccccctccgcctggtgcccttctccagccccaggccccccggagagccgccgggtggggagcccctgatggaggactgcgagaagagcagcgacacttgcaaccccctgtcaggcgccttctcaggagtgtccaacattttcagcttctggggggacagtcggggccgccagtaccaggagctccctcgatgccccgcccccacccccagcctcctcaacatccccctctccagcccgggtcggcggccccggggcgacgtggagagcaggctggatgccctccagcgccagctcaacaggctggagacccggctgagtgcagacatggccactgtcctgcagctgctacagaggcagatgacgctggtcccgcccgcctacagtgctgtgaccaccccggggcctggccccacttccacatccccgctgttgcccgtcagccccctccccaccctcaccttggactcgctttctcaggtttcccagttcatggcgtgtgaggagctgcccccgggggccccagagcttccccaagaaggccccacacgacgcctctccctaccgggccagctgggggccctcacctcccagcccctgcacagacacggctcggacccgggcagttagtggggctgcccagtgtggacacgtggctcacccagggatcaaggcgctgctgggccgctccccttggaggccctgctcaggaggccctgaccgtggaaggggagaggaactcgaaagcacagctcctcccccagcccttgggaccatcttctcctgcagtcccctgggccccagtgagaggggcaggggcagggccggcagtaggtggggcctgtggtccccccactgccctgagggcattagctggtctaactgcccggaggcacccggccctgggccttaggcacctcaaggacttttctgctatttactgctcttattgttaaggataataattaaggatcatatgaataattaatgaagatgctgatgactatgaataataaataattatcctgaggaga

SEQ ID NO: 71 - DNA, 3884 bp, Homo sapiens
  source 1..3884: mol_type = genomic DNA
  misc_feature 1..3884: note = cDNA of KCNH2 gene SNP c.1330G>A (p.Glu444Lys)
atgccggtgcggaggggccacgtcgcgccgcagaacaccttcctggacaccatcatccgcaagtttgagggccagagccgtaagttcatcatcgccaacgctcgggtggagaactgcgccgtcatctactgcaacgacggcttctgcgagctgtgcggctactcgcgggccgaggtgatgcagcgaccctgcacctgcgacttcctgcacgggccgcgcacgcagcgccgcgctgccgcgcagatcgcgcaggcactgctgggcgccgaggagcgcaaagtggaaatcgccttctaccggaaagatgggagctgcttcctatgtctggtggatgtggtgcccgtgaagaacgaggatggggctgtcatcatgttcatcctcaatttcgaggtggtgatggagaaggacatggtggggtccccggctcatgacaccaaccaccggggcccccccaccagctggctggccccaggccgcgccaagaccttccgcctgaagctgcccgcgctgctggcgctgacggcccgggagtcgtcggtgcggtcgggcggcgcgggcggcgcgggcgccccgggggccgtggtggtggacgtggacctgacgcccgcggcacccagcagcgagtcgctggccctggacgaagtgacagccatggacaaccacgtggcagggctcgggcccgcggaggagcggcgtgcgctggtgggtcccggctctccgccccgcagcgcgcccggccagctcccatcgccccgggcgcacagcctcaaccccgacgcctcgggctccagctgcagcctggcccggacgcgctcccgagaaagctgcgccagcgtgcgccgcgcctcgtcggccgacgacatcgaggccatgcgcgccggggtgctgcccccgccaccgcgccacgccagcaccggggccatgcacccactgcgcagcggcttgctcaactccacctcggactccgacctcgtgcgctaccgcaccattagcaagattccccaaatcaccctcaactttgtggacctcaagggcgaccccttcttggcttcgcccaccagtgaccgtgagatcatagcacctaagataaaggagcgaacccacaatgtcactgagaaggtcacccaggtcctgtccctgggcgccgacgtgctgcctgagtacaagctgcaggcaccgcgcatccaccgctggaccatcctgcattacagccccttcaaggccgtgtgggactggctcatcctgctgctggtcatctacacggctgtcttcacaccctactcggctgccttcctgctgaaggagacggaagaaggcccgcctgctaccaagtgtggctacgcctgccagccgctggctgtggtggacctcatcgtggacatcatgttcattgtggacatcctcatcaacttccgcaccacctacgtcaatgccaacgaggaggtggtcagccaccccggccgcatcgccgtccactacttcaagggctggttcctcatcgacatggtggccgccatccccttcgacctgctcatcttcggctctggctctgaggagctgatcgggctgctgaagactgcgcggctgctgcggctggtgcgcgtggcgcggaagctggatcgctactcagagtacggcgcggccgtgctgttcttgctcatgtgcacctttgcgctcatcgcgcactggctagcctgcatctggtacgccatcggcaacatggagcagccacacatggactcacgcatcggctggctgcacaacctgggcgaccagataggcaaaccctacaacagcagcggcctgggcggcccctccatcaaggacaagtatgtgacggcgctctacttcaccttcagcagcctcaccagtgtgggcttcggcaacgtctctcccaacaccaactcagagaagatcttctccatctgcgtcatgctcattggctccctcatgtatgctagcatcttcggcaacgtgtcggccatcatccagcggctgtactcgggcacagcccgctaccacacacagatgctgcgggtgcgggagttcatccgcttccaccagatccccaatcccctgcgccagcgcctcgaggagtacttccagcacgcctggtcctacaccaacggcatcgacatgaacgcggtgctgaagggcttccctgagtgcctgcaggctgacatctgcctgcacctgaaccgctcactgctgcagcactgcaaacccttccgaggggccaccaagggctgccttcgggccctggccatgaagttcaagaccacacatgcaccgccaggggacacactggtgcatgctggggacctgctcaccgccctgtacttcatctcccggggctccatcgagatcctgcggggcgacgtcgtcgtggccatcctggggaagaatgacatctttggggagcctctgaacctgtatgcaaggcctggcaagtcgaacggggatgtgcgggccctcacctactgtgacctacacaagatccatcgggacgacctgctggaggtgctggacatgtaccctgagttctccgaccacttctggtccagcctggagatcaccttcaacctgcgagataccaacatgatcccgggctcccccggcagtacggagttagagggtggcttcagtcggcaacgcaagcgcaagttgtccttccgcaggcgcacggacaaggacacggagcagccaggggaggtgtcggccttggggccgggccgggcgggggcagggccgagtagccggggccggccgggggggccgtggggggagagcccgtccagtggcccctccagccctgagagcagtgaggatgagggcccaggccgcagctccagccccctccgcctggtgcccttctccagccccaggccccccggagagccgccgggtggggagcccctgatggaggactgcgagaagagcagcgacacttgcaaccccctgtcaggcgccttctcaggagtgtccaacattttcagcttctggggggacagtcggggccgccagtaccaggagctccctcgatgccccgcccccacccccagcctcctcaacatccccctctccagcccgggtcggcggccccggggcgacgtggagagcaggctggatgccctccagcgccagctcaacaggctggagacccggctgagtgcagacatggccactgtcctgcagctgctacagaggcagatgacgctggtcccgcccgcctacagtgctgtgaccaccccggggcctggccccacttccacatccccgctgttgcccgtcagccccctccccaccctcaccttggactcgctttctcaggtttcccagttcatggcgtgtgaggagctgcccccgggggccccagagcttccccaagaaggccccacacgacgcctctccctaccgggccagctgggggccctcacctcccagcccctgcacagacacggctcggacccgggcagttagtggggctgcccagtgtggacacgtggctcacccagggatcaaggcgctgctgggccgctccccttggaggccctgctcaggaggccctgaccgtggaaggggagaggaactcgaaagcacagctcctcccccagcccttgggaccatcttctcctgcagtcccctgggccccagtgagaggggcaggggcagggccggcagtaggtggggcctgtggtccccccactgccctgagggcattagctggtctaactgcccggaggcacccggccctgggccttaggcacctcaaggacttttctgctatttactgctcttattgttaaggataataattaaggatcatatgaataattaatgaagatgctgatgactatgaataataaataattatcctgaggaga

SEQ ID NO: 72 - DNA, 3884 bp, Homo sapiens
  source 1..3884: mol_type = genomic DNA
  misc_feature 1..3884: note = cDNA of KCNH2 gene SNP c.1330G>T (p.Glu444Ter)
atgccggtgcggaggggccacgtcgcgccgcagaacaccttcctggacaccatcatccgcaagtttgagggccagagccgtaagttcatcatcgccaacgctcgggtggagaactgcgccgtcatctactgcaacgacggcttctgcgagctgtgcggctactcgcgggccgaggtgatgcagcgaccctgcacctgcgacttcctgcacgggccgcgcacgcagcgccgcgctgccgcgcagatcgcgcaggcactgctgggcgccgaggagcgcaaagtggaaatcgccttctaccggaaagatgggagctgcttcctatgtctggtggatgtggtgcccgtgaagaacgaggatggggctgtcatcatgttcatcctcaatttcgaggtggtgatggagaaggacatggtggggtccccggctcatgacaccaaccaccggggcccccccaccagctggctggccccaggccgcgccaagaccttccgcctgaagctgcccgcgctgctggcgctgacggcccgggagtcgtcggtgcggtcgggcggcgcgggcggcgcgggcgccccgggggccgtggtggtggacgtggacctgacgcccgcggcacccagcagcgagtcgctggccctggacgaagtgacagccatggacaaccacgtggcagggctcgggcccgcggaggagcggcgtgcgctggtgggtcccggctctccgccccgcagcgcgcccggccagctcccatcgccccgggcgcacagcctcaaccccgacgcctcgggctccagctgcagcctggcccggacgcgctcccgagaaagctgcgccagcgtgcgccgcgcctcgtcggccgacgacatcgaggccatgcgcgccggggtgctgcccccgccaccgcgccacgccagcaccggggccatgcacccactgcgcagcggcttgctcaactccacctcggactccgacctcgtgcgctaccgcaccattagcaagattccccaaatcaccctcaactttgtggacctcaagggcgaccccttcttggcttcgcccaccagtgaccgtgagatcatagcacctaagataaaggagcgaacccacaatgtcactgagaaggtcacccaggtcctgtccctgggcgccgacgtgctgcctgagtacaagctgcaggcaccgcgcatccaccgctggaccatcctgcattacagccccttcaaggccgtgtgggactggctcatcctgctgctggtcatctacacggctgtcttcacaccctactcggctgccttcctgctgaaggagacggaagaaggcccgcctgctacctagtgtggctacgcctgccagccgctggctgtggtggacctcatcgtggacatcatgttcattgtggacatcctcatcaacttccgcaccacctacgtcaatgccaacgaggaggtggtcagccaccccggccgcatcgccgtccactacttcaagggctggttcctcatcgacatggtggccgccatccccttcgacctgctcatcttcggctctggctctgaggagctgatcgggctgctgaagactgcgcggctgctgcggctggtgcgcgtggcgcggaagctggatcgctactcagagtacggcgcggccgtgctgttcttgctcatgtgcacctttgcgctcatcgcgcactggctagcctgcatctggtacgccatcggcaacatggagcagccacacatggactcacgcatcggctggctgcacaacctgggcgaccagataggcaaaccctacaacagcagcggcctgggcggcccctccatcaaggacaagtatgtgacggcgctctacttcaccttcagcagcctcaccagtgtgggcttcggcaacgtctctcccaacaccaactcagagaagatcttctccatctgcgtcatgctcattggctccctcatgtatgctagcatcttcggcaacgtgtcggccatcatccagcggctgtactcgggcacagcccgctaccacacacagatgctgcgggtgcgggagttcatccgcttccaccagatccccaatcccctgcgccagcgcctcgaggagtacttccagcacgcctggtcctacaccaacggcatcgacatgaacgcggtgctgaagggcttccctgagtgcctgcaggctgacatctgcctgcacctgaaccgctcactgctgcagcactgcaaacccttccgaggggccaccaagggctgccttcgggccctggccatgaagttcaagaccacacatgcaccgccaggggacacactggtgcatgctggggacctgctcaccgccctgtacttcatctcccggggctccatcgagatcctgcggggcgacgtcgtcgtggccatcctggggaagaatgacatctttggggagcctctgaacctgtatgcaaggcctggcaagtcgaacggggatgtgcgggccctcacctactgtgacctacacaagatccatcgggacgacctgctggaggtgctggacatgtaccctgagttctccgaccacttctggtccagcctggagatcaccttcaacctgcgagataccaacatgatcccgggctcccccggcagtacggagttagagggtggcttcagtcggcaacgcaagcgcaagttgtccttccgcaggcgcacggacaaggacacggagcagccaggggaggtgtcggccttggggccgggccgggcgggggcagggccgagtagccggggccggccgggggggccgtggggggagagcccgtccagtggcccctccagccctgagagcagtgaggatgagggcccaggccgcagctccagccccctccgcctggtgcccttctccagccccaggccccccggagagccgccgggtggggagcccctgatggaggactgcgagaagagcagcgacacttgcaaccccctgtcaggcgccttctcaggagtgtccaacattttcagcttctggggggacagtcggggccgccagtaccaggagctccctcgatgccccgcccccacccccagcctcctcaacatccccctctccagcccgggtcggcggccccggggcgacgtggagagcaggctggatgccctccagcgccagctcaacaggctggagacccggctgagtgcagacatggccactgtcctgcagctgctacagaggcagatgacgctggtcccgcccgcctacagtgctgtgaccaccccggggcctggccccacttccacatccccgctgttgcccgtcagccccctccccaccctcaccttggactcgctttctcaggtttcccagttcatggcgtgtgaggagctgcccccgggggccccagagcttccccaagaaggccccacacgacgcctctccctaccgggccagctgggggccctcacctcccagcccctgcacagacacggctcggacccgggcagttagtggggctgcccagtgtggacacgtggctcacccagggatcaaggcgctgctgggccgctccccttggaggccctgctcaggaggccctgaccgtggaaggggagaggaactcgaaagcacagctcctcccccagcccttgggaccatcttctcctgcagtcccctgggccccagtgagaggggcaggggcagggccggcagtaggtggggcctgtggtccccccactgccctgagggcattagctggtctaactgcccggaggcacccggccctgggccttaggcacctcaaggacttttctgctatttactgctcttattgttaaggataataattaaggatcatatgaataattaatgaagatgctgatgactatgaataataaataattatcctgaggaga

SEQ ID NO: 73 - DNA, 3884 bp, Homo sapiens
  source 1..3884: mol_type = genomic DNA
  misc_feature 1..3884: note = cDNA of KCNH2 gene SNP c.1332G>C (p.Glu444Asp)
atgccggtgcggaggggccacgtcgcgccgcagaacaccttcctggacaccatcatccgcaagtttgagggccagagccgtaagttcatcatcgccaacgctcgggtggagaactgcgccgtcatctactgcaacgacggcttctgcgagctgtgcggctactcgcgggccgaggtgatgcagcgaccctgcacctgcgacttcctgcacgggccgcgcacgcagcgccgcgctgccgcgcagatcgcgcaggcactgctgggcgccgaggagcgcaaagtggaaatcgccttctaccggaaagatgggagctgcttcctatgtctggtggatgtggtgcccgtgaagaacgaggatggggctgtcatcatgttcatcctcaatttcgaggtggtgatggagaaggacatggtggggtccccggctcatgacaccaaccaccggggcccccccaccagctggctggccccaggccgcgccaagaccttccgcctgaagctgcccgcgctgctggcgctgacggcccgggagtcgtcggtgcggtcgggcggcgcgggcggcgcgggcgccccgggggccgtggtggtggacgtggacctgacgcccgcggcacccagcagcgagtcgctggccctggacgaagtgacagccatggacaaccacgtggcagggctcgggcccgcggaggagcggcgtgcgctggtgggtcccggctctccgccccgcagcgcgcccggccagctcccatcgccccgggcgcacagcctcaaccccgacgcctcgggctccagctgcagcctggcccggacgcgctcccgagaaagctgcgccagcgtgcgccgcgcctcgtcggccgacgacatcgaggccatgcgcgccggggtgctgcccccgccaccgcgccacgccagcaccggggccatgcacccactgcgcagcggcttgctcaactccacctcggactccgacctcgtgcgctaccgcaccattagcaagattccccaaatcaccctcaactttgtggacctcaagggcgaccccttcttggcttcgcccaccagtgaccgtgagatcatagcacctaagataaaggagcgaacccacaatgtcactgagaaggtcacccaggtcctgtccctgggcgccgacgtgctgcctgagtacaagctgcaggcaccgcgcatccaccgctggaccatcctgcattacagccccttcaaggccgtgtgggactggctcatcctgctgctggtcatctacacggctgtcttcacaccctactcggctgccttcctgctgaaggagacggaagaaggcccgcctgctaccgactgtggctacgcctgccagccgctggctgtggtggacctcatcgtggacatcatgttcattgtggacatcctcatcaacttccgcaccacctacgtcaatgccaacgaggaggtggtcagccaccccggccgcatcgccgtccactacttcaagggctggttcctcatcgacatggtggccgccatccccttcgacctgctcatcttcggctctggctctgaggagctgatcgggctgctgaagactgcgcggctgctgcggctggtgcgcgtggcgcggaagctggatcgctactcagagtacggcgcggccgtgctgttcttgctcatgtgcacctttgcgctcatcgcgcactggctagcctgcatctggtacgccatcggcaacatggagcagccacacatggactcacgcatcggctggctgcacaacctgggcgaccagataggcaaaccctacaacagcagcggcctgggcggcccctccatcaaggacaagtatgtgacggcgctctacttcaccttcagcagcctcaccagtgtgggcttcggcaacgtctctcccaacaccaactcagagaagatcttctccatctgcgtcatgctcattggctccctcatgtatgctagcatcttcggcaacgtgtcggccatcatccagcggctgtactcgggcacagcccgctaccacacacagatgctgcgggtgcgggagttcatccgcttccaccagatccccaatcccctgcgccagcgcctcgaggagtacttccagcacgcctggtcctacaccaacggcatcgacatgaacgcggtgctgaagggcttccctgagtgcctgcaggctgacatctgcctgcacctgaaccgctcactgctgcagcactgcaaacccttccgaggggccaccaagggctgccttcgggccctggccatgaagttcaagaccacacatgcaccgccaggggacacactggtgcatgctggggacctgctcaccgccctgtacttcatctcccggggctccatcgagatcctgcggggcgacgtcgtcgtggccatcctggggaagaatgacatctttggggagcctctgaacctgtatgcaaggcctggcaagtcgaacggggatgtgcgggccctcacctactgtgacctacacaagatccatcgggacgacctgctggaggtgctggacatgtaccctgagttctccgaccacttctggtccagcctggagatcaccttcaacctgcgagataccaacatgatcccgggctcccccggcagtacggagttagagggtggcttcagtcggcaacgcaagcgcaagttgtccttccgcaggcgcacggacaaggacacggagcagccaggggaggtgtcggccttggggccgggccgggcgggggcagggccgagtagccggggccggccgggggggccgtggggggagagcccgtccagtggcccctccagccctgagagcagtgaggatgagggcccaggccgcagctccagccccctccgcctggtgcccttctccagccccaggccccccggagagccgccgggtggggagcccctgatggaggactgcgagaagagcagcgacacttgcaaccccctgtcaggcgccttctcaggagtgtccaacattttcagcttctggggggacagtcggggccgccagtaccaggagctccctcgatgccccgcccccacccccagcctcctcaacatccccctctccagcccgggtcggcggccccggggcgacgtggagagcaggctggatgccctccagcgccagctcaacaggctggagacccggctgagtgcagacatggccactgtcctgcagctgctacagaggcagatgacgctggtcccgcccgcctacagtgctgtgaccaccccggggcctggccccacttccacatccccgctgttgcccgtcagccccctccccaccctcaccttggactcgctttctcaggtttcccagttcatggcgtgtgaggagctgcccccgggggccccagagcttccccaagaaggccccacacgacgcctctccctaccgggccagctgggggccctcacctcccagcccctgcacagacacggctcggacccgggcagttagtggggctgcccagtgtggacacgtggctcacccagggatcaaggcgctgctgggccgctccccttggaggccctgctcaggaggccctgaccgtggaaggggagaggaactcgaaagcacagctcctcccccagcccttgggaccatcttctcctgcagtcccctgggccccagtgagaggggcaggggcagggccggcagtaggtggggcctgtggtccccccactgccctgagggcattagctggtctaactgcccggaggcacccggccctgggccttaggcacctcaaggacttttctgctatttactgctcttattgttaaggataataattaaggatcatatgaataattaatgaagatgctgatgactatgaataataaataattatcctgaggaga

SEQ ID NO: 74 - DNA, 3884 bp, Homo sapiens
  source 1..3884: mol_type = genomic DNA
  misc_feature 1..3884: note = cDNA of KCNH2 gene SNP c.1332G>T (p.Glu444Asp)
atgccggtgcggaggggccacgtcgcgccgcagaacaccttcctggacaccatcatccgcaagtttgagggccagagccgtaagttcatcatcgccaacgctcgggtggagaactgcgccgtcatctactgcaacgacggcttctgcgagctgtgcggctactcgcgggccgaggtgatgcagcgaccctgcacctgcgacttcctgcacgggccgcgcacgcagcgccgcgctgccgcgcagatcgcgcaggcactgctgggcgccgaggagcgcaaagtggaaatcgccttctaccggaaagatgggagctgcttcctatgtctggtggatgtggtgcccgtgaagaacgaggatggggctgtcatcatgttcatcctcaatttcgaggtggtgatggagaaggacatggtggggtccccggctcatgacaccaaccaccggggcccccccaccagctggctggccccaggccgcgccaagaccttccgcctgaagctgcccgcgctgctggcgctgacggcccgggagtcgtcggtgcggtcgggcggcgcgggcggcgcgggcgccccgggggccgtggtggtggacgtggacctgacgcccgcggcacccagcagcgagtcgctggccctggacgaagtgacagccatggacaaccacgtggcagggctcgggcccgcggaggagcggcgtgcgctggtgggtcccggctctccgccccgcagcgcgcccggccagctcccatcgccccgggcgcacagcctcaaccccgacgcctcgggctccagctgcagcctggcccggacgcgctcccgagaaagctgcgccagcgtgcgccgcgcctcgtcggccgacgacatcgaggccatgcgcgccggggtgctgcccccgccaccgcgccacgccagcaccggggccatgcacccactgcgcagcggcttgctcaactccacctcggactccgacctcgtgcgctaccgcaccattagcaagattccccaaatcaccctcaactttgtggacctcaagggcgaccccttcttggcttcgcccaccagtgaccgtgagatcatagcacctaagataaaggagcgaacccacaatgtcactgagaaggtcacccaggtcctgtccctgggcgccgacgtgctgcctgagtacaagctgcaggcaccgcgcatccaccgctggaccatcctgcattacagccccttcaaggccgtgtgggactggctcatcctgctgctggtcatctacacggctgtcttcacaccctactcggctgccttcctgctgaaggagacggaagaaggcccgcctgctaccgattgtggctacgcctgccagccgctggctgtggtggacctcatcgtggacatcatgttcattgtggacatcctcatcaacttccgcaccacctacgtcaatgccaacgaggaggtggtcagccaccccggccgcatcgccgtccactacttcaagggctggttcctcatcgacatggtggccgccatccccttcgacctgctcatcttcggctctggctctgaggagctgatcgggctgctgaagactgcgcggctgctgcggctggtgcgcgtggcgcggaagctggatcgctactcagagtacggcgcggccgtgctgttcttgctcatgtgcacctttgcgctcatcgcgcactggctagcctgcatctggtacgccatcggcaacatggagcagccacacatggactcacgcatcggctggctgcacaacctgggcgaccagataggcaaaccctacaacagcagcggcctgggcggcccctccatcaaggacaagtatgtgacggcgctctacttcaccttcagcagcctcaccagtgtgggcttcggcaacgtctctcccaacaccaactcagagaagatcttctccatctgcgtcatgctcattggctccctcatgtatgctagcatcttcggcaacgtgtcggccatcatccagcggctgtactcgggcacagcccgctaccacacacagatgctgcgggtgcgggagttcatccgcttccaccagatccccaatcccctgcgccagcgcctcgaggagtacttccagcacgcctggtcctacaccaacggcatcgacatgaacgcggtgctgaagggcttccctgagtgcctgcaggctgacatctgcctgcacctgaaccgctcactgctgcagcactgcaaacccttccgaggggccaccaagggctgccttcgggccctggccatgaagttcaagaccacacatgcaccgccaggggacacactggtgcatgctggggacctgctcaccgccctgtacttcatctcccggggctccatcgagatcctgcggggcgacgtcgtcgtggccatcctggggaagaatgacatctttggggagcctctgaacctgtatgcaaggcctggcaagtcgaacggggatgtgcgggccctcacctactgtgacctacacaagatccatcgggacgacctgctggaggtgctggacatgtaccctgagttctccgaccacttctggtccagcctggagatcaccttcaacctgcgagataccaacatgatcccgggctcccccggcagtacggagttagagggtggcttcagtcggcaacgcaagcgcaagttgtccttccgcaggcgcacggacaaggacacggagcagccaggggaggtgtcggccttggggccgggccgggcgggggcagggccgagtagccggggccggccgggggggccgtggggggagagcccgtccagtggcccctccagccctgagagcagtgaggatgagggcccaggccgcagctccagccccctccgcctggtgcccttctccagccccaggccccccggagagccgccgggtggggagcccctgatggaggactgcgagaagagcagcgacacttgcaaccccctgtcaggcgccttctcaggagtgtccaacattttcagcttctggggggacagtcggggccgccagtaccaggagctccctcgatgccccgcccccacccccagcctcctcaacatccccctctccagcccgggtcggcggccccggggcgacgtggagagcaggctggatgccctccagcgccagctcaacaggctggagacccggctgagtgcagacatggccactgtcctgcagctgctacagaggcagatgacgctggtcccgcccgcctacagtgctgtgaccaccccggggcctggccccacttccacatccccgctgttgcccgtcagccccctccccaccctcaccttggactcgctttctcaggtttcccagttcatggcgtgtgaggagctgcccccgggggccccagagcttccccaagaaggccccacacgacgcctctccctaccgggccagctgggggccctcacctcccagcccctgcacagacacggctcggacccgggcagttagtggggctgcccagtgtggacacgtggctcacccagggatcaaggcgctgctgggccgctccccttggaggccctgctcaggaggccctgaccgtggaaggggagaggaactcgaaagcacagctcctcccccagcccttgggaccatcttctcctgcagtcccctgggccccagtgagaggggcaggggcagggccggcagtaggtggggcctgtggtccccccactgccctgagggcattagctggtctaactgcccggaggcacccggccctgggccttaggcacctcaaggacttttctgctatttactgctcttattgttaaggataataattaaggatcatatgaataattaatgaagatgctgatgactatgaataataaataattatcctgaggaga

SEQ ID NO: 75 - DNA, 3884 bp, Homo sapiens
  source 1..3884: mol_type = genomic DNA
  misc_feature 1..3884: note = cDNA of KCNH2 gene SNP c.133A>T (p.Asn45Tyr)
atgccggtgcggaggggccacgtcgcgccgcagaacaccttcctggacaccatcatccgcaagtttgagggccagagccgtaagttcatcatcgccaacgctcgggtggagaactgcgccgtcatctactgctacgacggcttctgcgagctgtgcggctactcgcgggccgaggtgatgcagcgaccctgcacctgcgacttcctgcacgggccgcgcacgcagcgccgcgctgccgcgcagatcgcgcaggcactgctgggcgccgaggagcgcaaagtggaaatcgccttctaccggaaagatgggagctgcttcctatgtctggtggatgtggtgcccgtgaagaacgaggatggggctgtcatcatgttcatcctcaatttcgaggtggtgatggagaaggacatggtggggtccccggctcatgacaccaaccaccggggcccccccaccagctggctggccccaggccgcgccaagaccttccgcctgaagctgcccgcgctgctggcgctgacggcccgggagtcgtcggtgcggtcgggcggcgcgggcggcgcgggcgccccgggggccgtggtggtggacgtggacctgacgcccgcggcacccagcagcgagtcgctggccctggacgaagtgacagccatggacaaccacgtggcagggctcgggcccgcggaggagcggcgtgcgctggtgggtcccggctctccgccccgcagcgcgcccggccagctcccatcgccccgggcgcacagcctcaaccccgacgcctcgggctccagctgcagcctggcccggacgcgctcccgagaaagctgcgccagcgtgcgccgcgcctcgtcggccgacgacatcgaggccatgcgcgccggggtgctgcccccgccaccgcgccacgccagcaccggggccatgcacccactgcgcagcggcttgctcaactccacctcggactccgacctcgtgcgctaccgcaccattagcaagattccccaaatcaccctcaactttgtggacctcaagggcgaccccttcttggcttcgcccaccagtgaccgtgagatcatagcacctaagataaaggagcgaacccacaatgtcactgagaaggtcacccaggtcctgtccctgggcgccgacgtgctgcctgagtacaagctgcaggcaccgcgcatccaccgctggaccatcctgcattacagccccttcaaggccgtgtgggactggctcatcctgctgctggtcatctacacggctgtcttcacaccctactcggctgccttcctgctgaaggagacggaagaaggcccgcctgctaccgagtgtggctacgcctgccagccgctggctgtggtggacctcatcgtggacatcatgttcattgtggacatcctcatcaacttccgcaccacctacgtcaatgccaacgaggaggtggtcagccaccccggccgcatcgccgtccactacttcaagggctggttcctcatcgacatggtggccgccatccccttcgacctgctcatcttcggctctggctctgaggagctgatcgggctgctgaagactgcgcggctgctgcggctggtgcgcgtggcgcggaagctggatcgctactcagagtacggcgcggccgtgctgttcttgctcatgtgcacctttgcgctcatcgcgcactggctagcctgcatctggtacgccatcggcaacatggagcagccacacatggactcacgcatcggctggctgcacaacctgggcgaccagataggcaaaccctacaacagcagcggcctgggcggcccctccatcaaggacaagtatgtgacggcgctctacttcaccttcagcagcctcaccagtgtgggcttcggcaacgtctctcccaacaccaactcagagaagatcttctccatctgcgtcatgctcattggctccctcatgtatgctagcatcttcggcaacgtgtcggccatcatccagcggctgtactcgggcacagcccgctaccacacacagatgctgcgggtgcgggagttcatccgcttccaccagatccccaatcccctgcgccagcgcctcgaggagtacttccagcacgcctggtcctacaccaacggcatcgacatgaacgcggtgctgaagggcttccctgagtgcctgcaggctgacatctgcctgcacctgaaccgctcactgctgcagcactgcaaacccttccgaggggccaccaagggctgccttcgggccctggccatgaagttcaagaccacacatgcaccgccaggggacacactggtgcatgctggggacctgctcaccgccctgtacttcatctcccggggctccatcgagatcctgcggggcgacgtcgtcgtggccatcctggggaagaatgacatctttggggagcctctgaacctgtatgcaaggcctggcaagtcgaacggggatgtgcgggccctcacctactgtgacctacacaagatccatcgggacgacctgctggaggtgctggacatgtaccctgagttctccgaccacttctggtccagcctggagatcaccttcaacctgcgagataccaacatgatcccgggctcccccggcagtacggagttagagggtggcttcagtcggcaacgcaagcgcaagttgtccttccgcaggcgcacggacaaggacacggagcagccaggggaggtgtcggccttggggccgggccgggcgggggcagggccgagtagccggggccggccgggggggccgtggggggagagcccgtccagtggcccctccagccctgagagcagtgaggatgagggcccaggccgcagctccagccccctccgcctggtgcccttctccagccccaggccccccggagagccgccgggtggggagcccctgatggaggactgcgagaagagcagcgacacttgcaaccccctgtcaggcgccttctcaggagtgtccaacattttcagcttctggggggacagtcggggccgccagtaccaggagctccctcgatgccccgcccccacccccagcctcctcaacatccccctctccagcccgggtcggcggccccggggcgacgtggagagcaggctggatgccctccagcgccagctcaacaggctggagacccggctgagtgcagacatggccactgtcctgcagctgctacagaggcagatgacgctggtcccgcccgcctacagtgctgtgaccaccccggggcctggccccacttccacatccccgctgttgcccgtcagccccctccccaccctcaccttggactcgctttctcaggtttcccagttcatggcgtgtgaggagctgcccccgggggccccagagcttccccaagaaggccccacacgacgcctctccctaccgggccagctgggggccctcacctcccagcccctgcacagacacggctcggacccgggcagttagtggggctgcccagtgtggacacgtggctcacccagggatcaaggcgctgctgggccgctccccttggaggccctgctcaggaggccctgaccgtggaaggggagaggaactcgaaagcacagctcctcccccagcccttgggaccatcttctcctgcagtcccctgggccccagtgagaggggcaggggcagggccggcagtaggtggggcctgtggtccccccactgccctgagggcattagctggtctaactgcccggaggcacccggccctgggccttaggcacctcaaggacttttctgctatttactgctcttattgttaaggataataattaaggatcatatgaataattaatgaagatgctgatgactatgaataataaataattatcctgaggaga

SEQ ID NO: 76 - DNA, 3884 bp, Homo sapiens
  source 1..3884: mol_type = genomic DNA
  misc_feature 1..3884: note = cDNA of KCNH2 gene SNP c.1342G>A (p.Ala448Thr)
atgccggtgcggaggggccacgtcgcgccgcagaacaccttcctggacaccatcatccgcaagtttgagggccagagccgtaagttcatcatcgccaacgctcgggtggagaactgcgccgtcatctactgcaacgacggcttctgcgagctgtgcggctactcgcgggccgaggtgatgcagcgaccctgcacctgcgacttcctgcacgggccgcgcacgcagcgccgcgctgccgcgcagatcgcgcaggcactgctgggcgccgaggagcgcaaagtggaaatcgccttctaccggaaagatgggagctgcttcctatgtctggtggatgtggtgcccgtgaagaacgaggatggggctgtcatcatgttcatcctcaatttcgaggtggtgatggagaaggacatggtggggtccccggctcatgacaccaaccaccggggcccccccaccagctggctggccccaggccgcgccaagaccttccgcctgaagctgcccgcgctgctggcgctgacggcccgggagtcgtcggtgcggtcgggcggcgcgggcggcgcgggcgccccgggggccgtggtggtggacgtggacctgacgcccgcggcacccagcagcgagtcgctggccctggacgaagtgacagccatggacaaccacgtggcagggctcgggcccgcggaggagcggcgtgcgctggtgggtcccggctctccgccccgcagcgcgcccggccagctcccatcgccccgggcgcacagcctcaaccccgacgcctcgggctccagctgcagcctggcccggacgcgctcccgagaaagctgcgccagcgtgcgccgcgcctcgtcggccgacgacatcgaggccatgcgcgccggggtgctgcccccgccaccgcgccacgccagcaccggggccatgcacccactgcgcagcggcttgctcaactccacctcggactccgacctcgtgcgctaccgcaccattagcaagattccccaaatcaccctcaactttgtggacctcaagggcgaccccttcttggcttcgcccaccagtgaccgtgagatcatagcacctaagataaaggagcgaacccacaatgtcactgagaaggtcacccaggtcctgtccctgggcgccgacgtgctgcctgagtacaagctgcaggcaccgcgcatccaccgctggaccatcctgcattacagccccttcaaggccgtgtgggactggctcatcctgctgctggtcatctacacggctgtcttcacaccctactcggctgccttcctgctgaaggagacggaagaaggcccgcctgctaccgagtgtggctacacctgccagccgctggctgtggtggacctcatcgtggacatcatgttcattgtggacatcctcatcaacttccgcaccacctacgtcaatgccaacgaggaggtggtcagccaccccggccgcatcgccgtccactacttcaagggctggttcctcatcgacatggtggccgccatccccttcgacctgctcatcttcggctctggctctgaggagctgatcgggctgctgaagactgcgcggctgctgcggctggtgcgcgtggcgcggaagctggatcgctactcagagtacggcgcggccgtgctgttcttgctcatgtgcacctttgcgctcatcgcgcactggctagcctgcatctggtacgccatcggcaacatggagcagccacacatggactcacgcatcggctggctgcacaacctgggcgaccagataggcaaaccctacaacagcagcggcctgggcggcccctccatcaaggacaagtatgtgacggcgctctacttcaccttcagcagcctcaccagtgtgggcttcggcaacgtctctcccaacaccaactcagagaagatcttctccatctgcgtcatgctcattggctccctcatgtatgctagcatcttcggcaacgtgtcggccatcatccagcggctgtactcgggcacagcccgctaccacacacagatgctgcgggtgcgggagttcatccgcttccaccagatccccaatcccctgcgccagcgcctcgaggagtacttccagcacgcctggtcctacaccaacggcatcgacatgaacgcggtgctgaagggcttccctgagtgcctgcaggctgacatctgcctgcacctgaaccgctcactgctgcagcactgcaaacccttccgaggggccaccaagggctgccttcgggccctggccatgaagttcaagaccacacatgcaccgccaggggacacactggtgcatgctggggacctgctcaccgccctgtacttcatctcccggggctccatcgagatcctgcggggcgacgtcgtcgtggccatcctggggaagaatgacatctttggggagcctctgaacctgtatgcaaggcctggcaagtcgaacggggatgtgcgggccctcacctactgtgacctacacaagatccatcgggacgacctgctggaggtgctggacatgtaccctgagttctccgaccacttctggtccagcctggagatcaccttcaacctgcgagataccaacatgatcccgggctcccccggcagtacggagttagagggtggcttcagtcggcaacgcaagcgcaagttgtccttccgcaggcgcacggacaaggacacggagcagccaggggaggtgtcggccttggggccgggccgggcgggggcagggccgagtagccggggccggccgggggggccgtggggggagagcccgtccagtggcccctccagccctgagagcagtgaggatgagggcccaggccgcagctccagccccctccgcctggtgcccttctccagccccaggccccccggagagccgccgggtggggagcccctgatggaggactgcgagaagagcagcgacacttgcaaccccctgtcaggcgccttctcaggagtgtccaacattttcagcttctggggggacagtcggggccgccagtaccaggagctccctcgatgccccgcccccacccccagcctcctcaacatccccctctccagcccgggtcggcggccccggggcgacgtggagagcaggctggatgccctccagcgccagctcaacaggctggagacccggctgagtgcagacatggccactgtcctgcagctgctacagaggcagatgacgctggtcccgcccgcctacagtgctgtgaccaccccggggcctggccccacttccacatccccgctgttgcccgtcagccccctccccaccctcaccttggactcgctttctcaggtttcccagttcatggcgtgtgaggagctgcccccgggggccccagagcttccccaagaaggccccacacgacgcctctccctaccgggccagctgggggccctcacctcccagcccctgcacagacacggctcggacccgggcagttagtggggctgcccagtgtggacacgtggctcacccagggatcaaggcgctgctgggccgctccccttggaggccctgctcaggaggccctgaccgtggaaggggagaggaactcgaaagcacagctcctcccccagcccttgggaccatcttctcctgcagtcccctgggccccagtgagaggggcaggggcagggccggcagtaggtggggcctgtggtccccccactgccctgagggcattagctggtctaactgcccggaggcacccggccctgggccttaggcacctcaaggacttttctgctatttactgctcttattgttaaggataataattaaggatcatatgaataattaatgaagatgctgatgactatgaataataaataattatcctgaggaga

SEQ ID NO: 77 - DNA, 3884 bp, Homo sapiens
  source 1..3884: mol_type = genomic DNA
  misc_feature 1..3884: note = cDNA of KCNH2 gene SNP c.1342G>T (p.Ala448Ser)
atgccggtgcggaggggccacgtcgcgccgcagaacaccttcctggacaccatcatccgcaagtttgagggccagagccgtaagttcatcatcgccaacgctcgggtggagaactgcgccgtcatctactgcaacgacggcttctgcgagctgtgcggctactcgcgggccgaggtgatgcagcgaccctgcacctgcgacttcctgcacgggccgcgcacgcagcgccgcgctgccgcgcagatcgcgcaggcactgctgggcgccgaggagcgcaaagtggaaatcgccttctaccggaaagatgggagctgcttcctatgtctggtggatgtggtgcccgtgaagaacgaggatggggctgtcatcatgttcatcctcaatttcgaggtggtgatggagaaggacatggtggggtccccggctcatgacaccaaccaccggggcccccccaccagctggctggccccaggccgcgccaagaccttccgcctgaagctgcccgcgctgctggcgctgacggcccgggagtcgtcggtgcggtcgggcggcgcgggcggcgcgggcgccccgggggccgtggtggtggacgtggacctgacgcccgcggcacccagcagcgagtcgctggccctggacgaagtgacagccatggacaaccacgtggcagggctcgggcccgcggaggagcggcgtgcgctggtgggtcccggctctccgccccgcagcgcgcccggccagctcccatcgccccgggcgcacagcctcaaccccgacgcctcgggctccagctgcagcctggcccggacgcgctcccgagaaagctgcgccagcgtgcgccgcgcctcgtcggccgacgacatcgaggccatgcgcgccggggtgctgcccccgccaccgcgccacgccagcaccggggccatgcacccactgcgcagcggcttgctcaactccacctcggactccgacctcgtgcgctaccgcaccattagcaagattccccaaatcaccctcaactttgtggacctcaagggcgaccccttcttggcttcgcccaccagtgaccgtgagatcatagcacctaagataaaggagcgaacccacaatgtcactgagaaggtcacccaggtcctgtccctgggcgccgacgtgctgcctgagtacaagctgcaggcaccgcgcatccaccgctggaccatcctgcattacagccccttcaaggccgtgtgggactggctcatcctgctgctggtcatctacacggctgtcttcacaccctactcggctgccttcctgctgaaggagacggaagaaggcccgcctgctaccgagtgtggctactcctgccagccgctggctgtggtggacctcatcgtggacatcatgttcattgtggacatcctcatcaacttccgcaccacctacgtcaatgccaacgaggaggtggtcagccaccccggccgcatcgccgtccactacttcaagggctggttcctcatcgacatggtggccgccatccccttcgacctgctcatcttcggctctggctctgaggagctgatcgggctgctgaagactgcgcggctgctgcggctggtgcgcgtggcgcggaagctggatcgctactcagagtacggcgcggccgtgctgttcttgctcatgtgcacctttgcgctcatcgcgcactggctagcctgcatctggtacgccatcggcaacatggagcagccacacatggactcacgcatcggctggctgcacaacctgggcgaccagataggcaaaccctacaacagcagcggcctgggcggcccctccatcaaggacaagtatgtgacggcgctctacttcaccttcagcagcctcaccagtgtgggcttcggcaacgtctctcccaacaccaactcagagaagatcttctccatctgcgtcatgctcattggctccctcatgtatgctagcatcttcggcaacgtgtcggccatcatccagcggctgtactcgggcacagcccgctaccacacacagatgctgcgggtgcgggagttcatccgcttccaccagatccccaatcccctgcgccagcgcctcgaggagtacttccagcacgcctggtcctacaccaacggcatcgacatgaacgcggtgctgaagggcttccctgagtgcctgcaggctgacatctgcctgcacctgaaccgctcactgctgcagcactgcaaacccttccgaggggccaccaagggctgccttcgggccctggccatgaagttcaagaccacacatgcaccgccaggggacacactggtgcatgctggggacctgctcaccgccctgtacttcatctcccggggctccatcgagatcctgcggggcgacgtcgtcgtggccatcctggggaagaatgacatctttggggagcctctgaacctgtatgcaaggcctggcaagtcgaacggggatgtgcgggccctcacctactgtgacctacacaagatccatcgggacgacctgctggaggtgctggacatgtaccctgagttctccgaccacttctggtccagcctggagatcaccttcaacctgcgagataccaacatgatcccgggctcccccggcagtacggagttagagggtggcttcagtcggcaacgcaagcgcaagttgtccttccgcaggcgcacggacaaggacacggagcagccaggggaggtgtcggccttggggccgggccgggcgggggcagggccgagtagccggggccggccgggggggccgtggggggagagcccgtccagtggcccctccagccctgagagcagtgaggatgagggcccaggccgcagctccagccccctccgcctggtgcccttctccagccccaggccccccggagagccgccgggtggggagcccctgatggaggactgcgagaagagcagcgacacttgcaaccccctgtcaggcgccttctcaggagtgtccaacattttcagcttctggggggacagtcggggccgccagtaccaggagctccctcgatgccccgcccccacccccagcctcctcaacatccccctctccagcccgggtcggcggccccggggcgacgtggagagcaggctggatgccctccagcgccagctcaacaggctggagacccggctgagtgcagacatggccactgtcctgcagctgctacagaggcagatgacgctggtcccgcccgcctacagtgctgtgaccaccccggggcctggccccacttccacatccccgctgttgcccgtcagccccctccccaccctcaccttggactcgctttctcaggtttcccagttcatggcgtgtgaggagctgcccccgggggccccagagcttccccaagaaggccccacacgacgcctctccctaccgggccagctgggggccctcacctcccagcccctgcacagacacggctcggacccgggcagttagtggggctgcccagtgtggacacgtggctcacccagggatcaaggcgctgctgggccgctccccttggaggccctgctcaggaggccctgaccgtggaaggggagaggaactcgaaagcacagctcctcccccagcccttgggaccatcttctcctgcagtcccctgggccccagtgagaggggcaggggcagggccggcagtaggtggggcctgtggtccccccactgccctgagggcattagctggtctaactgcccggaggcacccggccctgggccttaggcacctcaaggacttttctgctatttactgctcttattgttaaggataataattaaggatcatatgaataattaatgaagatgctgatgactatgaataataaataattatcctgaggaga

SEQ ID NO: 78 - DNA, 3884 bp, Homo sapiens
  source 1..3884: mol_type = genomic DNA
  misc_feature 1..3884: note = cDNA of KCNH2 gene SNP c.1348C>T (p.Gln450Ter)
atgccggtgcggaggggccacgtcgcgccgcagaacaccttcctggacaccatcatccgcaagtttgagggccagagccgtaagttcatcatcgccaacgctcgggtggagaactgcgccgtcatctactgcaacgacggcttctgcgagctgtgcggctactcgcgggccgaggtgatgcagcgaccctgcacctgcgacttcctgcacgggccgcgcacgcagcgccgcgctgccgcgcagatcgcgcaggcactgctgggcgccgaggagcgcaaagtggaaatcgccttctaccggaaagatgggagctgcttcctatgtctggtggatgtggtgcccgtgaagaacgaggatggggctgtcatcatgttcatcctcaatttcgaggtggtgatggagaaggacatggtggggtccccggctcatgacaccaaccaccggggcccccccaccagctggctggccccaggccgcgccaagaccttccgcctgaagctgcccgcgctgctggcgctgacggcccgggagtcgtcggtgcggtcgggcggcgcgggcggcgcgggcgccccgggggccgtggtggtggacgtggacctgacgcccgcggcacccagcagcgagtcgctggccctggacgaagtgacagccatggacaaccacgtggcagggctcgggcccgcggaggagcggcgtgcgctggtgggtcccggctctccgccccgcagcgcgcccggccagctcccatcgccccgggcgcacagcctcaaccccgacgcctcgggctccagctgcagcctggcccggacgcgctcccgagaaagctgcgccagcgtgcgccgcgcctcgtcggccgacgacatcgaggccatgcgcgccggggtgctgcccccgccaccgcgccacgccagcaccggggccatgcacccactgcgcagcggcttgctcaactccacctcggactccgacctcgtgcgctaccgcaccattagcaagattccccaaatcaccctcaactttgtggacctcaagggcgaccccttcttggcttcgcccaccagtgaccgtgagatcatagcacctaagataaaggagcgaacccacaatgtcactgagaaggtcacccaggtcctgtccctgggcgccgacgtgctgcctgagtacaagctgcaggcaccgcgcatccaccgctggaccatcctgcattacagccccttcaaggccgtgtgggactggctcatcctgctgctggtcatctacacggctgtcttcacaccctactcggctgccttcctgctgaaggagacggaagaaggcccgcctgctaccgagtgtggctacgcctgctagccgctggctgtggtggacctcatcgtggacatcatgttcattgtggacatcctcatcaacttccgcaccacctacgtcaatgccaacgaggaggtggtcagccaccccggccgcatcgccgtccactacttcaagggctggttcctcatcgacatggtggccgccatccccttcgacctgctcatcttcggctctggctctgaggagctgatcgggctgctgaagactgcgcggctgctgcggctggtgcgcgtggcgcggaagctggatcgctactcagagtacggcgcggccgtgctgttcttgctcatgtgcacctttgcgctcatcgcgcactggctagcctgcatctggtacgccatcggcaacatggagcagccacacatggactcacgcatcggctggctgcacaacctgggcgaccagataggcaaaccctacaacagcagcggcctgggcggcccctccatcaaggacaagtatgtgacggcgctctacttcaccttcagcagcctcaccagtgtgggcttcggcaacgtctctcccaacaccaactcagagaagatcttctccatctgcgtcatgctcattggctccctcatgtatgctagcatcttcggcaacgtgtcggccatcatccagcggctgtactcgggcacagcccgctaccacacacagatgctgcgggtgcgggagttcatccgcttccaccagatccccaatcccctgcgccagcgcctcgaggagtacttccagcacgcctggtcctacaccaacggcatcgacatgaacgcggtgctgaagggcttccctgagtgcctgcaggctgacatctgcctgcacctgaaccgctcactgctgcagcactgcaaacccttccgaggggccaccaagggctgccttcgggccctggccatgaagttcaagaccacacatgcaccgccaggggacacactggtgcatgctggggacctgctcaccgccctgtacttcatctcccggggctccatcgagatcctgcggggcgacgtcgtcgtggccatcctggggaagaatgacatctttggggagcctctgaacctgtatgcaaggcctggcaagtcgaacggggatgtgcgggccctcacctactgtgacctacacaagatccatcgggacgacctgctggaggtgctggacatgtaccctgagttctccgaccacttctggtccagcctggagatcaccttcaacctgcgagataccaacatgatcccgggctcccccggcagtacggagttagagggtggcttcagtcggcaacgcaagcgcaagttgtccttccgcaggcgcacggacaaggacacggagcagccaggggaggtgtcggccttggggccgggccgggcgggggcagggccgagtagccggggccggccgggggggccgtggggggagagcccgtccagtggcccctccagccctgagagcagtgaggatgagggcccaggccgcagctccagccccctccgcctggtgcccttctccagccccaggccccccggagagccgccgggtggggagcccctgatggaggactgcgagaagagcagcgacacttgcaaccccctgtcaggcgccttctcaggagtgtccaacattttcagcttctggggggacagtcggggccgccagtaccaggagctccctcgatgccccgcccccacccccagcctcctcaacatccccctctccagcccgggtcggcggccccggggcgacgtggagagcaggctggatgccctccagcgccagctcaacaggctggagacccggctgagtgcagacatggccactgtcctgcagctgctacagaggcagatgacgctggtcccgcccgcctacagtgctgtgaccaccccggggcctggccccacttccacatccccgctgttgcccgtcagccccctccccaccctcaccttggactcgctttctcaggtttcccagttcatggcgtgtgaggagctgcccccgggggccccagagcttccccaagaaggccccacacgacgcctctccctaccgggccagctgggggccctcacctcccagcccctgcacagacacggctcggacccgggcagttagtggggctgcccagtgtggacacgtggctcacccagggatcaaggcgctgctgggccgctccccttggaggccctgctcaggaggccctgaccgtggaaggggagaggaactcgaaagcacagctcctcccccagcccttgggaccatcttctcctgcagtcccctgggccccagtgagaggggcaggggcagggccggcagtaggtggggcctgtggtccccccactgccctgagggcattagctggtctaactgcccggaggcacccggccctgggccttaggcacctcaaggacttttctgctatttactgctcttattgttaaggataataattaaggatcatatgaataattaatgaagatgctgatgactatgaataataaataattatcctgaggaga

SEQ ID NO: 79 - DNA, 3884 bp, Homo sapiens
  source 1..3884: mol_type = genomic DNA
  misc_feature 1..3884: note = cDNA of KCNH2 gene SNP c.134A>C (p.Asn45Thr)
atgccggtgcggaggggccacgtcgcgccgcagaacaccttcctggacaccatcatccgcaagtttgagggccagagccgtaagttcatcatcgccaacgctcgggtggagaactgcgccgtcatctactgcaccgacggcttctgcgagctgtgcggctactcgcgggccgaggtgatgcagcgaccctgcacctgcgacttcctgcacgggccgcgcacgcagcgccgcgctgccgcgcagatcgcgcaggcactgctgggcgccgaggagcgcaaagtggaaatcgccttctaccggaaagatgggagctgcttcctatgtctggtggatgtggtgcccgtgaagaacgaggatggggctgtcatcatgttcatcctcaatttcgaggtggtgatggagaaggacatggtggggtccccggctcatgacaccaaccaccggggcccccccaccagctggctggccccaggccgcgccaagaccttccgcctgaagctgcccgcgctgctggcgctgacggcccgggagtcgtcggtgcggtcgggcggcgcgggcggcgcgggcgccccgggggccgtggtggtggacgtggacctgacgcccgcggcacccagcagcgagtcgctggccctggacgaagtgacagccatggacaaccacgtggcagggctcgggcccgcggaggagcggcgtgcgctggtgggtcccggctctccgccccgcagcgcgcccggccagctcccatcgccccgggcgcacagcctcaaccccgacgcctcgggctccagctgcagcctggcccggacgcgctcccgagaaagctgcgccagcgtgcgccgcgcctcgtcggccgacgacatcgaggccatgcgcgccggggtgctgcccccgccaccgcgccacgccagcaccggggccatgcacccactgcgcagcggcttgctcaactccacctcggactccgacctcgtgcgctaccgcaccattagcaagattccccaaatcaccctcaactttgtggacctcaagggcgaccccttcttggcttcgcccaccagtgaccgtgagatcatagcacctaagataaaggagcgaacccacaatgtcactgagaaggtcacccaggtcctgtccctgggcgccgacgtgctgcctgagtacaagctgcaggcaccgcgcatccaccgctggaccatcctgcattacagccccttcaaggccgtgtgggactggctcatcctgctgctggtcatctacacggctgtcttcacaccctactcggctgccttcctgctgaaggagacggaagaaggcccgcctgctaccgagtgtggctacgcctgccagccgctggctgtggtggacctcatcgtggacatcatgttcattgtggacatcctcatcaacttccgcaccacctacgtcaatgccaacgaggaggtggtcagccaccccggccgcatcgccgtccactacttcaagggctggttcctcatcgacatggtggccgccatccccttcgacctgctcatcttcggctctggctctgaggagctgatcgggctgctgaagactgcgcggctgctgcggctggtgcgcgtggcgcggaagctggatcgctactcagagtacggcgcggccgtgctgttcttgctcatgtgcacctttgcgctcatcgcgcactggctagcctgcatctggtacgccatcggcaacatggagcagccacacatggactcacgcatcggctggctgcacaacctgggcgaccagataggcaaaccctacaacagcagcggcctgggcggcccctccatcaaggacaagtatgtgacggcgctctacttcaccttcagcagcctcaccagtgtgggcttcggcaacgtctctcccaacaccaactcagagaagatcttctccatctgcgtcatgctcattggctccctcatgtatgctagcatcttcggcaacgtgtcggccatcatccagcggctgtactcgggcacagcccgctaccacacacagatgctgcgggtgcgggagttcatccgcttccaccagatccccaatcccctgcgccagcgcctcgaggagtacttccagcacgcctggtcctacaccaacggcatcgacatgaacgcggtgctgaagggcttccctgagtgcctgcaggctgacatctgcctgcacctgaaccgctcactgctgcagcactgcaaacccttccgaggggccaccaagggctgccttcgggccctggccatgaagttcaagaccacacatgcaccgccaggggacacactggtgcatgctggggacctgctcaccgccctgtacttcatctcccggggctccatcgagatcctgcggggcgacgtcgtcgtggccatcctggggaagaatgacatctttggggagcctctgaacctgtatgcaaggcctggcaagtcgaacggggatgtgcgggccctcacctactgtgacctacacaagatccatcgggacgacctgctggaggtgctggacatgtaccctgagttctccgaccacttctggtccagcctggagatcaccttcaacctgcgagataccaacatgatcccgggctcccccggcagtacggagttagagggtggcttcagtcggcaacgcaagcgcaagttgtccttccgcaggcgcacggacaaggacacggagcagccaggggaggtgtcggccttggggccgggccgggcgggggcagggccgagtagccggggccggccgggggggccgtggggggagagcccgtccagtggcccctccagccctgagagcagtgaggatgagggcccaggccgcagctccagccccctccgcctggtgcccttctccagccccaggccccccggagagccgccgggtggggagcccctgatggaggactgcgagaagagcagcgacacttgcaaccccctgtcaggcgccttctcaggagtgtccaacattttcagcttctggggggacagtcggggccgccagtaccaggagctccctcgatgccccgcccccacccccagcctcctcaacatccccctctccagcccgggtcggcggccccggggcgacgtggagagcaggctggatgccctccagcgccagctcaacaggctggagacccggctgagtgcagacatggccactgtcctgcagctgctacagaggcagatgacgctggtcccgcccgcctacagtgctgtgaccaccccggggcctggccccacttccacatccccgctgttgcccgtcagccccctccccaccctcaccttggactcgctttctcaggtttcccagttcatggcgtgtgaggagctgcccccgggggccccagagcttccccaagaaggccccacacgacgcctctccctaccgggccagctgggggccctcacctcccagcccctgcacagacacggctcggacccgggcagttagtggggctgcccagtgtggacacgtggctcacccagggatcaaggcgctgctgggccgctccccttggaggccctgctcaggaggccctgaccgtggaaggggagaggaactcgaaagcacagctcctcccccagcccttgggaccatcttctcctgcagtcccctgggccccagtgagaggggcaggggcagggccggcagtaggtggggcctgtggtccccccactgccctgagggcattagctggtctaactgcccggaggcacccggccctgggccttaggcacctcaaggacttttctgctatttactgctcttattgttaaggataataattaaggatcatatgaataattaatgaagatgctgatgactatgaataataaataattatcctgaggaga

SEQ ID NO: 80 - DNA, 3884 bp, Homo sapiens
  source 1..3884: mol_type = genomic DNA
  misc_feature 1..3884: note = cDNA of KCNH2 gene SNP c.1352C>T (p.Pro451Leu)
atgccggtgcggaggggccacgtcgcgccgcagaacaccttcctggacaccatcatccgcaagtttgagggccagagccgtaagttcatcatcgccaacgctcgggtggagaactgcgccgtcatctactgcaacgacggcttctgcgagctgtgcggctactcgcgggccgaggtgatgcagcgaccctgcacctgcgacttcctgcacgggccgcgcacgcagcgccgcgctgccgcgcagatcgcgcaggcactgctgggcgccgaggagcgcaaagtggaaatcgccttctaccggaaagatgggagctgcttcctatgtctggtggatgtggtgcccgtgaagaacgaggatggggctgtcatcatgttcatcctcaatttcgaggtggtgatggagaaggacatggtggggtccccggctcatgacaccaaccaccggggcccccccaccagctggctggccccaggccgcgccaagaccttccgcctgaagctgcccgcgctgctggcgctgacggcccgggagtcgtcggtgcggtcgggcggcgcgggcggcgcgggcgccccgggggccgtggtggtggacgtggacctgacgcccgcggcacccagcagcgagtcgctggccctggacgaagtgacagccatggacaaccacgtggcagggctcgggcccgcggaggagcggcgtgcgctggtgggtcccggctctccgccccgcagcgcgcccggccagctcccatcgccccgggcgcacagcctcaaccccgacgcctcgggctccagctgcagcctggcccggacgcgctcccgagaaagctgcgccagcgtgcgccgcgcctcgtcggccgacgacatcgaggccatgcgcgccggggtgctgcccccgccaccgcgccacgccagcaccggggccatgcacccactgcgcagcggcttgctcaactccacctcggactccgacctcgtgcgctaccgcaccattagcaagattccccaaatcaccctcaactttgtggacctcaagggcgaccccttcttggcttcgcccaccagtgaccgtgagatcatagcacctaagataaaggagcgaacccacaatgtcactgagaaggtcacccaggtcctgtccctgggcgccgacgtgctgcctgagtacaagctgcaggcaccgcgcatccaccgctggaccatcctgcattacagccccttcaaggccgtgtgggactggctcatcctgctgctggtcatctacacggctgtcttcacaccctactcggctgccttcctgctgaaggagacggaagaaggcccgcctgctaccgagtgtggctacgcctgccagctgctggctgtggtggacctcatcgtggacatcatgttcattgtggacatcctcatcaacttccgcaccacctacgtcaatgccaacgaggaggtggtcagccaccccggccgcatcgccgtccactacttcaagggctggttcctcatcgacatggtggccgccatccccttcgacctgctcatcttcggctctggctctgaggagctgatcgggctgctgaagactgcgcggctgctgcggctggtgcgcgtggcgcggaagctggatcgctactcagagtacggcgcggccgtgctgttcttgctcatgtgcacctttgcgctcatcgcgcactggctagcctgcatctggtacgccatcggcaacatggagcagccacacatggactcacgcatcggctggctgcacaacctgggcgaccagataggcaaaccctacaacagcagcggcctgggcggcccctccatcaaggacaagtatgtgacggcgctctacttcaccttcagcagcctcaccagtgtgggcttcggcaacgtctctcccaacaccaactcagagaagatcttctccatctgcgtcatgctcattggctccctcatgtatgctagcatcttcggcaacgtgtcggccatcatccagcggctgtactcgggcacagcccgctaccacacacagatgctgcgggtgcgggagttcatccgcttccaccagatccccaatcccctgcgccagcgcctcgaggagtacttccagcacgcctggtcctacaccaacggcatcgacatgaacgcggtgctgaagggcttccctgagtgcctgcaggctgacatctgcctgcacctgaaccgctcactgctgcagcactgcaaacccttccgaggggccaccaagggctgccttcgggccctggccatgaagttcaagaccacacatgcaccgccaggggacacactggtgcatgctggggacctgctcaccgccctgtacttcatctcccggggctccatcgagatcctgcggggcgacgtcgtcgtggccatcctggggaagaatgacatctttggggagcctctgaacctgtatgcaaggcctggcaagtcgaacggggatgtgcgggccctcacctactgtgacctacacaagatccatcgggacgacctgctggaggtgctggacatgtaccctgagttctccgaccacttctggtccagcctggagatcaccttcaacctgcgagataccaacatgatcccgggctcccccggcagtacggagttagagggtggcttcagtcggcaacgcaagcgcaagttgtccttccgcaggcgcacggacaaggacacggagcagccaggggaggtgtcggccttggggccgggccgggcgggggcagggccgagtagccggggccggccgggggggccgtggggggagagcccgtccagtggcccctccagccctgagagcagtgaggatgagggcccaggccgcagctccagccccctccgcctggtgcccttctccagccccaggccccccggagagccgccgggtggggagcccctgatggaggactgcgagaagagcagcgacacttgcaaccccctgtcaggcgccttctcaggagtgtccaacattttcagcttctggggggacagtcggggccgccagtaccaggagctccctcgatgccccgcccccacccccagcctcctcaacatccccctctccagcccgggtcggcggccccggggcgacgtggagagcaggctggatgccctccagcgccagctcaacaggctggagacccggctgagtgcagacatggccactgtcctgcagctgctacagaggcagatgacgctggtcccgcccgcctacagtgctgtgaccaccccggggcctggccccacttccacatccccgctgttgcccgtcagccccctccccaccctcaccttggactcgctttctcaggtttcccagttcatggcgtgtgaggagctgcccccgggggccccagagcttccccaagaaggccccacacgacgcctctccctaccgggccagctgggggccctcacctcccagcccctgcacagacacggctcggacccgggcagttagtggggctgcccagtgtggacacgtggctcacccagggatcaaggcgctgctgggccgctccccttggaggccctgctcaggaggccctgaccgtggaaggggagaggaactcgaaagcacagctcctcccccagcccttgggaccatcttctcctgcagtcccctgggccccagtgagaggggcaggggcagggccggcagtaggtggggcctgtggtccccccactgccctgagggcattagctggtctaactgcccggaggcacccggccctgggccttaggcacctcaaggacttttctgctatttactgctcttattgttaaggataataattaaggatcatatgaataattaatgaagatgctgatgactatgaataataaataattatcctgaggaga

SEQ ID NO: 81 - DNA, 3884 bp, Homo sapiens
  source 1..3884: mol_type = genomic DNA
  misc_feature 1..3884: note = cDNA of KCNH2 gene SNP c.1357G>A (p.Ala453Thr)
atgccggtgcggaggggccacgtcgcgccgcagaacaccttcctggacaccatcatccgcaagtttgagggccagagccgtaagttcatcatcgccaacgctcgggtggagaactgcgccgtcatctactgcaacgacggcttctgcgagctgtgcggctactcgcgggccgaggtgatgcagcgaccctgcacctgcgacttcctgcacgggccgcgcacgcagcgccgcgctgccgcgcagatcgcgcaggcactgctgggcgccgaggagcgcaaagtggaaatcgccttctaccggaaagatgggagctgcttcctatgtctggtggatgtggtgcccgtgaagaacgaggatggggctgtcatcatgttcatcctcaatttcgaggtggtgatggagaaggacatggtggggtccccggctcatgacaccaaccaccggggcccccccaccagctggctggccccaggccgcgccaagaccttccgcctgaagctgcccgcgctgctggcgctgacggcccgggagtcgtcggtgcggtcgggcggcgcgggcggcgcgggcgccccgggggccgtggtggtggacgtggacctgacgcccgcggcacccagcagcgagtcgctggccctggacgaagtgacagccatggacaaccacgtggcagggctcgggcccgcggaggagcggcgtgcgctggtgggtcccggctctccgccccgcagcgcgcccggccagctcccatcgccccgggcgcacagcctcaaccccgacgcctcgggctccagctgcagcctggcccggacgcgctcccgagaaagctgcgccagcgtgcgccgcgcctcgtcggccgacgacatcgaggccatgcgcgccggggtgctgcccccgccaccgcgccacgccagcaccggggccatgcacccactgcgcagcggcttgctcaactccacctcggactccgacctcgtgcgctaccgcaccattagcaagattccccaaatcaccctcaactttgtggacctcaagggcgaccccttcttggcttcgcccaccagtgaccgtgagatcatagcacctaagataaaggagcgaacccacaatgtcactgagaaggtcacccaggtcctgtccctgggcgccgacgtgctgcctgagtacaagctgcaggcaccgcgcatccaccgctggaccatcctgcattacagccccttcaaggccgtgtgggactggctcatcctgctgctggtcatctacacggctgtcttcacaccctactcggctgccttcctgctgaaggagacggaagaaggcccgcctgctaccgagtgtggctacgcctgccagccgctgactgtggtggacctcatcgtggacatcatgttcattgtggacatcctcatcaacttccgcaccacctacgtcaatgccaacgaggaggtggtcagccaccccggccgcatcgccgtccactacttcaagggctggttcctcatcgacatggtggccgccatccccttcgacctgctcatcttcggctctggctctgaggagctgatcgggctgctgaagactgcgcggctgctgcggctggtgcgcgtggcgcggaagctggatcgctactcagagtacggcgcggccgtgctgttcttgctcatgtgcacctttgcgctcatcgcgcactggctagcctgcatctggtacgccatcggcaacatggagcagccacacatggactcacgcatcggctggctgcacaacctgggcgaccagataggcaaaccctacaacagcagcggcctgggcggcccctccatcaaggacaagtatgtgacggcgctctacttcaccttcagcagcctcaccagtgtgggcttcggcaacgtctctcccaacaccaactcagagaagatcttctccatctgcgtcatgctcattggctccctcatgtatgctagcatcttcggcaacgtgtcggccatcatccagcggctgtactcgggcacagcccgctaccacacacagatgctgcgggtgcgggagttcatccgcttccaccagatccccaatcccctgcgccagcgcctcgaggagtacttccagcacgcctggtcctacaccaacggcatcgacatgaacgcggtgctgaagggcttccctgagtgcctgcaggctgacatctgcctgcacctgaaccgctcactgctgcagcactgcaaacccttccgaggggccaccaagggctgccttcgggccctggccatgaagttcaagaccacacatgcaccgccaggggacacactggtgcatgctggggacctgctcaccgccctgtacttcatctcccggggctccatcgagatcctgcggggcgacgtcgtcgtggccatcctggggaagaatgacatctttggggagcctctgaacctgtatgcaaggcctggcaagtcgaacggggatgtgcgggccctcacctactgtgacctacacaagatccatcgggacgacctgctggaggtgctggacatgtaccctgagttctccgaccacttctggtccagcctggagatcaccttcaacctgcgagataccaacatgatcccgggctcccccggcagtacggagttagagggtggcttcagtcggcaacgcaagcgcaagttgtccttccgcaggcgcacggacaaggacacggagcagccaggggaggtgtcggccttggggccgggccgggcgggggcagggccgagtagccggggccggccgggggggccgtggggggagagcccgtccagtggcccctccagccctgagagcagtgaggatgagggcccaggccgcagctccagccccctccgcctggtgcccttctccagccccaggccccccggagagccgccgggtggggagcccctgatggaggactgcgagaagagcagcgacacttgcaaccccctgtcaggcgccttctcaggagtgtccaacattttcagcttctggggggacagtcggggccgccagtaccaggagctccctcgatgccccgcccccacccccagcctcctcaacatccccctctccagcccgggtcggcggccccggggcgacgtggagagcaggctggatgccctccagcgccagctcaacaggctggagacccggctgagtgcagacatggccactgtcctgcagctgctacagaggcagatgacgctggtcccgcccgcctacagtgctgtgaccaccccggggcctggccccacttccacatccccgctgttgcccgtcagccccctccccaccctcaccttggactcgctttctcaggtttcccagttcatggcgtgtgaggagctgcccccgggggccccagagcttccccaagaaggccccacacgacgcctctccctaccgggccagctgggggccctcacctcccagcccctgcacagacacggctcggacccgggcagttagtggggctgcccagtgtggacacgtggctcacccagggatcaaggcgctgctgggccgctccccttggaggccctgctcaggaggccctgaccgtggaaggggagaggaactcgaaagcacagctcctcccccagcccttgggaccatcttctcctgcagtcccctgggccccagtgagaggggcaggggcagggccggcagtaggtggggcctgtggtccccccactgccctgagggcattagctggtctaactgcccggaggcacccggccctgggccttaggcacctcaaggacttttctgctatttactgctcttattgttaaggataataattaaggatcatatgaataattaatgaagatgctgatgactatgaataataaataattatcctgaggaga

SEQ ID NO: 82 - DNA, 3884 bp, Homo sapiens
  source 1..3884: mol_type = genomic DNA
  misc_feature 1..3884: note = cDNA of KCNH2 gene SNP c.135C>A (p.Asn45Lys)
atgccggtgcggaggggccacgtcgcgccgcagaacaccttcctggacaccatcatccgcaagtttgagggccagagccgtaagttcatcatcgccaacgctcgggtggagaactgcgccgtcatctactgcaaagacggcttctgcgagctgtgcggctactcgcgggccgaggtgatgcagcgaccctgcacctgcgacttcctgcacgggccgcgcacgcagcgccgcgctgccgcgcagatcgcgcaggcactgctgggcgccgaggagcgcaaagtggaaatcgccttctaccggaaagatgggagctgcttcctatgtctggtggatgtggtgcccgtgaagaacgaggatggggctgtcatcatgttcatcctcaatttcgaggtggtgatggagaaggacatggtggggtccccggctcatgacaccaaccaccggggcccccccaccagctggctggccccaggccgcgccaagaccttccgcctgaagctgcccgcgctgctggcgctgacggcccgggagtcgtcggtgcggtcgggcggcgcgggcggcgcgggcgccccgggggccgtggtggtggacgtggacctgacgcccgcggcacccagcagcgagtcgctggccctggacgaagtgacagccatggacaaccacgtggcagggctcgggcccgcggaggagcggcgtgcgctggtgggtcccggctctccgccccgcagcgcgcccggccagctcccatcgccccgggcgcacagcctcaaccccgacgcctcgggctccagctgcagcctggcccggacgcgctcccgagaaagctgcgccagcgtgcgccgcgcctcgtcggccgacgacatcgaggccatgcgcgccggggtgctgcccccgccaccgcgccacgccagcaccggggccatgcacccactgcgcagcggcttgctcaactccacctcggactccgacctcgtgcgctaccgcaccattagcaagattccccaaatcaccctcaactttgtggacctcaagggcgaccccttcttggcttcgcccaccagtgaccgtgagatcatagcacctaagataaaggagcgaacccacaatgtcactgagaaggtcacccaggtcctgtccctgggcgccgacgtgctgcctgagtacaagctgcaggcaccgcgcatccaccgctggaccatcctgcattacagccccttcaaggccgtgtgggactggctcatcctgctgctggtcatctacacggctgtcttcacaccctactcggctgccttcctgctgaaggagacggaagaaggcccgcctgctaccgagtgtggctacgcctgccagccgctggctgtggtggacctcatcgtggacatcatgttcattgtggacatcctcatcaacttccgcaccacctacgtcaatgccaacgaggaggtggtcagccaccccggccgcatcgccgtccactacttcaagggctggttcctcatcgacatggtggccgccatccccttcgacctgctcatcttcggctctggctctgaggagctgatcgggctgctgaagactgcgcggctgctgcggctggtgcgcgtggcgcggaagctggatcgctactcagagtacggcgcggccgtgctgttcttgctcatgtgcacctttgcgctcatcgcgcactggctagcctgcatctggtacgccatcggcaacatggagcagccacacatggactcacgcatcggctggctgcacaacctgggcgaccagataggcaaaccctacaacagcagcggcctgggcggcccctccatcaaggacaagtatgtgacggcgctctacttcaccttcagcagcctcaccagtgtgggcttcggcaacgtctctcccaacaccaactcagagaagatcttctccatctgcgtcatgctcattggctccctcatgtatgctagcatcttcggcaacgtgtcggccatcatccagcggctgtactcgggcacagcccgctaccacacacagatgctgcgggtgcgggagttcatccgcttccaccagatccccaatcccctgcgccagcgcctcgaggagtacttccagcacgcctggtcctacaccaacggcatcgacatgaacgcggtgctgaagggcttccctgagtgcctgcaggctgacatctgcctgcacctgaaccgctcactgctgcagcactgcaaacccttccgaggggccaccaagggctgccttcgggccctggccatgaagttcaagaccacacatgcaccgccaggggacacactggtgcatgctggggacctgctcaccgccctgtacttcatctcccggggctccatcgagatcctgcggggcgacgtcgtcgtggccatcctggggaagaatgacatctttggggagcctctgaacctgtatgcaaggcctggcaagtcgaacggggatgtgcgggccctcacctactgtgacctacacaagatccatcgggacgacctgctggaggtgctggacatgtaccctgagttctccgaccacttctggtccagcctggagatcaccttcaacctgcgagataccaacatgatcccgggctcccccggcagtacggagttagagggtggcttcagtcggcaacgcaagcgcaagttgtccttccgcaggcgcacggacaaggacacggagcagccaggggaggtgtcggccttggggccgggccgggcgggggcagggccgagtagccggggccggccgggggggccgtggggggagagcccgtccagtggcccctccagccctgagagcagtgaggatgagggcccaggccgcagctccagccccctccgcctggtgcccttctccagccccaggccccccggagagccgccgggtggggagcccctgatggaggactgcgagaagagcagcgacacttgcaaccccctgtcaggcgccttctcaggagtgtccaacattttcagcttctggggggacagtcggggccgccagtaccaggagctccctcgatgccccgcccccacccccagcctcctcaacatccccctctccagcccgggtcggcggccccggggcgacgtggagagcaggctggatgccctccagcgccagctcaacaggctggagacccggctgagtgcagacatggccactgtcctgcagctgctacagaggcagatgacgctggtcccgcccgcctacagtgctgtgaccaccccggggcctggccccacttccacatccccgctgttgcccgtcagccccctccccaccctcaccttggactcgctttctcaggtttcccagttcatggcgtgtgaggagctgcccccgggggccccagagcttccccaagaaggccccacacgacgcctctccctaccgggccagctgggggccctcacctcccagcccctgcacagacacggctcggacccgggcagttagtggggctgcccagtgtggacacgtggctcacccagggatcaaggcgctgctgggccgctccccttggaggccctgctcaggaggccctgaccgtggaaggggagaggaactcgaaagcacagctcctcccccagcccttgggaccatcttctcctgcagtcccctgggccccagtgagaggggcaggggcagggccggcagtaggtggggcctgtggtccccccactgccctgagggcattagctggtctaactgcccggaggcacccggccctgggccttaggcacctcaaggacttttctgctatttactgctcttattgttaaggataataattaaggatcatatgaataattaatgaagatgctgatgactatgaataataaataattatcctgaggaga

SEQ ID NO: 83 - DNA, 3884 bp, Homo sapiens
  source 1..3884: mol_type = genomic DNA
  misc_feature 1..3884: note = cDNA of KCNH2 gene SNP c.1366G>T (p.Asp456Tyr)
atgccggtgcggaggggccacgtcgcgccgcagaacaccttcctggacaccatcatccgcaagtttgagggccagagccgtaagttcatcatcgccaacgctcgggtggagaactgcgccgtcatctactgcaacgacggcttctgcgagctgtgcggctactcgcgggccgaggtgatgcagcgaccctgcacctgcgacttcctgcacgggccgcgcacgcagcgccgcgctgccgcgcagatcgcgcaggcactgctgggcgccgaggagcgcaaagtggaaatcgccttctaccggaaagatgggagctgcttcctatgtctggtggatgtggtgcccgtgaagaacgaggatggggctgtcatcatgttcatcctcaatttcgaggtggtgatggagaaggacatggtggggtccccggctcatgacaccaaccaccggggcccccccaccagctggctggccccaggccgcgccaagaccttccgcctgaagctgcccgcgctgctggcgctgacggcccgggagtcgtcggtgcggtcgggcggcgcgggcggcgcgggcgccccgggggccgtggtggtggacgtggacctgacgcccgcggcacccagcagcgagtcgctggccctggacgaagtgacagccatggacaaccacgtggcagggctcgggcccgcggaggagcggcgtgcgctggtgggtcccggctctccgccccgcagcgcgcccggccagctcccatcgccccgggcgcacagcctcaaccccgacgcctcgggctccagctgcagcctggcccggacgcgctcccgagaaagctgcgccagcgtgcgccgcgcctcgtcggccgacgacatcgaggccatgcgcgccggggtgctgcccccgccaccgcgccacgccagcaccggggccatgcacccactgcgcagcggcttgctcaactccacctcggactccgacctcgtgcgctaccgcaccattagcaagattccccaaatcaccctcaactttgtggacctcaagggcgaccccttcttggcttcgcccaccagtgaccgtgagatcatagcacctaagataaaggagcgaacccacaatgtcactgagaaggtcacccaggtcctgtccctgggcgccgacgtgctgcctgagtacaagctgcaggcaccgcgcatccaccgctggaccatcctgcattacagccccttcaaggccgtgtgggactggctcatcctgctgctggtcatctacacggctgtcttcacaccctactcggctgccttcctgctgaaggagacggaagaaggcccgcctgctaccgagtgtggctacgcctgccagccgctggctgtggtgtacctcatcgtggacatcatgttcattgtggacatcctcatcaacttccgcaccacctacgtcaatgccaacgaggaggtggtcagccaccccggccgcatcgccgtccactacttcaagggctggttcctcatcgacatggtggccgccatccccttcgacctgctcatcttcggctctggctctgaggagctgatcgggctgctgaagactgcgcggctgctgcggctggtgcgcgtggcgcggaagctggatcgctactcagagtacggcgcggccgtgctgttcttgctcatgtgcacctttgcgctcatcgcgcactggctagcctgcatctggtacgccatcggcaacatggagcagccacacatggactcacgcatcggctggctgcacaacctgggcgaccagataggcaaaccctacaacagcagcggcctgggcggcccctccatcaaggacaagtatgtgacggcgctctacttcaccttcagcagcctcaccagtgtgggcttcggcaacgtctctcccaacaccaactcagagaagatcttctccatctgcgtcatgctcattggctccctcatgtatgctagcatcttcggcaacgtgtcggccatcatccagcggctgtactcgggcacagcccgctaccacacacagatgctgcgggtgcgggagttcatccgcttccaccagatccccaatcccctgcgccagcgcctcgaggagtacttccagcacgcctggtcctacaccaacggcatcgacatgaacgcggtgctgaagggcttccctgagtgcctgcaggctgacatctgcctgcacctgaaccgctcactgctgcagcactgcaaacccttccgaggggccaccaagggctgccttcgggccctggccatgaagttcaagaccacacatgcaccgccaggggacacactggtgcatgctggggacctgctcaccgccctgtacttcatctcccggggctccatcgagatcctgcggggcgacgtcgtcgtggccatcctggggaagaatgacatctttggggagcctctgaacctgtatgcaaggcctggcaagtcgaacggggatgtgcgggccctcacctactgtgacctacacaagatccatcgggacgacctgctggaggtgctggacatgtaccctgagttctccgaccacttctggtccagcctggagatcaccttcaacctgcgagataccaacatgatcccgggctcccccggcagtacggagttagagggtggcttcagtcggcaacgcaagcgcaagttgtccttccgcaggcgcacggacaaggacacggagcagccaggggaggtgtcggccttggggccgggccgggcgggggcagggccgagtagccggggccggccgggggggccgtggggggagagcccgtccagtggcccctccagccctgagagcagtgaggatgagggcccaggccgcagctccagccccctccgcctggtgcccttctccagccccaggccccccggagagccgccgggtggggagcccctgatggaggactgcgagaagagcagcgacacttgcaaccccctgtcaggcgccttctcaggagtgtccaacattttcagcttctggggggacagtcggggccgccagtaccaggagctccctcgatgccccgcccccacccccagcctcctcaacatccccctctccagcccgggtcggcggccccggggcgacgtggagagcaggctggatgccctccagcgccagctcaacaggctggagacccggctgagtgcagacatggccactgtcctgcagctgctacagaggcagatgacgctggtcccgcccgcctacagtgctgtgaccaccccggggcctggccccacttccacatccccgctgttgcccgtcagccccctccccaccctcaccttggactcgctttctcaggtttcccagttcatggcgtgtgaggagctgcccccgggggccccagagcttccccaagaaggccccacacgacgcctctccctaccgggccagctgggggccctcacctcccagcccctgcacagacacggctcggacccgggcagttagtggggctgcccagtgtggacacgtggctcacccagggatcaaggcgctgctgggccgctccccttggaggccctgctcaggaggccctgaccgtggaaggggagaggaactcgaaagcacagctcctcccccagcccttgggaccatcttctcctgcagtcccctgggccccagtgagaggggcaggggcagggccggcagtaggtggggcctgtggtccccccactgccctgagggcattagctggtctaactgcccggaggcacccggccctgggccttaggcacctcaaggacttttctgctatttactgctcttattgttaaggataataattaaggatcatatgaataattaatgaagatgctgatgactatgaataataaataattatcctgaggaga

SEQ ID NO: 84 - DNA, 3884 bp, Homo sapiens
  source 1..3884: mol_type = genomic DNA
  misc_feature 1..3884: note = cDNA of KCNH2 gene SNP c.136G>A (p.Asp46Asn)
atgccggtgcggaggggccacgtcgcgccgcagaacaccttcctggacaccatcatccgcaagtttgagggccagagccgtaagttcatcatcgccaacgctcgggtggagaactgcgccgtcatctactgcaacaacggcttctgcgagctgtgcggctactcgcgggccgaggtgatgcagcgaccctgcacctgcgacttcctgcacgggccgcgcacgcagcgccgcgctgccgcgcagatcgcgcaggcactgctgggcgccgaggagcgcaaagtggaaatcgccttctaccggaaagatgggagctgcttcctatgtctggtggatgtggtgcccgtgaagaacgaggatggggctgtcatcatgttcatcctcaatttcgaggtggtgatggagaaggacatggtggggtccccggctcatgacaccaaccaccggggcccccccaccagctggctggccccaggccgcgccaagaccttccgcctgaagctgcccgcgctgctggcgctgacggcccgggagtcgtcggtgcggtcgggcggcgcgggcggcgcgggcgccccgggggccgtggtggtggacgtggacctgacgcccgcggcacccagcagcgagtcgctggccctggacgaagtgacagccatggacaaccacgtggcagggctcgggcccgcggaggagcggcgtgcgctggtgggtcccggctctccgccccgcagcgcgcccggccagctcccatcgccccgggcgcacagcctcaaccccgacgcctcgggctccagctgcagcctggcccggacgcgctcccgagaaagctgcgccagcgtgcgccgcgcctcgtcggccgacgacatcgaggccatgcgcgccggggtgctgcccccgccaccgcgccacgccagcaccggggccatgcacccactgcgcagcggcttgctcaactccacctcggactccgacctcgtgcgctaccgcaccattagcaagattccccaaatcaccctcaactttgtggacctcaagggcgaccccttcttggcttcgcccaccagtgaccgtgagatcatagcacctaagataaaggagcgaacccacaatgtcactgagaaggtcacccaggtcctgtccctgggcgccgacgtgctgcctgagtacaagctgcaggcaccgcgcatccaccgctggaccatcctgcattacagccccttcaaggccgtgtgggactggctcatcctgctgctggtcatctacacggctgtcttcacaccctactcggctgccttcctgctgaaggagacggaagaaggcccgcctgctaccgagtgtggctacgcctgccagccgctggctgtggtggacctcatcgtggacatcatgttcattgtggacatcctcatcaacttccgcaccacctacgtcaatgccaacgaggaggtggtcagccaccccggccgcatcgccgtccactacttcaagggctggttcctcatcgacatggtggccgccatccccttcgacctgctcatcttcggctctggctctgaggagctgatcgggctgctgaagactgcgcggctgctgcggctggtgcgcgtggcgcggaagctggatcgctactcagagtacggcgcggccgtgctgttcttgctcatgtgcacctttgcgctcatcgcgcactggctagcctgcatctggtacgccatcggcaacatggagcagccacacatggactcacgcatcggctggctgcacaacctgggcgaccagataggcaaaccctacaacagcagcggcctgggcggcccctccatcaaggacaagtatgtgacggcgctctacttcaccttcagcagcctcaccagtgtgggcttcggcaacgtctctcccaacaccaactcagagaagatcttctccatctgcgtcatgctcattggctccctcatgtatgctagcatcttcggcaacgtgtcggccatcatccagcggctgtactcgggcacagcccgctaccacacacagatgctgcgggtgcgggagttcatccgcttccaccagatccccaatcccctgcgccagcgcctcgaggagtacttccagcacgcctggtcctacaccaacggcatcgacatgaacgcggtgctgaagggcttccctgagtgcctgcaggctgacatctgcctgcacctgaaccgctcactgctgcagcactgcaaacccttccgaggggccaccaagggctgccttcgggccctggccatgaagttcaagaccacacatgcaccgccaggggacacactggtgcatgctggggacctgctcaccgccctgtacttcatctcccggggctccatcgagatcctgcggggcgacgtcgtcgtggccatcctggggaagaatgacatctttggggagcctctgaacctgtatgcaaggcctggcaagtcgaacggggatgtgcgggccctcacctactgtgacctacacaagatccatcgggacgacctgctggaggtgctggacatgtaccctgagttctccgaccacttctggtccagcctggagatcaccttcaacctgcgagataccaacatgatcccgggctcccccggcagtacggagttagagggtggcttcagtcggcaacgcaagcgcaagttgtccttccgcaggcgcacggacaaggacacggagcagccaggggaggtgtcggccttggggccgggccgggcgggggcagggccgagtagccggggccggccgggggggccgtggggggagagcccgtccagtggcccctccagccctgagagcagtgaggatgagggcccaggccgcagctccagccccctccgcctggtgcccttctccagccccaggccccccggagagccgccgggtggggagcccctgatggaggactgcgagaagagcagcgacacttgcaaccccctgtcaggcgccttctcaggagtgtccaacattttcagcttctggggggacagtcggggccgccagtaccaggagctccctcgatgccccgcccccacccccagcctcctcaacatccccctctccagcccgggtcggcggccccggggcgacgtggagagcaggctggatgccctccagcgccagctcaacaggctggagacccggctgagtgcagacatggccactgtcctgcagctgctacagaggcagatgacgctggtcccgcccgcctacagtgctgtgaccaccccggggcctggccccacttccacatccccgctgttgcccgtcagccccctccccaccctcaccttggactcgctttctcaggtttcccagttcatggcgtgtgaggagctgcccccgggggccccagagcttccccaagaaggccccacacgacgcctctccctaccgggccagctgggggccctcacctcccagcccctgcacagacacggctcggacccgggcagttagtggggctgcccagtgtggacacgtggctcacccagggatcaaggcgctgctgggccgctccccttggaggccctgctcaggaggccctgaccgtggaaggggagaggaactcgaaagcacagctcctcccccagcccttgggaccatcttctcctgcagtcccctgggccccagtgagaggggcaggggcagggccggcagtaggtggggcctgtggtccccccactgccctgagggcattagctggtctaactgcccggaggcacccggccctgggccttaggcacctcaaggacttttctgctatttactgctcttattgttaaggataataattaaggatcatatgaataattaatgaagatgctgatgactatgaataataaataattatcctgaggaga

SEQ ID NO: 85 - DNA, 3884 bp, Homo sapiens
  source 1..3884: mol_type = genomic DNA
  misc_feature 1..3884: note = cDNA of KCNH2 gene SNP c.1372A>T (p.Ile458Phe)
atgccggtgcggaggggccacgtcgcgccgcagaacaccttcctggacaccatcatccgcaagtttgagggccagagccgtaagttcatcatcgccaacgctcgggtggagaactgcgccgtcatctactgcaacgacggcttctgcgagctgtgcggctactcgcgggccgaggtgatgcagcgaccctgcacctgcgacttcctgcacgggccgcgcacgcagcgccgcgctgccgcgcagatcgcgcaggcactgctgggcgccgaggagcgcaaagtggaaatcgccttctaccggaaagatgggagctgcttcctatgtctggtggatgtggtgcccgtgaagaacgaggatggggctgtcatcatgttcatcctcaatttcgaggtggtgatggagaaggacatggtggggtccccggctcatgacaccaaccaccggggcccccccaccagctggctggccccaggccgcgccaagaccttccgcctgaagctgcccgcgctgctggcgctgacggcccgggagtcgtcggtgcggtcgggcggcgcgggcggcgcgggcgccccgggggccgtggtggtggacgtggacctgacgcccgcggcacccagcagcgagtcgctggccctggacgaagtgacagccatggacaaccacgtggcagggctcgggcccgcggaggagcggcgtgcgctggtgggtcccggctctccgccccgcagcgcgcccggccagctcccatcgccccgggcgcacagcctcaaccccgacgcctcgggctccagctgcagcctggcccggacgcgctcccgagaaagctgcgccagcgtgcgccgcgcctcgtcggccgacgacatcgaggccatgcgcgccggggtgctgcccccgccaccgcgccacgccagcaccggggccatgcacccactgcgcagcggcttgctcaactccacctcggactccgacctcgtgcgctaccgcaccattagcaagattccccaaatcaccctcaactttgtggacctcaagggcgaccccttcttggcttcgcccaccagtgaccgtgagatcatagcacctaagataaaggagcgaacccacaatgtcactgagaaggtcacccaggtcctgtccctgggcgccgacgtgctgcctgagtacaagctgcaggcaccgcgcatccaccgctggaccatcctgcattacagccccttcaaggccgtgtgggactggctcatcctgctgctggtcatctacacggctgtcttcacaccctactcggctgccttcctgctgaaggagacggaagaaggcccgcctgctaccgagtgtggctacgcctgccagccgctggctgtggtggacctcttcgtggacatcatgttcattgtggacatcctcatcaacttccgcaccacctacgtcaatgccaacgaggaggtggtcagccaccccggccgcatcgccgtccactacttcaagggctggttcctcatcgacatggtggccgccatccccttcgacctgctcatcttcggctctggctctgaggagctgatcgggctgctgaagactgcgcggctgctgcggctggtgcgcgtggcgcggaagctggatcgctactcagagtacggcgcggccgtgctgttcttgctcatgtgcacctttgcgctcatcgcgcactggctagcctgcatctggtacgccatcggcaacatggagcagccacacatggactcacgcatcggctggctgcacaacctgggcgaccagataggcaaaccctacaacagcagcggcctgggcggcccctccatcaaggacaagtatgtgacggcgctctacttcaccttcagcagcctcaccagtgtgggcttcggcaacgtctctcccaacaccaactcagagaagatcttctccatctgcgtcatgctcattggctccctcatgtatgctagcatcttcggcaacgtgtcggccatcatccagcggctgtactcgggcacagcccgctaccacacacagatgctgcgggtgcgggagttcatccgcttccaccagatccccaatcccctgcgccagcgcctcgaggagtacttccagcacgcctggtcctacaccaacggcatcgacatgaacgcggtgctgaagggcttccctgagtgcctgcaggctgacatctgcctgcacctgaaccgctcactgctgcagcactgcaaacccttccgaggggccaccaagggctgccttcgggccctggccatgaagttcaagaccacacatgcaccgccaggggacacactggtgcatgctggggacctgctcaccgccctgtacttcatctcccggggctccatcgagatcctgcggggcgacgtcgtcgtggccatcctggggaagaatgacatctttggggagcctctgaacctgtatgcaaggcctggcaagtcgaacggggatgtgcgggccctcacctactgtgacctacacaagatccatcgggacgacctgctggaggtgctggacatgtaccctgagttctccgaccacttctggtccagcctggagatcaccttcaacctgcgagataccaacatgatcccgggctcccccggcagtacggagttagagggtggcttcagtcggcaacgcaagcgcaagttgtccttccgcaggcgcacggacaaggacacggagcagccaggggaggtgtcggccttggggccgggccgggcgggggcagggccgagtagccggggccggccgggggggccgtggggggagagcccgtccagtggcccctccagccctgagagcagtgaggatgagggcccaggccgcagctccagccccctccgcctggtgcccttctccagccccaggccccccggagagccgccgggtggggagcccctgatggaggactgcgagaagagcagcgacacttgcaaccccctgtcaggcgccttctcaggagtgtccaacattttcagcttctggggggacagtcggggccgccagtaccaggagctccctcgatgccccgcccccacccccagcctcctcaacatccccctctccagcccgggtcggcggccccggggcgacgtggagagcaggctggatgccctccagcgccagctcaacaggctggagacccggctgagtgcagacatggccactgtcctgcagctgctacagaggcagatgacgctggtcccgcccgcctacagtgctgtgaccaccccggggcctggccccacttccacatccccgctgttgcccgtcagccccctccccaccctcaccttggactcgctttctcaggtttcccagttcatggcgtgtgaggagctgcccccgggggccccagagcttccccaagaaggccccacacgacgcctctccctaccgggccagctgggggccctcacctcccagcccctgcacagacacggctcggacccgggcagttagtggggctgcccagtgtggacacgtggctcacccagggatcaaggcgctgctgggccgctccccttggaggccctgctcaggaggccctgaccgtggaaggggagaggaactcgaaagcacagctcctcccccagcccttgggaccatcttctcctgcagtcccctgggccccagtgagaggggcaggggcagggccggcagtaggtggggcctgtggtccccccactgccctgagggcattagctggtctaactgcccggaggcacccggccctgggccttaggcacctcaaggacttttctgctatttactgctcttattgttaaggataataattaaggatcatatgaataattaatgaagatgctgatgactatgaataataaataattatcctgaggaga

SEQ ID NO: 86 - DNA, 3884 bp, Homo sapiens
  source 1..3884: mol_type = genomic DNA
  misc_feature 1..3884: note = cDNA of KCNH2 gene SNP c.1378G>T (p.Asp460Tyr)
atgccggtgcggaggggccacgtcgcgccgcagaacaccttcctggacaccatcatccgcaagtttgagggccagagccgtaagttcatcatcgccaacgctcgggtggagaactgcgccgtcatctactgcaacgacggcttctgcgagctgtgcggctactcgcgggccgaggtgatgcagcgaccctgcacctgcgacttcctgcacgggccgcgcacgcagcgccgcgctgccgcgcagatcgcgcaggcactgctgggcgccgaggagcgcaaagtggaaatcgccttctaccggaaagatgggagctgcttcctatgtctggtggatgtggtgcccgtgaagaacgaggatggggctgtcatcatgttcatcctcaatttcgaggtggtgatggagaaggacatggtggggtccccggctcatgacaccaaccaccggggcccccccaccagctggctggccccaggccgcgccaagaccttccgcctgaagctgcccgcgctgctggcgctgacggcccgggagtcgtcggtgcggtcgggcggcgcgggcggcgcgggcgccccgggggccgtggtggtggacgtggacctgacgcccgcggcacccagcagcgagtcgctggccctggacgaagtgacagccatggacaaccacgtggcagggctcgggcccgcggaggagcggcgtgcgctggtgggtcccggctctccgccccgcagcgcgcccggccagctcccatcgccccgggcgcacagcctcaaccccgacgcctcgggctccagctgcagcctggcccggacgcgctcccgagaaagctgcgccagcgtgcgccgcgcctcgtcggccgacgacatcgaggccatgcgcgccggggtgctgcccccgccaccgcgccacgccagcaccggggccatgcacccactgcgcagcggcttgctcaactccacctcggactccgacctcgtgcgctaccgcaccattagcaagattccccaaatcaccctcaactttgtggacctcaagggcgaccccttcttggcttcgcccaccagtgaccgtgagatcatagcacctaagataaaggagcgaacccacaatgtcactgagaaggtcacccaggtcctgtccctgggcgccgacgtgctgcctgagtacaagctgcaggcaccgcgcatccaccgctggaccatcctgcattacagccccttcaaggccgtgtgggactggctcatcctgctgctggtcatctacacggctgtcttcacaccctactcggctgccttcctgctgaaggagacggaagaaggcccgcctgctaccgagtgtggctacgcctgccagccgctggctgtggtggacctcatcgtgtacatcatgttcattgtggacatcctcatcaacttccgcaccacctacgtcaatgccaacgaggaggtggtcagccaccccggccgcatcgccgtccactacttcaagggctggttcctcatcgacatggtggccgccatccccttcgacctgctcatcttcggctctggctctgaggagctgatcgggctgctgaagactgcgcggctgctgcggctggtgcgcgtggcgcggaagctggatcgctactcagagtacggcgcggccgtgctgttcttgctcatgtgcacctttgcgctcatcgcgcactggctagcctgcatctggtacgccatcggcaacatggagcagccacacatggactcacgcatcggctggctgcacaacctgggcgaccagataggcaaaccctacaacagcagcggcctgggcggcccctccatcaaggacaagtatgtgacggcgctctacttcaccttcagcagcctcaccagtgtgggcttcggcaacgtctctcccaacaccaactcagagaagatcttctccatctgcgtcatgctcattggctccctcatgtatgctagcatcttcggcaacgtgtcggccatcatccagcggctgtactcgggcacagcccgctaccacacacagatgctgcgggtgcgggagttcatccgcttccaccagatccccaatcccctgcgccagcgcctcgaggagtacttccagcacgcctggtcctacaccaacggcatcgacatgaacgcggtgctgaagggcttccctgagtgcctgcaggctgacatctgcctgcacctgaaccgctcactgctgcagcactgcaaacccttccgaggggccaccaagggctgccttcgggccctggccatgaagttcaagaccacacatgcaccgccaggggacacactggtgcatgctggggacctgctcaccgccctgtacttcatctcccggggctccatcgagatcctgcggggcgacgtcgtcgtggccatcctggggaagaatgacatctttggggagcctctgaacctgtatgcaaggcctggcaagtcgaacggggatgtgcgggccctcacctactgtgacctacacaagatccatcgggacgacctgctggaggtgctggacatgtaccctgagttctccgaccacttctggtccagcctggagatcaccttcaacctgcgagataccaacatgatcccgggctcccccggcagtacggagttagagggtggcttcagtcggcaacgcaagcgcaagttgtccttccgcaggcgcacggacaaggacacggagcagccaggggaggtgtcggccttggggccgggccgggcgggggcagggccgagtagccggggccggccgggggggccgtggggggagagcccgtccagtggcccctccagccctgagagcagtgaggatgagggcccaggccgcagctccagccccctccgcctggtgcccttctccagccccaggccccccggagagccgccgggtggggagcccctgatggaggactgcgagaagagcagcgacacttgcaaccccctgtcaggcgccttctcaggagtgtccaacattttcagcttctggggggacagtcggggccgccagtaccaggagctccctcgatgccccgcccccacccccagcctcctcaacatccccctctccagcccgggtcggcggccccggggcgacgtggagagcaggctggatgccctccagcgccagctcaacaggctggagacccggctgagtgcagacatggccactgtcctgcagctgctacagaggcagatgacgctggtcccgcccgcctacagtgctgtgaccaccccggggcctggccccacttccacatccccgctgttgcccgtcagccccctccccaccctcaccttggactcgctttctcaggtttcccagttcatggcgtgtgaggagctgcccccgggggccccagagcttccccaagaaggccccacacgacgcctctccctaccgggccagctgggggccctcacctcccagcccctgcacagacacggctcggacccgggcagttagtggggctgcccagtgtggacacgtggctcacccagggatcaaggcgctgctgggccgctccccttggaggccctgctcaggaggccctgaccgtggaaggggagaggaactcgaaagcacagctcctcccccagcccttgggaccatcttctcctgcagtcccctgggccccagtgagaggggcaggggcagggccggcagtaggtggggcctgtggtccccccactgccctgagggcattagctggtctaactgcccggaggcacccggccctgggccttaggcacctcaaggacttttctgctatttactgctcttattgttaaggataataattaaggatcatatgaataattaatgaagatgctgatgactatgaataataaataattatcctgaggaga

SEQ ID NO: 87 - DNA, 3884 bp, Homo sapiens
  source 1..3884: mol_type = genomic DNA
  misc_feature 1..3884: note = cDNA of KCNH2 gene SNP c.137A>G (p.Asp46Gly)
atgccggtgcggaggggccacgtcgcgccgcagaacaccttcctggacaccatcatccgcaagtttgagggccagagccgtaagttcatcatcgccaacgctcgggtggagaactgcgccgtcatctactgcaacggcggcttctgcgagctgtgcggctactcgcgggccgaggtgatgcagcgaccctgcacctgcgacttcctgcacgggccgcgcacgcagcgccgcgctgccgcgcagatcgcgcaggcactgctgggcgccgaggagcgcaaagtggaaatcgccttctaccggaaagatgggagctgcttcctatgtctggtggatgtggtgcccgtgaagaacgaggatggggctgtcatcatgttcatcctcaatttcgaggtggtgatggagaaggacatggtggggtccccggctcatgacaccaaccaccggggcccccccaccagctggctggccccaggccgcgccaagaccttccgcctgaagctgcccgcgctgctggcgctgacggcccgggagtcgtcggtgcggtcgggcggcgcgggcggcgcgggcgccccgggggccgtggtggtggacgtggacctgacgcccgcggcacccagcagcgagtcgctggccctggacgaagtgacagccatggacaaccacgtggcagggctcgggcccgcggaggagcggcgtgcgctggtgggtcccggctctccgccccgcagcgcgcccggccagctcccatcgccccgggcgcacagcctcaaccccgacgcctcgggctccagctgcagcctggcccggacgcgctcccgagaaagctgcgccagcgtgcgccgcgcctcgtcggccgacgacatcgaggccatgcgcgccggggtgctgcccccgccaccgcgccacgccagcaccggggccatgcacccactgcgcagcggcttgctcaactccacctcggactccgacctcgtgcgctaccgcaccattagcaagattccccaaatcaccctcaactttgtggacctcaagggcgaccccttcttggcttcgcccaccagtgaccgtgagatcatagcacctaagataaaggagcgaacccacaatgtcactgagaaggtcacccaggtcctgtccctgggcgccgacgtgctgcctgagtacaagctgcaggcaccgcgcatccaccgctggaccatcctgcattacagccccttcaaggccgtgtgggactggctcatcctgctgctggtcatctacacggctgtcttcacaccctactcggctgccttcctgctgaaggagacggaagaaggcccgcctgctaccgagtgtggctacgcctgccagccgctggctgtggtggacctcatcgtggacatcatgttcattgtggacatcctcatcaacttccgcaccacctacgtcaatgccaacgaggaggtggtcagccaccccggccgcatcgccgtccactacttcaagggctggttcctcatcgacatggtggccgccatccccttcgacctgctcatcttcggctctggctctgaggagctgatcgggctgctgaagactgcgcggctgctgcggctggtgcgcgtggcgcggaagctggatcgctactcagagtacggcgcggccgtgctgttcttgctcatgtgcacctttgcgctcatcgcgcactggctagcctgcatctggtacgccatcggcaacatggagcagccacacatggactcacgcatcggctggctgcacaacctgggcgaccagataggcaaaccctacaacagcagcggcctgggcggcccctccatcaaggacaagtatgtgacggcgctctacttcaccttcagcagcctcaccagtgtgggcttcggcaacgtctctcccaacaccaactcagagaagatcttctccatctgcgtcatgctcattggctccctcatgtatgctagcatcttcggcaacgtgtcggccatcatccagcggctgtactcgggcacagcccgctaccacacacagatgctgcgggtgcgggagttcatccgcttccaccagatccccaatcccctgcgccagcgcctcgaggagtacttccagcacgcctggtcctacaccaacggcatcgacatgaacgcggtgctgaagggcttccctgagtgcctgcaggctgacatctgcctgcacctgaaccgctcactgctgcagcactgcaaacccttccgaggggccaccaagggctgccttcgggccctggccatgaagttcaagaccacacatgcaccgccaggggacacactggtgcatgctggggacctgctcaccgccctgtacttcatctcccggggctccatcgagatcctgcggggcgacgtcgtcgtggccatcctggggaagaatgacatctttggggagcctctgaacctgtatgcaaggcctggcaagtcgaacggggatgtgcgggccctcacctactgtgacctacacaagatccatcgggacgacctgctggaggtgctggacatgtaccctgagttctccgaccacttctggtccagcctggagatcaccttcaacctgcgagataccaacatgatcccgggctcccccggcagtacggagttagagggtggcttcagtcggcaacgcaagcgcaagttgtccttccgcaggcgcacggacaaggacacggagcagccaggggaggtgtcggccttggggccgggccgggcgggggcagggccgagtagccggggccggccgggggggccgtggggggagagcccgtccagtggcccctccagccctgagagcagtgaggatgagggcccaggccgcagctccagccccctccgcctggtgcccttctccagccccaggccccccggagagccgccgggtggggagcccctgatggaggactgcgagaagagcagcgacacttgcaaccccctgtcaggcgccttctcaggagtgtccaacattttcagcttctggggggacagtcggggccgccagtaccaggagctccctcgatgccccgcccccacccccagcctcctcaacatccccctctccagcccgggtcggcggccccggggcgacgtggagagcaggctggatgccctccagcgccagctcaacaggctggagacccggctgagtgcagacatggccactgtcctgcagctgctacagaggcagatgacgctggtcccgcccgcctacagtgctgtgaccaccccggggcctggccccacttccacatccccgctgttgcccgtcagccccctccccaccctcaccttggactcgctttctcaggtttcccagttcatggcgtgtgaggagctgcccccgggggccccagagcttccccaagaaggccccacacgacgcctctccctaccgggccagctgggggccctcacctcccagcccctgcacagacacggctcggacccgggcagttagtggggctgcccagtgtggacacgtggctcacccagggatcaaggcgctgctgggccgctccccttggaggccctgctcaggaggccctgaccgtggaaggggagaggaactcgaaagcacagctcctcccccagcccttgggaccatcttctcctgcagtcccctgggccccagtgagaggggcaggggcagggccggcagtaggtggggcctgtggtccccccactgccctgagggcattagctggtctaactgcccggaggcacccggccctgggccttaggcacctcaaggacttttctgctatttactgctcttattgttaaggataataattaaggatcatatgaataattaatgaagatgctgatgactatgaataataaataattatcctgaggaga

SEQ ID NO: 88 - DNA, 3884 bp, Homo sapiens
  source 1..3884: mol_type = genomic DNA
  misc_feature 1..3884: note = cDNA of KCNH2 gene SNP c.1384A>G (p.Met462Val)
atgccggtgcggaggggccacgtcgcgccgcagaacaccttcctggacaccatcatccgcaagtttgagggccagagccgtaagttcatcatcgccaacgctcgggtggagaactgcgccgtcatctactgcaacgacggcttctgcgagctgtgcggctactcgcgggccgaggtgatgcagcgaccctgcacctgcgacttcctgcacgggccgcgcacgcagcgccgcgctgccgcgcagatcgcgcaggcactgctgggcgccgaggagcgcaaagtggaaatcgccttctaccggaaagatgggagctgcttcctatgtctggtggatgtggtgcccgtgaagaacgaggatggggctgtcatcatgttcatcctcaatttcgaggtggtgatggagaaggacatggtggggtccccggctcatgacaccaaccaccggggcccccccaccagctggctggccccaggccgcgccaagaccttccgcctgaagctgcccgcgctgctggcgctgacggcccgggagtcgtcggtgcggtcgggcggcgcgggcggcgcgggcgccccgggggccgtggtggtggacgtggacctgacgcccgcggcacccagcagcgagtcgctggccctggacgaagtgacagccatggacaaccacgtggcagggctcgggcccgcggaggagcggcgtgcgctggtgggtcccggctctccgccccgcagcgcgcccggccagctcccatcgccccgggcgcacagcctcaaccccgacgcctcgggctccagctgcagcctggcccggacgcgctcccgagaaagctgcgccagcgtgcgccgcgcctcgtcggccgacgacatcgaggccatgcgcgccggggtgctgcccccgccaccgcgccacgccagcaccggggccatgcacccactgcgcagcggcttgctcaactccacctcggactccgacctcgtgcgctaccgcaccattagcaagattccccaaatcaccctcaactttgtggacctcaagggcgaccccttcttggcttcgcccaccagtgaccgtgagatcatagcacctaagataaaggagcgaacccacaatgtcactgagaaggtcacccaggtcctgtccctgggcgccgacgtgctgcctgagtacaagctgcaggcaccgcgcatccaccgctggaccatcctgcattacagccccttcaaggccgtgtgggactggctcatcctgctgctggtcatctacacggctgtcttcacaccctactcggctgccttcctgctgaaggagacggaagaaggcccgcctgctaccgagtgtggctacgcctgccagccgctggctgtggtggacctcatcgtggacatcgtgttcattgtggacatcctcatcaacttccgcaccacctacgtcaatgccaacgaggaggtggtcagccaccccggccgcatcgccgtccactacttcaagggctggttcctcatcgacatggtggccgccatccccttcgacctgctcatcttcggctctggctctgaggagctgatcgggctgctgaagactgcgcggctgctgcggctggtgcgcgtggcgcggaagctggatcgctactcagagtacggcgcggccgtgctgttcttgctcatgtgcacctttgcgctcatcgcgcactggctagcctgcatctggtacgccatcggcaacatggagcagccacacatggactcacgcatcggctggctgcacaacctgggcgaccagataggcaaaccctacaacagcagcggcctgggcggcccctccatcaaggacaagtatgtgacggcgctctacttcaccttcagcagcctcaccagtgtgggcttcggcaacgtctctcccaacaccaactcagagaagatcttctccatctgcgtcatgctcattggctccctcatgtatgctagcatcttcggcaacgtgtcggccatcatccagcggctgtactcgggcacagcccgctaccacacacagatgctgcgggtgcgggagttcatccgcttccaccagatccccaatcccctgcgccagcgcctcgaggagtacttccagcacgcctggtcctacaccaacggcatcgacatgaacgcggtgctgaagggcttccctgagtgcctgcaggctgacatctgcctgcacctgaaccgctcactgctgcagcactgcaaacccttccgaggggccaccaagggctgccttcgggccctggccatgaagttcaagaccacacatgcaccgccaggggacacactggtgcatgctggggacctgctcaccgccctgtacttcatctcccggggctccatcgagatcctgcggggcgacgtcgtcgtggccatcctggggaagaatgacatctttggggagcctctgaacctgtatgcaaggcctggcaagtcgaacggggatgtgcgggccctcacctactgtgacctacacaagatccatcgggacgacctgctggaggtgctggacatgtaccctgagttctccgaccacttctggtccagcctggagatcaccttcaacctgcgagataccaacatgatcccgggctcccccggcagtacggagttagagggtggcttcagtcggcaacgcaagcgcaagttgtccttccgcaggcgcacggacaaggacacggagcagccaggggaggtgtcggccttggggccgggccgggcgggggcagggccgagtagccggggccggccgggggggccgtggggggagagcccgtccagtggcccctccagccctgagagcagtgaggatgagggcccaggccgcagctccagccccctccgcctggtgcccttctccagccccaggccccccggagagccgccgggtggggagcccctgatggaggactgcgagaagagcagcgacacttgcaaccccctgtcaggcgccttctcaggagtgtccaacattttcagcttctggggggacagtcggggccgccagtaccaggagctccctcgatgccccgcccccacccccagcctcctcaacatccccctctccagcccgggtcggcggccccggggcgacgtggagagcaggctggatgccctccagcgccagctcaacaggctggagacccggctgagtgcagacatggccactgtcctgcagctgctacagaggcagatgacgctggtcccgcccgcctacagtgctgtgaccaccccggggcctggccccacttccacatccccgctgttgcccgtcagccccctccccaccctcaccttggactcgctttctcaggtttcccagttcatggcgtgtgaggagctgcccccgggggccccagagcttccccaagaaggccccacacgacgcctctccctaccgggccagctgggggccctcacctcccagcccctgcacagacacggctcggacccgggcagttagtggggctgcccagtgtggacacgtggctcacccagggatcaaggcgctgctgggccgctccccttggaggccctgctcaggaggccctgaccgtggaaggggagaggaactcgaaagcacagctcctcccccagcccttgggaccatcttctcctgcagtcccctgggccccagtgagaggggcaggggcagggccggcagtaggtggggcctgtggtccccccactgccctgagggcattagctggtctaactgcccggaggcacccggccctgggccttaggcacctcaaggacttttctgctatttactgctcttattgttaaggataataattaaggatcatatgaataattaatgaagatgctgatgactatgaataataaataattatcctgaggaga

SEQ ID NO: 89 - DNA, 3884 bp, Homo sapiens
  source 1..3884: mol_type = genomic DNA
  misc_feature 1..3884: note = cDNA of KCNH2 gene SNP c.1387T>C (p.Phe463Leu)
atgccggtgcggaggggccacgtcgcgccgcagaacaccttcctggacaccatcatccgcaagtttgagggccagagccgtaagttcatcatcgccaacgctcgggtggagaactgcgccgtcatctactgcaacgacggcttctgcgagctgtgcggctactcgcgggccgaggtgatgcagcgaccctgcacctgcgacttcctgcacgggccgcgcacgcagcgccgcgctgccgcgcagatcgcgcaggcactgctgggcgccgaggagcgcaaagtggaaatcgccttctaccggaaagatgggagctgcttcctatgtctggtggatgtggtgcccgtgaagaacgaggatggggctgtcatcatgttcatcctcaatttcgaggtggtgatggagaaggacatggtggggtccccggctcatgacaccaaccaccggggcccccccaccagctggctggccccaggccgcgccaagaccttccgcctgaagctgcccgcgctgctggcgctgacggcccgggagtcgtcggtgcggtcgggcggcgcgggcggcgcgggcgccccgggggccgtggtggtggacgtggacctgacgcccgcggcacccagcagcgagtcgctggccctggacgaagtgacagccatggacaaccacgtggcagggctcgggcccgcggaggagcggcgtgcgctggtgggtcccggctctccgccccgcagcgcgcccggccagctcccatcgccccgggcgcacagcctcaaccccgacgcctcgggctccagctgcagcctggcccggacgcgctcccgagaaagctgcgccagcgtgcgccgcgcctcgtcggccgacgacatcgaggccatgcgcgccggggtgctgcccccgccaccgcgccacgccagcaccggggccatgcacccactgcgcagcggcttgctcaactccacctcggactccgacctcgtgcgctaccgcaccattagcaagattccccaaatcaccctcaactttgtggacctcaagggcgaccccttcttggcttcgcccaccagtgaccgtgagatcatagcacctaagataaaggagcgaacccacaatgtcactgagaaggtcacccaggtcctgtccctgggcgccgacgtgctgcctgagtacaagctgcaggcaccgcgcatccaccgctggaccatcctgcattacagccccttcaaggccgtgtgggactggctcatcctgctgctggtcatctacacggctgtcttcacaccctactcggctgccttcctgctgaaggagacggaagaaggcccgcctgctaccgagtgtggctacgcctgccagccgctggctgtggtggacctcatcgtggacatcatgctcattgtggacatcctcatcaacttccgcaccacctacgtcaatgccaacgaggaggtggtcagccaccccggccgcatcgccgtccactacttcaagggctggttcctcatcgacatggtggccgccatccccttcgacctgctcatcttcggctctggctctgaggagctgatcgggctgctgaagactgcgcggctgctgcggctggtgcgcgtggcgcggaagctggatcgctactcagagtacggcgcggccgtgctgttcttgctcatgtgcacctttgcgctcatcgcgcactggctagcctgcatctggtacgccatcggcaacatggagcagccacacatggactcacgcatcggctggctgcacaacctgggcgaccagataggcaaaccctacaacagcagcggcctgggcggcccctccatcaaggacaagtatgtgacggcgctctacttcaccttcagcagcctcaccagtgtgggcttcggcaacgtctctcccaacaccaactcagagaagatcttctccatctgcgtcatgctcattggctccctcatgtatgctagcatcttcggcaacgtgtcggccatcatccagcggctgtactcgggcacagcccgctaccacacacagatgctgcgggtgcgggagttcatccgcttccaccagatccccaatcccctgcgccagcgcctcgaggagtacttccagcacgcctggtcctacaccaacggcatcgacatgaacgcggtgctgaagggcttccctgagtgcctgcaggctgacatctgcctgcacctgaaccgctcactgctgcagcactgcaaacccttccgaggggccaccaagggctgccttcgggccctggccatgaagttcaagaccacacatgcaccgccaggggacacactggtgcatgctggggacctgctcaccgccctgtacttcatctcccggggctccatcgagatcctgcggggcgacgtcgtcgtggccatcctggggaagaatgacatctttggggagcctctgaacctgtatgcaaggcctggcaagtcgaacggggatgtgcgggccctcacctactgtgacctacacaagatccatcgggacgacctgctggaggtgctggacatgtaccctgagttctccgaccacttctggtccagcctggagatcaccttcaacctgcgagataccaacatgatcccgggctcccccggcagtacggagttagagggtggcttcagtcggcaacgcaagcgcaagttgtccttccgcaggcgcacggacaaggacacggagcagccaggggaggtgtcggccttggggccgggccgggcgggggcagggccgagtagccggggccggccgggggggccgtggggggagagcccgtccagtggcccctccagccctgagagcagtgaggatgagggcccaggccgcagctccagccccctccgcctggtgcccttctccagccccaggccccccggagagccgccgggtggggagcccctgatggaggactgcgagaagagcagcgacacttgcaaccccctgtcaggcgccttctcaggagtgtccaacattttcagcttctggggggacagtcggggccgccagtaccaggagctccctcgatgccccgcccccacccccagcctcctcaacatccccctctccagcccgggtcggcggccccggggcgacgtggagagcaggctggatgccctccagcgccagctcaacaggctggagacccggctgagtgcagacatggccactgtcctgcagctgctacagaggcagatgacgctggtcccgcccgcctacagtgctgtgaccaccccggggcctggccccacttccacatccccgctgttgcccgtcagccccctccccaccctcaccttggactcgctttctcaggtttcccagttcatggcgtgtgaggagctgcccccgggggccccagagcttccccaagaaggccccacacgacgcctctccctaccgggccagctgggggccctcacctcccagcccctgcacagacacggctcggacccgggcagttagtggggctgcccagtgtggacacgtggctcacccagggatcaaggcgctgctgggccgctccccttggaggccctgctcaggaggccctgaccgtggaaggggagaggaactcgaaagcacagctcctcccccagcccttgggaccatcttctcctgcagtcccctgggccccagtgagaggggcaggggcagggccggcagtaggtggggcctgtggtccccccactgccctgagggcattagctggtctaactgcccggaggcacccggccctgggccttaggcacctcaaggacttttctgctatttactgctcttattgttaaggataataattaaggatcatatgaataattaatgaagatgctgatgactatgaataataaataattatcctgaggaga

SEQ ID NO: 90 - DNA, 3884 bp, Homo sapiens
  source 1..3884: mol_type = genomic DNA
  misc_feature 1..3884: note = cDNA of KCNH2 gene SNP c.138C>G (p.Asp46Glu)
atgccggtgcggaggggccacgtcgcgccgcagaacaccttcctggacaccatcatccgcaagtttgagggccagagccgtaagttcatcatcgccaacgctcgggtggagaactgcgccgtcatctactgcaacgagggcttctgcgagctgtgcggctactcgcgggccgaggtgatgcagcgaccctgcacctgcgacttcctgcacgggccgcgcacgcagcgccgcgctgccgcgcagatcgcgcaggcactgctgggcgccgaggagcgcaaagtggaaatcgccttctaccggaaagatgggagctgcttcctatgtctggtggatgtggtgcccgtgaagaacgaggatggggctgtcatcatgttcatcctcaatttcgaggtggtgatggagaaggacatggtggggtccccggctcatgacaccaaccaccggggcccccccaccagctggctggccccaggccgcgccaagaccttccgcctgaagctgcccgcgctgctggcgctgacggcccgggagtcgtcggtgcggtcgggcggcgcgggcggcgcgggcgccccgggggccgtggtggtggacgtggacctgacgcccgcggcacccagcagcgagtcgctggccctggacgaagtgacagccatggacaaccacgtggcagggctcgggcccgcggaggagcggcgtgcgctggtgggtcccggctctccgccccgcagcgcgcccggccagctcccatcgccccgggcgcacagcctcaaccccgacgcctcgggctccagctgcagcctggcccggacgcgctcccgagaaagctgcgccagcgtgcgccgcgcctcgtcggccgacgacatcgaggccatgcgcgccggggtgctgcccccgccaccgcgccacgccagcaccggggccatgcacccactgcgcagcggcttgctcaactccacctcggactccgacctcgtgcgctaccgcaccattagcaagattccccaaatcaccctcaactttgtggacctcaagggcgaccccttcttggcttcgcccaccagtgaccgtgagatcatagcacctaagataaaggagcgaacccacaatgtcactgagaaggtcacccaggtcctgtccctgggcgccgacgtgctgcctgagtacaagctgcaggcaccgcgcatccaccgctggaccatcctgcattacagccccttcaaggccgtgtgggactggctcatcctgctgctggtcatctacacggctgtcttcacaccctactcggctgccttcctgctgaaggagacggaagaaggcccgcctgctaccgagtgtggctacgcctgccagccgctggctgtggtggacctcatcgtggacatcatgttcattgtggacatcctcatcaacttccgcaccacctacgtcaatgccaacgaggaggtggtcagccaccccggccgcatcgccgtccactacttcaagggctggttcctcatcgacatggtggccgccatccccttcgacctgctcatcttcggctctggctctgaggagctgatcgggctgctgaagactgcgcggctgctgcggctggtgcgcgtggcgcggaagctggatcgctactcagagtacggcgcggccgtgctgttcttgctcatgtgcacctttgcgctcatcgcgcactggctagcctgcatctggtacgccatcggcaacatggagcagccacacatggactcacgcatcggctggctgcacaacctgggcgaccagataggcaaaccctacaacagcagcggcctgggcggcccctccatcaaggacaagtatgtgacggcgctctacttcaccttcagcagcctcaccagtgtgggcttcggcaacgtctctcccaacaccaactcagagaagatcttctccatctgcgtcatgctcattggctccctcatgtatgctagcatcttcggcaacgtgtcggccatcatccagcggctgtactcgggcacagcccgctaccacacacagatgctgcgggtgcgggagttcatccgcttccaccagatccccaatcccctgcgccagcgcctcgaggagtacttccagcacgcctggtcctacaccaacggcatcgacatgaacgcggtgctgaagggcttccctgagtgcctgcaggctgacatctgcctgcacctgaaccgctcactgctgcagcactgcaaacccttccgaggggccaccaagggctgccttcgggccctggccatgaagttcaagaccacacatgcaccgccaggggacacactggtgcatgctggggacctgctcaccgccctgtacttcatctcccggggctccatcgagatcctgcggggcgacgtcgtcgtggccatcctggggaagaatgacatctttggggagcctctgaacctgtatgcaaggcctggcaagtcgaacggggatgtgcgggccctcacctactgtgacctacacaagatccatcgggacgacctgctggaggtgctggacatgtaccctgagttctccgaccacttctggtccagcctggagatcaccttcaacctgcgagataccaacatgatcccgggctcccccggcagtacggagttagagggtggcttcagtcggcaacgcaagcgcaagttgtccttccgcaggcgcacggacaaggacacggagcagccaggggaggtgtcggccttggggccgggccgggcgggggcagggccgagtagccggggccggccgggggggccgtggggggagagcccgtccagtggcccctccagccctgagagcagtgaggatgagggcccaggccgcagctccagccccctccgcctggtgcccttctccagccccaggccccccggagagccgccgggtggggagcccctgatggaggactgcgagaagagcagcgacacttgcaaccccctgtcaggcgccttctcaggagtgtccaacattttcagcttctggggggacagtcggggccgccagtaccaggagctccctcgatgccccgcccccacccccagcctcctcaacatccccctctccagcccgggtcggcggccccggggcgacgtggagagcaggctggatgccctccagcgccagctcaacaggctggagacccggctgagtgcagacatggccactgtcctgcagctgctacagaggcagatgacgctggtcccgcccgcctacagtgctgtgaccaccccggggcctggccccacttccacatccccgctgttgcccgtcagccccctccccaccctcaccttggactcgctttctcaggtttcccagttcatggcgtgtgaggagctgcccccgggggccccagagcttccccaagaaggccccacacgacgcctctccctaccgggccagctgggggccctcacctcccagcccctgcacagacacggctcggacccgggcagttagtggggctgcccagtgtggacacgtggctcacccagggatcaaggcgctgctgggccgctccccttggaggccctgctcaggaggccctgaccgtggaaggggagaggaactcgaaagcacagctcctcccccagcccttgggaccatcttctcctgcagtcccctgggccccagtgagaggggcaggggcagggccggcagtaggtggggcctgtggtccccccactgccctgagggcattagctggtctaactgcccggaggcacccggccctgggccttaggcacctcaaggacttttctgctatttactgctcttattgttaaggataataattaaggatcatatgaataattaatgaagatgctgatgactatgaataataaataattatcctgaggaga

SEQ ID NO: 91 - DNA, 3884 bp, Homo sapiens
  source 1..3884: mol_type = genomic DNA
  misc_feature 1..3884: note = cDNA of KCNH2 gene SNP c.1391T>C (p.Ile464Thr)
atgccggtgcggaggggccacgtcgcgccgcagaacaccttcctggacaccatcatccgcaagtttgagggccagagccgtaagttcatcatcgccaacgctcgggtggagaactgcgccgtcatctactgcaacgacggcttctgcgagctgtgcggctactcgcgggccgaggtgatgcagcgaccctgcacctgcgacttcctgcacgggccgcgcacgcagcgccgcgctgccgcgcagatcgcgcaggcactgctgggcgccgaggagcgcaaagtggaaatcgccttctaccggaaagatgggagctgcttcctatgtctggtggatgtggtgcccgtgaagaacgaggatggggctgtcatcatgttcatcctcaatttcgaggtggtgatggagaaggacatggtggggtccccggctcatgacaccaaccaccggggcccccccaccagctggctggccccaggccgcgccaagaccttccgcctgaagctgcccgcgctgctggcgctgacggcccgggagtcgtcggtgcggtcgggcggcgcgggcggcgcgggcgccccgggggccgtggtggtggacgtggacctgacgcccgcggcacccagcagcgagtcgctggccctggacgaagtgacagccatggacaaccacgtggcagggctcgggcccgcggaggagcggcgtgcgctggtgggtcccggctctccgccccgcagcgcgcccggccagctcccatcgccccgggcgcacagcctcaaccccgacgcctcgggctccagctgcagcctggcccggacgcgctcccgagaaagctgcgccagcgtgcgccgcgcctcgtcggccgacgacatcgaggccatgcgcgccggggtgctgcccccgccaccgcgccacgccagcaccggggccatgcacccactgcgcagcggcttgctcaactccacctcggactccgacctcgtgcgctaccgcaccattagcaagattccccaaatcaccctcaactttgtggacctcaagggcgaccccttcttggcttcgcccaccagtgaccgtgagatcatagcacctaagataaaggagcgaacccacaatgtcactgagaaggtcacccaggtcctgtccctgggcgccgacgtgctgcctgagtacaagctgcaggcaccgcgcatccaccgctggaccatcctgcattacagccccttcaaggccgtgtgggactggctcatcctgctgctggtcatctacacggctgtcttcacaccctactcggctgccttcctgctgaaggagacggaagaaggcccgcctgctaccgagtgtggctacgcctgccagccgctggctgtggtggacctcatcgtggacatcatgttcactgtggacatcctcatcaacttccgcaccacctacgtcaatgccaacgaggaggtggtcagccaccccggccgcatcgccgtccactacttcaagggctggttcctcatcgacatggtggccgccatccccttcgacctgctcatcttcggctctggctctgaggagctgatcgggctgctgaagactgcgcggctgctgcggctggtgcgcgtggcgcggaagctggatcgctactcagagtacggcgcggccgtgctgttcttgctcatgtgcacctttgcgctcatcgcgcactggctagcctgcatctggtacgccatcggcaacatggagcagccacacatggactcacgcatcggctggctgcacaacctgggcgaccagataggcaaaccctacaacagcagcggcctgggcggcccctccatcaaggacaagtatgtgacggcgctctacttcaccttcagcagcctcaccagtgtgggcttcggcaacgtctctcccaacaccaactcagagaagatcttctccatctgcgtcatgctcattggctccctcatgtatgctagcatcttcggcaacgtgtcggccatcatccagcggctgtactcgggcacagcccgctaccacacacagatgctgcgggtgcgggagttcatccgcttccaccagatccccaatcccctgcgccagcgcctcgaggagtacttccagcacgcctggtcctacaccaacggcatcgacatgaacgcggtgctgaagggcttccctgagtgcctgcaggctgacatctgcctgcacctgaaccgctcactgctgcagcactgcaaacccttccgaggggccaccaagggctgccttcgggccctggccatgaagttcaagaccacacatgcaccgccaggggacacactggtgcatgctggggacctgctcaccgccctgtacttcatctcccggggctccatcgagatcctgcggggcgacgtcgtcgtggccatcctggggaagaatgacatctttggggagcctctgaacctgtatgcaaggcctggcaagtcgaacggggatgtgcgggccctcacctactgtgacctacacaagatccatcgggacgacctgctggaggtgctggacatgtaccctgagttctccgaccacttctggtccagcctggagatcaccttcaacctgcgagataccaacatgatcccgggctcccccggcagtacggagttagagggtggcttcagtcggcaacgcaagcgcaagttgtccttccgcaggcgcacggacaaggacacggagcagccaggggaggtgtcggccttggggccgggccgggcgggggcagggccgagtagccggggccggccgggggggccgtggggggagagcccgtccagtggcccctccagccctgagagcagtgaggatgagggcccaggccgcagctccagccccctccgcctggtgcccttctccagccccaggccccccggagagccgccgggtggggagcccctgatggaggactgcgagaagagcagcgacacttgcaaccccctgtcaggcgccttctcaggagtgtccaacattttcagcttctggggggacagtcggggccgccagtaccaggagctccctcgatgccccgcccccacccccagcctcctcaacatccccctctccagcccgggtcggcggccccggggcgacgtggagagcaggctggatgccctccagcgccagctcaacaggctggagacccggctgagtgcagacatggccactgtcctgcagctgctacagaggcagatgacgctggtcccgcccgcctacagtgctgtgaccaccccggggcctggccccacttccacatccccgctgttgcccgtcagccccctccccaccctcaccttggactcgctttctcaggtttcccagttcatggcgtgtgaggagctgcccccgggggccccagagcttccccaagaaggccccacacgacgcctctccctaccgggccagctgggggccctcacctcccagcccctgcacagacacggctcggacccgggcagttagtggggctgcccagtgtggacacgtggctcacccagggatcaaggcgctgctgggccgctccccttggaggccctgctcaggaggccctgaccgtggaaggggagaggaactcgaaagcacagctcctcccccagcccttgggaccatcttctcctgcagtcccctgggccccagtgagaggggcaggggcagggccggcagtaggtggggcctgtggtccccccactgccctgagggcattagctggtctaactgcccggaggcacccggccctgggccttaggcacctcaaggacttttctgctatttactgctcttattgttaaggataataattaaggatcatatgaataattaatgaagatgctgatgactatgaataataaataattatcctgaggaga

SEQ ID NO: 92 - DNA, 3884 bp, Homo sapiens
  source 1..3884: mol_type = genomic DNA
  misc_feature 1..3884: note = cDNA of KCNH2 gene SNP c.1394T>C (p.Val465Ala)
atgccggtgcggaggggccacgtcgcgccgcagaacaccttcctggacaccatcatccgcaagtttgagggccagagccgtaagttcatcatcgccaacgctcgggtggagaactgcgccgtcatctactgcaacgacggcttctgcgagctgtgcggctactcgcgggccgaggtgatgcagcgaccctgcacctgcgacttcctgcacgggccgcgcacgcagcgccgcgctgccgcgcagatcgcgcaggcactgctgggcgccgaggagcgcaaagtggaaatcgccttctaccggaaagatgggagctgcttcctatgtctggtggatgtggtgcccgtgaagaacgaggatggggctgtcatcatgttcatcctcaatttcgaggtggtgatggagaaggacatggtggggtccccggctcatgacaccaaccaccggggcccccccaccagctggctggccccaggccgcgccaagaccttccgcctgaagctgcccgcgctgctggcgctgacggcccgggagtcgtcggtgcggtcgggcggcgcgggcggcgcgggcgccccgggggccgtggtggtggacgtggacctgacgcccgcggcacccagcagcgagtcgctggccctggacgaagtgacagccatggacaaccacgtggcagggctcgggcccgcggaggagcggcgtgcgctggtgggtcccggctctccgccccgcagcgcgcccggccagctcccatcgccccgggcgcacagcctcaaccccgacgcctcgggctccagctgcagcctggcccggacgcgctcccgagaaagctgcgccagcgtgcgccgcgcctcgtcggccgacgacatcgaggccatgcgcgccggggtgctgcccccgccaccgcgccacgccagcaccggggccatgcacccactgcgcagcggcttgctcaactccacctcggactccgacctcgtgcgctaccgcaccattagcaagattccccaaatcaccctcaactttgtggacctcaagggcgaccccttcttggcttcgcccaccagtgaccgtgagatcatagcacctaagataaaggagcgaacccacaatgtcactgagaaggtcacccaggtcctgtccctgggcgccgacgtgctgcctgagtacaagctgcaggcaccgcgcatccaccgctggaccatcctgcattacagccccttcaaggccgtgtgggactggctcatcctgctgctggtcatctacacggctgtcttcacaccctactcggctgccttcctgctgaaggagacggaagaaggcccgcctgctaccgagtgtggctacgcctgccagccgctggctgtggtggacctcatcgtggacatcatgttcattgcggacatcctcatcaacttccgcaccacctacgtcaatgccaacgaggaggtggtcagccaccccggccgcatcgccgtccactacttcaagggctggttcctcatcgacatggtggccgccatccccttcgacctgctcatcttcggctctggctctgaggagctgatcgggctgctgaagactgcgcggctgctgcggctggtgcgcgtggcgcggaagctggatcgctactcagagtacggcgcggccgtgctgttcttgctcatgtgcacctttgcgctcatcgcgcactggctagcctgcatctggtacgccatcggcaacatggagcagccacacatggactcacgcatcggctggctgcacaacctgggcgaccagataggcaaaccctacaacagcagcggcctgggcggcccctccatcaaggacaagtatgtgacggcgctctacttcaccttcagcagcctcaccagtgtgggcttcggcaacgtctctcccaacaccaactcagagaagatcttctccatctgcgtcatgctcattggctccctcatgtatgctagcatcttcggcaacgtgtcggccatcatccagcggctgtactcgggcacagcccgctaccacacacagatgctgcgggtgcgggagttcatccgcttccaccagatccccaatcccctgcgccagcgcctcgaggagtacttccagcacgcctggtcctacaccaacggcatcgacatgaacgcggtgctgaagggcttccctgagtgcctgcaggctgacatctgcctgcacctgaaccgctcactgctgcagcactgcaaacccttccgaggggccaccaagggctgccttcgggccctggccatgaagttcaagaccacacatgcaccgccaggggacacactggtgcatgctggggacctgctcaccgccctgtacttcatctcccggggctccatcgagatcctgcggggcgacgtcgtcgtggccatcctggggaagaatgacatctttggggagcctctgaacctgtatgcaaggcctggcaagtcgaacggggatgtgcgggccctcacctactgtgacctacacaagatccatcgggacgacctgctggaggtgctggacatgtaccctgagttctccgaccacttctggtccagcctggagatcaccttcaacctgcgagataccaacatgatcccgggctcccccggcagtacggagttagagggtggcttcagtcggcaacgcaagcgcaagttgtccttccgcaggcgcacggacaaggacacggagcagccaggggaggtgtcggccttggggccgggccgggcgggggcagggccgagtagccggggccggccgggggggccgtggggggagagcccgtccagtggcccctccagccctgagagcagtgaggatgagggcccaggccgcagctccagccccctccgcctggtgcccttctccagccccaggccccccggagagccgccgggtggggagcccctgatggaggactgcgagaagagcagcgacacttgcaaccccctgtcaggcgccttctcaggagtgtccaacattttcagcttctggggggacagtcggggccgccagtaccaggagctccctcgatgccccgcccccacccccagcctcctcaacatccccctctccagcccgggtcggcggccccggggcgacgtggagagcaggctggatgccctccagcgccagctcaacaggctggagacccggctgagtgcagacatggccactgtcctgcagctgctacagaggcagatgacgctggtcccgcccgcctacagtgctgtgaccaccccggggcctggccccacttccacatccccgctgttgcccgtcagccccctccccaccctcaccttggactcgctttctcaggtttcccagttcatggcgtgtgaggagctgcccccgggggccccagagcttccccaagaaggccccacacgacgcctctccctaccgggccagctgggggccctcacctcccagcccctgcacagacacggctcggacccgggcagttagtggggctgcccagtgtggacacgtggctcacccagggatcaaggcgctgctgggccgctccccttggaggccctgctcaggaggccctgaccgtggaaggggagaggaactcgaaagcacagctcctcccccagcccttgggaccatcttctcctgcagtcccctgggccccagtgagaggggcaggggcagggccggcagtaggtggggcctgtggtccccccactgccctgagggcattagctggtctaactgcccggaggcacccggccctgggccttaggcacctcaaggacttttctgctatttactgctcttattgttaaggataataattaaggatcatatgaataattaatgaagatgctgatgactatgaataataaataattatcctgaggaga

SEQ ID NO: 93 - DNA, 3884 bp, Homo sapiens
  source 1..3884: mol_type = genomic DNA
  misc_feature 1..3884: note = cDNA of KCNH2 gene SNP c.1396G>T (p.Asp466Tyr)
atgccggtgcggaggggccacgtcgcgccgcagaacaccttcctggacaccatcatccgcaagtttgagggccagagccgtaagttcatcatcgccaacgctcgggtggagaactgcgccgtcatctactgcaacgacggcttctgcgagctgtgcggctactcgcgggccgaggtgatgcagcgaccctgcacctgcgacttcctgcacgggccgcgcacgcagcgccgcgctgccgcgcagatcgcgcaggcactgctgggcgccgaggagcgcaaagtggaaatcgccttctaccggaaagatgggagctgcttcctatgtctggtggatgtggtgcccgtgaagaacgaggatggggctgtcatcatgttcatcctcaatttcgaggtggtgatggagaaggacatggtggggtccccggctcatgacaccaaccaccggggcccccccaccagctggctggccccaggccgcgccaagaccttccgcctgaagctgcccgcgctgctggcgctgacggcccgggagtcgtcggtgcggtcgggcggcgcgggcggcgcgggcgccccgggggccgtggtggtggacgtggacctgacgcccgcggcacccagcagcgagtcgctggccctggacgaagtgacagccatggacaaccacgtggcagggctcgggcccgcggaggagcggcgtgcgctggtgggtcccggctctccgccccgcagcgcgcccggccagctcccatcgccccgggcgcacagcctcaaccccgacgcctcgggctccagctgcagcctggcccggacgcgctcccgagaaagctgcgccagcgtgcgccgcgcctcgtcggccgacgacatcgaggccatgcgcgccggggtgctgcccccgccaccgcgccacgccagcaccggggccatgcacccactgcgcagcggcttgctcaactccacctcggactccgacctcgtgcgctaccgcaccattagcaagattccccaaatcaccctcaactttgtggacctcaagggcgaccccttcttggcttcgcccaccagtgaccgtgagatcatagcacctaagataaaggagcgaacccacaatgtcactgagaaggtcacccaggtcctgtccctgggcgccgacgtgctgcctgagtacaagctgcaggcaccgcgcatccaccgctggaccatcctgcattacagccccttcaaggccgtgtgggactggctcatcctgctgctggtcatctacacggctgtcttcacaccctactcggctgccttcctgctgaaggagacggaagaaggcccgcctgctaccgagtgtggctacgcctgccagccgctggctgtggtggacctcatcgtggacatcatgttcattgtgtacatcctcatcaacttccgcaccacctacgtcaatgccaacgaggaggtggtcagccaccccggccgcatcgccgtccactacttcaagggctggttcctcatcgacatggtggccgccatccccttcgacctgctcatcttcggctctggctctgaggagctgatcgggctgctgaagactgcgcggctgctgcggctggtgcgcgtggcgcggaagctggatcgctactcagagtacggcgcggccgtgctgttcttgctcatgtgcacctttgcgctcatcgcgcactggctagcctgcatctggtacgccatcggcaacatggagcagccacacatggactcacgcatcggctggctgcacaacctgggcgaccagataggcaaaccctacaacagcagcggcctgggcggcccctccatcaaggacaagtatgtgacggcgctctacttcaccttcagcagcctcaccagtgtgggcttcggcaacgtctctcccaacaccaactcagagaagatcttctccatctgcgtcatgctcattggctccctcatgtatgctagcatcttcggcaacgtgtcggccatcatccagcggctgtactcgggcacagcccgctaccacacacagatgctgcgggtgcgggagttcatccgcttccaccagatccccaatcccctgcgccagcgcctcgaggagtacttccagcacgcctggtcctacaccaacggcatcgacatgaacgcggtgctgaagggcttccctgagtgcctgcaggctgacatctgcctgcacctgaaccgctcactgctgcagcactgcaaacccttccgaggggccaccaagggctgccttcgggccctggccatgaagttcaagaccacacatgcaccgccaggggacacactggtgcatgctggggacctgctcaccgccctgtacttcatctcccggggctccatcgagatcctgcggggcgacgtcgtcgtggccatcctggggaagaatgacatctttggggagcctctgaacctgtatgcaaggcctggcaagtcgaacggggatgtgcgggccctcacctactgtgacctacacaagatccatcgggacgacctgctggaggtgctggacatgtaccctgagttctccgaccacttctggtccagcctggagatcaccttcaacctgcgagataccaacatgatcccgggctcccccggcagtacggagttagagggtggcttcagtcggcaacgcaagcgcaagttgtccttccgcaggcgcacggacaaggacacggagcagccaggggaggtgtcggccttggggccgggccgggcgggggcagggccgagtagccggggccggccgggggggccgtggggggagagcccgtccagtggcccctccagccctgagagcagtgaggatgagggcccaggccgcagctccagccccctccgcctggtgcccttctccagccccaggccccccggagagccgccgggtggggagcccctgatggaggactgcgagaagagcagcgacacttgcaaccccctgtcaggcgccttctcaggagtgtccaacattttcagcttctggggggacagtcggggccgccagtaccaggagctccctcgatgccccgcccccacccccagcctcctcaacatccccctctccagcccgggtcggcggccccggggcgacgtggagagcaggctggatgccctccagcgccagctcaacaggctggagacccggctgagtgcagacatggccactgtcctgcagctgctacagaggcagatgacgctggtcccgcccgcctacagtgctgtgaccaccccggggcctggccccacttccacatccccgctgttgcccgtcagccccctccccaccctcaccttggactcgctttctcaggtttcccagttcatggcgtgtgaggagctgcccccgggggccccagagcttccccaagaaggccccacacgacgcctctccctaccgggccagctgggggccctcacctcccagcccctgcacagacacggctcggacccgggcagttagtggggctgcccagtgtggacacgtggctcacccagggatcaaggcgctgctgggccgctccccttggaggccctgctcaggaggccctgaccgtggaaggggagaggaactcgaaagcacagctcctcccccagcccttgggaccatcttctcctgcagtcccctgggccccagtgagaggggcaggggcagggccggcagtaggtggggcctgtggtccccccactgccctgagggcattagctggtctaactgcccggaggcacccggccctgggccttaggcacctcaaggacttttctgctatttactgctcttattgttaaggataataattaaggatcatatgaataattaatgaagatgctgatgactatgaataataaataattatcctgaggaga

SEQ ID NO: 94 - DNA, 3884 bp, Homo sapiens
  source 1..3884: mol_type = genomic DNA
  misc_feature 1..3884: note = cDNA of KCNH2 gene SNP c.1397A>G (p.Asp466Gly)
atgccggtgcggaggggccacgtcgcgccgcagaacaccttcctggacaccatcatccgcaagtttgagggccagagccgtaagttcatcatcgccaacgctcgggtggagaactgcgccgtcatctactgcaacgacggcttctgcgagctgtgcggctactcgcgggccgaggtgatgcagcgaccctgcacctgcgacttcctgcacgggccgcgcacgcagcgccgcgctgccgcgcagatcgcgcaggcactgctgggcgccgaggagcgcaaagtggaaatcgccttctaccggaaagatgggagctgcttcctatgtctggtggatgtggtgcccgtgaagaacgaggatggggctgtcatcatgttcatcctcaatttcgaggtggtgatggagaaggacatggtggggtccccggctcatgacaccaaccaccggggcccccccaccagctggctggccccaggccgcgccaagaccttccgcctgaagctgcccgcgctgctggcgctgacggcccgggagtcgtcggtgcggtcgggcggcgcgggcggcgcgggcgccccgggggccgtggtggtggacgtggacctgacgcccgcggcacccagcagcgagtcgctggccctggacgaagtgacagccatggacaaccacgtggcagggctcgggcccgcggaggagcggcgtgcgctggtgggtcccggctctccgccccgcagcgcgcccggccagctcccatcgccccgggcgcacagcctcaaccccgacgcctcgggctccagctgcagcctggcccggacgcgctcccgagaaagctgcgccagcgtgcgccgcgcctcgtcggccgacgacatcgaggccatgcgcgccggggtgctgcccccgccaccgcgccacgccagcaccggggccatgcacccactgcgcagcggcttgctcaactccacctcggactccgacctcgtgcgctaccgcaccattagcaagattccccaaatcaccctcaactttgtggacctcaagggcgaccccttcttggcttcgcccaccagtgaccgtgagatcatagcacctaagataaaggagcgaacccacaatgtcactgagaaggtcacccaggtcctgtccctgggcgccgacgtgctgcctgagtacaagctgcaggcaccgcgcatccaccgctggaccatcctgcattacagccccttcaaggccgtgtgggactggctcatcctgctgctggtcatctacacggctgtcttcacaccctactcggctgccttcctgctgaaggagacggaagaaggcccgcctgctaccgagtgtggctacgcctgccagccgctggctgtggtggacctcatcgtggacatcatgttcattgtgggcatcctcatcaacttccgcaccacctacgtcaatgccaacgaggaggtggtcagccaccccggccgcatcgccgtccactacttcaagggctggttcctcatcgacatggtggccgccatccccttcgacctgctcatcttcggctctggctctgaggagctgatcgggctgctgaagactgcgcggctgctgcggctggtgcgcgtggcgcggaagctggatcgctactcagagtacggcgcggccgtgctgttcttgctcatgtgcacctttgcgctcatcgcgcactggctagcctgcatctggtacgccatcggcaacatggagcagccacacatggactcacgcatcggctggctgcacaacctgggcgaccagataggcaaaccctacaacagcagcggcctgggcggcccctccatcaaggacaagtatgtgacggcgctctacttcaccttcagcagcctcaccagtgtgggcttcggcaacgtctctcccaacaccaactcagagaagatcttctccatctgcgtcatgctcattggctccctcatgtatgctagcatcttcggcaacgtgtcggccatcatccagcggctgtactcgggcacagcccgctaccacacacagatgctgcgggtgcgggagttcatccgcttccaccagatccccaatcccctgcgccagcgcctcgaggagtacttccagcacgcctggtcctacaccaacggcatcgacatgaacgcggtgctgaagggcttccctgagtgcctgcaggctgacatctgcctgcacctgaaccgctcactgctgcagcactgcaaacccttccgaggggccaccaagggctgccttcgggccctggccatgaagttcaagaccacacatgcaccgccaggggacacactggtgcatgctggggacctgctcaccgccctgtacttcatctcccggggctccatcgagatcctgcggggcgacgtcgtcgtggccatcctggggaagaatgacatctttggggagcctctgaacctgtatgcaaggcctggcaagtcgaacggggatgtgcgggccctcacctactgtgacctacacaagatccatcgggacgacctgctggaggtgctggacatgtaccctgagttctccgaccacttctggtccagcctggagatcaccttcaacctgcgagataccaacatgatcccgggctcccccggcagtacggagttagagggtggcttcagtcggcaacgcaagcgcaagttgtccttccgcaggcgcacggacaaggacacggagcagccaggggaggtgtcggccttggggccgggccgggcgggggcagggccgagtagccggggccggccgggggggccgtggggggagagcccgtccagtggcccctccagccctgagagcagtgaggatgagggcccaggccgcagctccagccccctccgcctggtgcccttctccagccccaggccccccggagagccgccgggtggggagcccctgatggaggactgcgagaagagcagcgacacttgcaaccccctgtcaggcgccttctcaggagtgtccaacattttcagcttctggggggacagtcggggccgccagtaccaggagctccctcgatgccccgcccccacccccagcctcctcaacatccccctctccagcccgggtcggcggccccggggcgacgtggagagcaggctggatgccctccagcgccagctcaacaggctggagacccggctgagtgcagacatggccactgtcctgcagctgctacagaggcagatgacgctggtcccgcccgcctacagtgctgtgaccaccccggggcctggccccacttccacatccccgctgttgcccgtcagccccctccccaccctcaccttggactcgctttctcaggtttcccagttcatggcgtgtgaggagctgcccccgggggccccagagcttccccaagaaggccccacacgacgcctctccctaccgggccagctgggggccctcacctcccagcccctgcacagacacggctcggacccgggcagttagtggggctgcccagtgtggacacgtggctcacccagggatcaaggcgctgctgggccgctccccttggaggccctgctcaggaggccctgaccgtggaaggggagaggaactcgaaagcacagctcctcccccagcccttgggaccatcttctcctgcagtcccctgggccccagtgagaggggcaggggcagggccggcagtaggtggggcctgtggtccccccactgccctgagggcattagctggtctaactgcccggaggcacccggccctgggccttaggcacctcaaggacttttctgctatttactgctcttattgttaaggataataattaaggatcatatgaataattaatgaagatgctgatgactatgaataataaataattatcctgaggaga

SEQ ID NO: 95 - DNA, 3884 bp, Homo sapiens
  source 1..3884: mol_type = genomic DNA
  misc_feature 1..3884: note = cDNA of KCNH2 gene SNP c.1397A>T (p.Asp466Val)
atgccggtgcggaggggccacgtcgcgccgcagaacaccttcctggacaccatcatccgcaagtttgagggccagagccgtaagttcatcatcgccaacgctcgggtggagaactgcgccgtcatctactgcaacgacggcttctgcgagctgtgcggctactcgcgggccgaggtgatgcagcgaccctgcacctgcgacttcctgcacgggccgcgcacgcagcgccgcgctgccgcgcagatcgcgcaggcactgctgggcgccgaggagcgcaaagtggaaatcgccttctaccggaaagatgggagctgcttcctatgtctggtggatgtggtgcccgtgaagaacgaggatggggctgtcatcatgttcatcctcaatttcgaggtggtgatggagaaggacatggtggggtccccggctcatgacaccaaccaccggggcccccccaccagctggctggccccaggccgcgccaagaccttccgcctgaagctgcccgcgctgctggcgctgacggcccgggagtcgtcggtgcggtcgggcggcgcgggcggcgcgggcgccccgggggccgtggtggtggacgtggacctgacgcccgcggcacccagcagcgagtcgctggccctggacgaagtgacagccatggacaaccacgtggcagggctcgggcccgcggaggagcggcgtgcgctggtgggtcccggctctccgccccgcagcgcgcccggccagctcccatcgccccgggcgcacagcctcaaccccgacgcctcgggctccagctgcagcctggcccggacgcgctcccgagaaagctgcgccagcgtgcgccgcgcctcgtcggccgacgacatcgaggccatgcgcgccggggtgctgcccccgccaccgcgccacgccagcaccggggccatgcacccactgcgcagcggcttgctcaactccacctcggactccgacctcgtgcgctaccgcaccattagcaagattccccaaatcaccctcaactttgtggacctcaagggcgaccccttcttggcttcgcccaccagtgaccgtgagatcatagcacctaagataaaggagcgaacccacaatgtcactgagaaggtcacccaggtcctgtccctgggcgccgacgtgctgcctgagtacaagctgcaggcaccgcgcatccaccgctggaccatcctgcattacagccccttcaaggccgtgtgggactggctcatcctgctgctggtcatctacacggctgtcttcacaccctactcggctgccttcctgctgaaggagacggaagaaggcccgcctgctaccgagtgtggctacgcctgccagccgctggctgtggtggacctcatcgtggacatcatgttcattgtggtcatcctcatcaacttccgcaccacctacgtcaatgccaacgaggaggtggtcagccaccccggccgcatcgccgtccactacttcaagggctggttcctcatcgacatggtggccgccatccccttcgacctgctcatcttcggctctggctctgaggagctgatcgggctgctgaagactgcgcggctgctgcggctggtgcgcgtggcgcggaagctggatcgctactcagagtacggcgcggccgtgctgttcttgctcatgtgcacctttgcgctcatcgcgcactggctagcctgcatctggtacgccatcggcaacatggagcagccacacatggactcacgcatcggctggctgcacaacctgggcgaccagataggcaaaccctacaacagcagcggcctgggcggcccctccatcaaggacaagtatgtgacggcgctctacttcaccttcagcagcctcaccagtgtgggcttcggcaacgtctctcccaacaccaactcagagaagatcttctccatctgcgtcatgctcattggctccctcatgtatgctagcatcttcggcaacgtgtcggccatcatccagcggctgtactcgggcacagcccgctaccacacacagatgctgcgggtgcgggagttcatccgcttccaccagatccccaatcccctgcgccagcgcctcgaggagtacttccagcacgcctggtcctacaccaacggcatcgacatgaacgcggtgctgaagggcttccctgagtgcctgcaggctgacatctgcctgcacctgaaccgctcactgctgcagcactgcaaacccttccgaggggccaccaagggctgccttcgggccctggccatgaagttcaagaccacacatgcaccgccaggggacacactggtgcatgctggggacctgctcaccgccctgtacttcatctcccggggctccatcgagatcctgcggggcgacgtcgtcgtggccatcctggggaagaatgacatctttggggagcctctgaacctgtatgcaaggcctggcaagtcgaacggggatgtgcgggccctcacctactgtgacctacacaagatccatcgggacgacctgctggaggtgctggacatgtaccctgagttctccgaccacttctggtccagcctggagatcaccttcaacctgcgagataccaacatgatcccgggctcccccggcagtacggagttagagggtggcttcagtcggcaacgcaagcgcaagttgtccttccgcaggcgcacggacaaggacacggagcagccaggggaggtgtcggccttggggccgggccgggcgggggcagggccgagtagccggggccggccgggggggccgtggggggagagcccgtccagtggcccctccagccctgagagcagtgaggatgagggcccaggccgcagctccagccccctccgcctggtgcccttctccagccccaggccccccggagagccgccgggtggggagcccctgatggaggactgcgagaagagcagcgacacttgcaaccccctgtcaggcgccttctcaggagtgtccaacattttcagcttctggggggacagtcggggccgccagtaccaggagctccctcgatgccccgcccccacccccagcctcctcaacatccccctctccagcccgggtcggcggccccggggcgacgtggagagcaggctggatgccctccagcgccagctcaacaggctggagacccggctgagtgcagacatggccactgtcctgcagctgctacagaggcagatgacgctggtcccgcccgcctacagtgctgtgaccaccccggggcctggccccacttccacatccccgctgttgcccgtcagccccctccccaccctcaccttggactcgctttctcaggtttcccagttcatggcgtgtgaggagctgcccccgggggccccagagcttccccaagaaggccccacacgacgcctctccctaccgggccagctgggggccctcacctcccagcccctgcacagacacggctcggacccgggcagttagtggggctgcccagtgtggacacgtggctcacccagggatcaaggcgctgctgggccgctccccttggaggccctgctcaggaggccctgaccgtggaaggggagaggaactcgaaagcacagctcctcccccagcccttgggaccatcttctcctgcagtcccctgggccccagtgagaggggcaggggcagggccggcagtaggtggggcctgtggtccccccactgccctgagggcattagctggtctaactgcccggaggcacccggccctgggccttaggcacctcaaggacttttctgctatttactgctcttattgttaaggataataattaaggatcatatgaataattaatgaagatgctgatgactatgaataataaataattatcctgaggaga

SEQ ID NO: 96 - DNA, 3884 bp, Homo sapiens
  source 1..3884: mol_type = genomic DNA
  misc_feature 1..3884: note = cDNA of KCNH2 gene SNP c.1408A>G (p.Asn470Asp)
atgccggtgcggaggggccacgtcgcgccgcagaacaccttcctggacaccatcatccgcaagtttgagggccagagccgtaagttcatcatcgccaacgctcgggtggagaactgcgccgtcatctactgcaacgacggcttctgcgagctgtgcggctactcgcgggccgaggtgatgcagcgaccctgcacctgcgacttcctgcacgggccgcgcacgcagcgccgcgctgccgcgcagatcgcgcaggcactgctgggcgccgaggagcgcaaagtggaaatcgccttctaccggaaagatgggagctgcttcctatgtctggtggatgtggtgcccgtgaagaacgaggatggggctgtcatcatgttcatcctcaatttcgaggtggtgatggagaaggacatggtggggtccccggctcatgacaccaaccaccggggcccccccaccagctggctggccccaggccgcgccaagaccttccgcctgaagctgcccgcgctgctggcgctgacggcccgggagtcgtcggtgcggtcgggcggcgcgggcggcgcgggcgccccgggggccgtggtggtggacgtggacctgacgcccgcggcacccagcagcgagtcgctggccctggacgaagtgacagccatggacaaccacgtggcagggctcgggcccgcggaggagcggcgtgcgctggtgggtcccggctctccgccccgcagcgcgcccggccagctcccatcgccccgggcgcacagcctcaaccccgacgcctcgggctccagctgcagcctggcccggacgcgctcccgagaaagctgcgccagcgtgcgccgcgcctcgtcggccgacgacatcgaggccatgcgcgccggggtgctgcccccgccaccgcgccacgccagcaccggggccatgcacccactgcgcagcggcttgctcaactccacctcggactccgacctcgtgcgctaccgcaccattagcaagattccccaaatcaccctcaactttgtggacctcaagggcgaccccttcttggcttcgcccaccagtgaccgtgagatcatagcacctaagataaaggagcgaacccacaatgtcactgagaaggtcacccaggtcctgtccctgggcgccgacgtgctgcctgagtacaagctgcaggcaccgcgcatccaccgctggaccatcctgcattacagccccttcaaggccgtgtgggactggctcatcctgctgctggtcatctacacggctgtcttcacaccctactcggctgccttcctgctgaaggagacggaagaaggcccgcctgctaccgagtgtggctacgcctgccagccgctggctgtggtggacctcatcgtggacatcatgttcattgtggacatcctcatcgacttccgcaccacctacgtcaatgccaacgaggaggtggtcagccaccccggccgcatcgccgtccactacttcaagggctggttcctcatcgacatggtggccgccatccccttcgacctgctcatcttcggctctggctctgaggagctgatcgggctgctgaagactgcgcggctgctgcggctggtgcgcgtggcgcggaagctggatcgctactcagagtacggcgcggccgtgctgttcttgctcatgtgcacctttgcgctcatcgcgcactggctagcctgcatctggtacgccatcggcaacatggagcagccacacatggactcacgcatcggctggctgcacaacctgggcgaccagataggcaaaccctacaacagcagcggcctgggcggcccctccatcaaggacaagtatgtgacggcgctctacttcaccttcagcagcctcaccagtgtgggcttcggcaacgtctctcccaacaccaactcagagaagatcttctccatctgcgtcatgctcattggctccctcatgtatgctagcatcttcggcaacgtgtcggccatcatccagcggctgtactcgggcacagcccgctaccacacacagatgctgcgggtgcgggagttcatccgcttccaccagatccccaatcccctgcgccagcgcctcgaggagtacttccagcacgcctggtcctacaccaacggcatcgacatgaacgcggtgctgaagggcttccctgagtgcctgcaggctgacatctgcctgcacctgaaccgctcactgctgcagcactgcaaacccttccgaggggccaccaagggctgccttcgggccctggccatgaagttcaagaccacacatgcaccgccaggggacacactggtgcatgctggggacctgctcaccgccctgtacttcatctcccggggctccatcgagatcctgcggggcgacgtcgtcgtggccatcctggggaagaatgacatctttggggagcctctgaacctgtatgcaaggcctggcaagtcgaacggggatgtgcgggccctcacctactgtgacctacacaagatccatcgggacgacctgctggaggtgctggacatgtaccctgagttctccgaccacttctggtccagcctggagatcaccttcaacctgcgagataccaacatgatcccgggctcccccggcagtacggagttagagggtggcttcagtcggcaacgcaagcgcaagttgtccttccgcaggcgcacggacaaggacacggagcagccaggggaggtgtcggccttggggccgggccgggcgggggcagggccgagtagccggggccggccgggggggccgtggggggagagcccgtccagtggcccctccagccctgagagcagtgaggatgagggcccaggccgcagctccagccccctccgcctggtgcccttctccagccccaggccccccggagagccgccgggtggggagcccctgatggaggactgcgagaagagcagcgacacttgcaaccccctgtcaggcgccttctcaggagtgtccaacattttcagcttctggggggacagtcggggccgccagtaccaggagctccctcgatgccccgcccccacccccagcctcctcaacatccccctctccagcccgggtcggcggccccggggcgacgtggagagcaggctggatgccctccagcgccagctcaacaggctggagacccggctgagtgcagacatggccactgtcctgcagctgctacagaggcagatgacgctggtcccgcccgcctacagtgctgtgaccaccccggggcctggccccacttccacatccccgctgttgcccgtcagccccctccccaccctcaccttggactcgctttctcaggtttcccagttcatggcgtgtgaggagctgcccccgggggccccagagcttccccaagaaggccccacacgacgcctctccctaccgggccagctgggggccctcacctcccagcccctgcacagacacggctcggacccgggcagttagtggggctgcccagtgtggacacgtggctcacccagggatcaaggcgctgctgggccgctccccttggaggccctgctcaggaggccctgaccgtggaaggggagaggaactcgaaagcacagctcctcccccagcccttgggaccatcttctcctgcagtcccctgggccccagtgagaggggcaggggcagggccggcagtaggtggggcctgtggtccccccactgccctgagggcattagctggtctaactgcccggaggcacccggccctgggccttaggcacctcaaggacttttctgctatttactgctcttattgttaaggataataattaaggatcatatgaataattaatgaagatgctgatgactatgaataataaataattatcctgaggaga

SEQ ID NO: 97 - DNA, 3884 bp, Homo sapiens
  source 1..3884: mol_type = genomic DNA
  misc_feature 1..3884: note = cDNA of KCNH2 gene SNP c.140G>T (p.Gly47Val)
atgccggtgcggaggggccacgtcgcgccgcagaacaccttcctggacaccatcatccgcaagtttgagggccagagccgtaagttcatcatcgccaacgctcgggtggagaactgcgccgtcatctactgcaacgacgtcttctgcgagctgtgcggctactcgcgggccgaggtgatgcagcgaccctgcacctgcgacttcctgcacgggccgcgcacgcagcgccgcgctgccgcgcagatcgcgcaggcactgctgggcgccgaggagcgcaaagtggaaatcgccttctaccggaaagatgggagctgcttcctatgtctggtggatgtggtgcccgtgaagaacgaggatggggctgtcatcatgttcatcctcaatttcgaggtggtgatggagaaggacatggtggggtccccggctcatgacaccaaccaccggggcccccccaccagctggctggccccaggccgcgccaagaccttccgcctgaagctgcccgcgctgctggcgctgacggcccgggagtcgtcggtgcggtcgggcggcgcgggcggcgcgggcgccccgggggccgtggtggtggacgtggacctgacgcccgcggcacccagcagcgagtcgctggccctggacgaagtgacagccatggacaaccacgtggcagggctcgggcccgcggaggagcggcgtgcgctggtgggtcccggctctccgccccgcagcgcgcccggccagctcccatcgccccgggcgcacagcctcaaccccgacgcctcgggctccagctgcagcctggcccggacgcgctcccgagaaagctgcgccagcgtgcgccgcgcctcgtcggccgacgacatcgaggccatgcgcgccggggtgctgcccccgccaccgcgccacgccagcaccggggccatgcacccactgcgcagcggcttgctcaactccacctcggactccgacctcgtgcgctaccgcaccattagcaagattccccaaatcaccctcaactttgtggacctcaagggcgaccccttcttggcttcgcccaccagtgaccgtgagatcatagcacctaagataaaggagcgaacccacaatgtcactgagaaggtcacccaggtcctgtccctgggcgccgacgtgctgcctgagtacaagctgcaggcaccgcgcatccaccgctggaccatcctgcattacagccccttcaaggccgtgtgggactggctcatcctgctgctggtcatctacacggctgtcttcacaccctactcggctgccttcctgctgaaggagacggaagaaggcccgcctgctaccgagtgtggctacgcctgccagccgctggctgtggtggacctcatcgtggacatcatgttcattgtggacatcctcatcaacttccgcaccacctacgtcaatgccaacgaggaggtggtcagccaccccggccgcatcgccgtccactacttcaagggctggttcctcatcgacatggtggccgccatccccttcgacctgctcatcttcggctctggctctgaggagctgatcgggctgctgaagactgcgcggctgctgcggctggtgcgcgtggcgcggaagctggatcgctactcagagtacggcgcggccgtgctgttcttgctcatgtgcacctttgcgctcatcgcgcactggctagcctgcatctggtacgccatcggcaacatggagcagccacacatggactcacgcatcggctggctgcacaacctgggcgaccagataggcaaaccctacaacagcagcggcctgggcggcccctccatcaaggacaagtatgtgacggcgctctacttcaccttcagcagcctcaccagtgtgggcttcggcaacgtctctcccaacaccaactcagagaagatcttctccatctgcgtcatgctcattggctccctcatgtatgctagcatcttcggcaacgtgtcggccatcatccagcggctgtactcgggcacagcccgctaccacacacagatgctgcgggtgcgggagttcatccgcttccaccagatccccaatcccctgcgccagcgcctcgaggagtacttccagcacgcctggtcctacaccaacggcatcgacatgaacgcggtgctgaagggcttccctgagtgcctgcaggctgacatctgcctgcacctgaaccgctcactgctgcagcactgcaaacccttccgaggggccaccaagggctgccttcgggccctggccatgaagttcaagaccacacatgcaccgccaggggacacactggtgcatgctggggacctgctcaccgccctgtacttcatctcccggggctccatcgagatcctgcggggcgacgtcgtcgtggccatcctggggaagaatgacatctttggggagcctctgaacctgtatgcaaggcctggcaagtcgaacggggatgtgcgggccctcacctactgtgacctacacaagatccatcgggacgacctgctggaggtgctggacatgtaccctgagttctccgaccacttctggtccagcctggagatcaccttcaacctgcgagataccaacatgatcccgggctcccccggcagtacggagttagagggtggcttcagtcggcaacgcaagcgcaagttgtccttccgcaggcgcacggacaaggacacggagcagccaggggaggtgtcggccttggggccgggccgggcgggggcagggccgagtagccggggccggccgggggggccgtggggggagagcccgtccagtggcccctccagccctgagagcagtgaggatgagggcccaggccgcagctccagccccctccgcctggtgcccttctccagccccaggccccccggagagccgccgggtggggagcccctgatggaggactgcgagaagagcagcgacacttgcaaccccctgtcaggcgccttctcaggagtgtccaacattttcagcttctggggggacagtcggggccgccagtaccaggagctccctcgatgccccgcccccacccccagcctcctcaacatccccctctccagcccgggtcggcggccccggggcgacgtggagagcaggctggatgccctccagcgccagctcaacaggctggagacccggctgagtgcagacatggccactgtcctgcagctgctacagaggcagatgacgctggtcccgcccgcctacagtgctgtgaccaccccggggcctggccccacttccacatccccgctgttgcccgtcagccccctccccaccctcaccttggactcgctttctcaggtttcccagttcatggcgtgtgaggagctgcccccgggggccccagagcttccccaagaaggccccacacgacgcctctccctaccgggccagctgggggccctcacctcccagcccctgcacagacacggctcggacccgggcagttagtggggctgcccagtgtggacacgtggctcacccagggatcaaggcgctgctgggccgctccccttggaggccctgctcaggaggccctgaccgtggaaggggagaggaactcgaaagcacagctcctcccccagcccttgggaccatcttctcctgcagtcccctgggccccagtgagaggggcaggggcagggccggcagtaggtggggcctgtggtccccccactgccctgagggcattagctggtctaactgcccggaggcacccggccctgggccttaggcacctcaaggacttttctgctatttactgctcttattgttaaggataataattaaggatcatatgaataattaatgaagatgctgatgactatgaataataaataattatcctgaggaga

SEQ ID NO: 98 - DNA, 3884 bp, Homo sapiens
  source 1..3884: mol_type = genomic DNA
  misc_feature 1..3884: note = cDNA of KCNH2 gene SNP c.1415G>C (p.Arg472Pro)
atgccggtgcggaggggccacgtcgcgccgcagaacaccttcctggacaccatcatccgcaagtttgagggccagagccgtaagttcatcatcgccaacgctcgggtggagaactgcgccgtcatctactgcaacgacggcttctgcgagctgtgcggctactcgcgggccgaggtgatgcagcgaccctgcacctgcgacttcctgcacgggccgcgcacgcagcgccgcgctgccgcgcagatcgcgcaggcactgctgggcgccgaggagcgcaaagtggaaatcgccttctaccggaaagatgggagctgcttcctatgtctggtggatgtggtgcccgtgaagaacgaggatggggctgtcatcatgttcatcctcaatttcgaggtggtgatggagaaggacatggtggggtccccggctcatgacaccaaccaccggggcccccccaccagctggctggccccaggccgcgccaagaccttccgcctgaagctgcccgcgctgctggcgctgacggcccgggagtcgtcggtgcggtcgggcggcgcgggcggcgcgggcgccccgggggccgtggtggtggacgtggacctgacgcccgcggcacccagcagcgagtcgctggccctggacgaagtgacagccatggacaaccacgtggcagggctcgggcccgcggaggagcggcgtgcgctggtgggtcccggctctccgccccgcagcgcgcccggccagctcccatcgccccgggcgcacagcctcaaccccgacgcctcgggctccagctgcagcctggcccggacgcgctcccgagaaagctgcgccagcgtgcgccgcgcctcgtcggccgacgacatcgaggccatgcgcgccggggtgctgcccccgccaccgcgccacgccagcaccggggccatgcacccactgcgcagcggcttgctcaactccacctcggactccgacctcgtgcgctaccgcaccattagcaagattccccaaatcaccctcaactttgtggacctcaagggcgaccccttcttggcttcgcccaccagtgaccgtgagatcatagcacctaagataaaggagcgaacccacaatgtcactgagaaggtcacccaggtcctgtccctgggcgccgacgtgctgcctgagtacaagctgcaggcaccgcgcatccaccgctggaccatcctgcattacagccccttcaaggccgtgtgggactggctcatcctgctgctggtcatctacacggctgtcttcacaccctactcggctgccttcctgctgaaggagacggaagaaggcccgcctgctaccgagtgtggctacgcctgccagccgctggctgtggtggacctcatcgtggacatcatgttcattgtggacatcctcatcaacttccccaccacctacgtcaatgccaacgaggaggtggtcagccaccccggccgcatcgccgtccactacttcaagggctggttcctcatcgacatggtggccgccatccccttcgacctgctcatcttcggctctggctctgaggagctgatcgggctgctgaagactgcgcggctgctgcggctggtgcgcgtggcgcggaagctggatcgctactcagagtacggcgcggccgtgctgttcttgctcatgtgcacctttgcgctcatcgcgcactggctagcctgcatctggtacgccatcggcaacatggagcagccacacatggactcacgcatcggctggctgcacaacctgggcgaccagataggcaaaccctacaacagcagcggcctgggcggcccctccatcaaggacaagtatgtgacggcgctctacttcaccttcagcagcctcaccagtgtgggcttcggcaacgtctctcccaacaccaactcagagaagatcttctccatctgcgtcatgctcattggctccctcatgtatgctagcatcttcggcaacgtgtcggccatcatccagcggctgtactcgggcacagcccgctaccacacacagatgctgcgggtgcgggagttcatccgcttccaccagatccccaatcccctgcgccagcgcctcgaggagtacttccagcacgcctggtcctacaccaacggcatcgacatgaacgcggtgctgaagggcttccctgagtgcctgcaggctgacatctgcctgcacctgaaccgctcactgctgcagcactgcaaacccttccgaggggccaccaagggctgccttcgggccctggccatgaagttcaagaccacacatgcaccgccaggggacacactggtgcatgctggggacctgctcaccgccctgtacttcatctcccggggctccatcgagatcctgcggggcgacgtcgtcgtggccatcctggggaagaatgacatctttggggagcctctgaacctgtatgcaaggcctggcaagtcgaacggggatgtgcgggccctcacctactgtgacctacacaagatccatcgggacgacctgctggaggtgctggacatgtaccctgagttctccgaccacttctggtccagcctggagatcaccttcaacctgcgagataccaacatgatcccgggctcccccggcagtacggagttagagggtggcttcagtcggcaacgcaagcgcaagttgtccttccgcaggcgcacggacaaggacacggagcagccaggggaggtgtcggccttggggccgggccgggcgggggcagggccgagtagccggggccggccgggggggccgtggggggagagcccgtccagtggcccctccagccctgagagcagtgaggatgagggcccaggccgcagctccagccccctccgcctggtgcccttctccagccccaggccccccggagagccgccgggtggggagcccctgatggaggactgcgagaagagcagcgacacttgcaaccccctgtcaggcgccttctcaggagtgtccaacattttcagcttctggggggacagtcggggccgccagtaccaggagctccctcgatgccccgcccccacccccagcctcctcaacatccccctctccagcccgggtcggcggccccggggcgacgtggagagcaggctggatgccctccagcgccagctcaacaggctggagacccggctgagtgcagacatggccactgtcctgcagctgctacagaggcagatgacgctggtcccgcccgcctacagtgctgtgaccaccccggggcctggccccacttccacatccccgctgttgcccgtcagccccctccccaccctcaccttggactcgctttctcaggtttcccagttcatggcgtgtgaggagctgcccccgggggccccagagcttccccaagaaggccccacacgacgcctctccctaccgggccagctgggggccctcacctcccagcccctgcacagacacggctcggacccgggcagttagtggggctgcccagtgtggacacgtggctcacccagggatcaaggcgctgctgggccgctccccttggaggccctgctcaggaggccctgaccgtggaaggggagaggaactcgaaagcacagctcctcccccagcccttgggaccatcttctcctgcagtcccctgggccccagtgagaggggcaggggcagggccggcagtaggtggggcctgtggtccccccactgccctgagggcattagctggtctaactgcccggaggcacccggccctgggccttaggcacctcaaggacttttctgctatttactgctcttattgttaaggataataattaaggatcatatgaataattaatgaagatgctgatgactatgaataataaataattatcctgaggaga

SEQ ID NO: 99 - DNA, 3884 bp, Homo sapiens
  source 1..3884: mol_type = genomic DNA
  misc_feature 1..3884: note = cDNA of KCNH2 gene SNP c.1417A>C (p.Thr473Pro)
atgccggtgcggaggggccacgtcgcgccgcagaacaccttcctggacaccatcatccgcaagtttgagggccagagccgtaagttcatcatcgccaacgctcgggtggagaactgcgccgtcatctactgcaacgacggcttctgcgagctgtgcggctactcgcgggccgaggtgatgcagcgaccctgcacctgcgacttcctgcacgggccgcgcacgcagcgccgcgctgccgcgcagatcgcgcaggcactgctgggcgccgaggagcgcaaagtggaaatcgccttctaccggaaagatgggagctgcttcctatgtctggtggatgtggtgcccgtgaagaacgaggatggggctgtcatcatgttcatcctcaatttcgaggtggtgatggagaaggacatggtggggtccccggctcatgacaccaaccaccggggcccccccaccagctggctggccccaggccgcgccaagaccttccgcctgaagctgcccgcgctgctggcgctgacggcccgggagtcgtcggtgcggtcgggcggcgcgggcggcgcgggcgccccgggggccgtggtggtggacgtggacctgacgcccgcggcacccagcagcgagtcgctggccctggacgaagtgacagccatggacaaccacgtggcagggctcgggcccgcggaggagcggcgtgcgctggtgggtcccggctctccgccccgcagcgcgcccggccagctcccatcgccccgggcgcacagcctcaaccccgacgcctcgggctccagctgcagcctggcccggacgcgctcccgagaaagctgcgccagcgtgcgccgcgcctcgtcggccgacgacatcgaggccatgcgcgccggggtgctgcccccgccaccgcgccacgccagcaccggggccatgcacccactgcgcagcggcttgctcaactccacctcggactccgacctcgtgcgctaccgcaccattagcaagattccccaaatcaccctcaactttgtggacctcaagggcgaccccttcttggcttcgcccaccagtgaccgtgagatcatagcacctaagataaaggagcgaacccacaatgtcactgagaaggtcacccaggtcctgtccctgggcgccgacgtgctgcctgagtacaagctgcaggcaccgcgcatccaccgctggaccatcctgcattacagccccttcaaggccgtgtgggactggctcatcctgctgctggtcatctacacggctgtcttcacaccctactcggctgccttcctgctgaaggagacggaagaaggcccgcctgctaccgagtgtggctacgcctgccagccgctggctgtggtggacctcatcgtggacatcatgttcattgtggacatcctcatcaacttccgccccacctacgtcaatgccaacgaggaggtggtcagccaccccggccgcatcgccgtccactacttcaagggctggttcctcatcgacatggtggccgccatccccttcgacctgctcatcttcggctctggctctgaggagctgatcgggctgctgaagactgcgcggctgctgcggctggtgcgcgtggcgcggaagctggatcgctactcagagtacggcgcggccgtgctgttcttgctcatgtgcacctttgcgctcatcgcgcactggctagcctgcatctggtacgccatcggcaacatggagcagccacacatggactcacgcatcggctggctgcacaacctgggcgaccagataggcaaaccctacaacagcagcggcctgggcggcccctccatcaaggacaagtatgtgacggcgctctacttcaccttcagcagcctcaccagtgtgggcttcggcaacgtctctcccaacaccaactcagagaagatcttctccatctgcgtcatgctcattggctccctcatgtatgctagcatcttcggcaacgtgtcggccatcatccagcggctgtactcgggcacagcccgctaccacacacagatgctgcgggtgcgggagttcatccgcttccaccagatccccaatcccctgcgccagcgcctcgaggagtacttccagcacgcctggtcctacaccaacggcatcgacatgaacgcggtgctgaagggcttccctgagtgcctgcaggctgacatctgcctgcacctgaaccgctcactgctgcagcactgcaaacccttccgaggggccaccaagggctgccttcgggccctggccatgaagttcaagaccacacatgcaccgccaggggacacactggtgcatgctggggacctgctcaccgccctgtacttcatctcccggggctccatcgagatcctgcggggcgacgtcgtcgtggccatcctggggaagaatgacatctttggggagcctctgaacctgtatgcaaggcctggcaagtcgaacggggatgtgcgggccctcacctactgtgacctacacaagatccatcgggacgacctgctggaggtgctggacatgtaccctgagttctccgaccacttctggtccagcctggagatcaccttcaacctgcgagataccaacatgatcccgggctcccccggcagtacggagttagagggtggcttcagtcggcaacgcaagcgcaagttgtccttccgcaggcgcacggacaaggacacggagcagccaggggaggtgtcggccttggggccgggccgggcgggggcagggccgagtagccggggccggccgggggggccgtggggggagagcccgtccagtggcccctccagccctgagagcagtgaggatgagggcccaggccgcagctccagccccctccgcctggtgcccttctccagccccaggccccccggagagccgccgggtggggagcccctgatggaggactgcgagaagagcagcgacacttgcaaccccctgtcaggcgccttctcaggagtgtccaacattttcagcttctggggggacagtcggggccgccagtaccaggagctccctcgatgccccgcccccacccccagcctcctcaacatccccctctccagcccgggtcggcggccccggggcgacgtggagagcaggctggatgccctccagcgccagctcaacaggctggagacccggctgagtgcagacatggccactgtcctgcagctgctacagaggcagatgacgctggtcccgcccgcctacagtgctgtgaccaccccggggcctggccccacttccacatccccgctgttgcccgtcagccccctccccaccctcaccttggactcgctttctcaggtttcccagttcatggcgtgtgaggagctgcccccgggggccccagagcttccccaagaaggccccacacgacgcctctccctaccgggccagctgggggccctcacctcccagcccctgcacagacacggctcggacccgggcagttagtggggctgcccagtgtggacacgtggctcacccagggatcaaggcgctgctgggccgctccccttggaggccctgctcaggaggccctgaccgtggaaggggagaggaactcgaaagcacagctcctcccccagcccttgggaccatcttctcctgcagtcccctgggccccagtgagaggggcaggggcagggccggcagtaggtggggcctgtggtccccccactgccctgagggcattagctggtctaactgcccggaggcacccggccctgggccttaggcacctcaaggacttttctgctatttactgctcttattgttaaggataataattaaggatcatatgaataattaatgaagatgctgatgactatgaataataaataattatcctgaggaga

SEQ ID NO: 100 - DNA, 3884 bp, Homo sapiens
  source 1..3884: mol_type = genomic DNA
  misc_feature 1..3884: note = cDNA of KCNH2 gene SNP c.1418C>A (p.Thr473Asn)
atgccggtgcggaggggccacgtcgcgccgcagaacaccttcctggacaccatcatccgcaagtttgagggccagagccgtaagttcatcatcgccaacgctcgggtggagaactgcgccgtcatctactgcaacgacggcttctgcgagctgtgcggctactcgcgggccgaggtgatgcagcgaccctgcacctgcgacttcctgcacgggccgcgcacgcagcgccgcgctgccgcgcagatcgcgcaggcactgctgggcgccgaggagcgcaaagtggaaatcgccttctaccggaaagatgggagctgcttcctatgtctggtggatgtggtgcccgtgaagaacgaggatggggctgtcatcatgttcatcctcaatttcgaggtggtgatggagaaggacatggtggggtccccggctcatgacaccaaccaccggggcccccccaccagctggctggccccaggccgcgccaagaccttccgcctgaagctgcccgcgctgctggcgctgacggcccgggagtcgtcggtgcggtcgggcggcgcgggcggcgcgggcgccccgggggccgtggtggtggacgtggacctgacgcccgcggcacccagcagcgagtcgctggccctggacgaagtgacagccatggacaaccacgtggcagggctcgggcccgcggaggagcggcgtgcgctggtgggtcccggctctccgccccgcagcgcgcccggccagctcccatcgccccgggcgcacagcctcaaccccgacgcctcgggctccagctgcagcctggcccggacgcgctcccgagaaagctgcgccagcgtgcgccgcgcctcgtcggccgacgacatcgaggccatgcgcgccggggtgctgcccccgccaccgcgccacgccagcaccggggccatgcacccactgcgcagcggcttgctcaactccacctcggactccgacctcgtgcgctaccgcaccattagcaagattccccaaatcaccctcaactttgtggacctcaagggcgaccccttcttggcttcgcccaccagtgaccgtgagatcatagcacctaagataaaggagcgaacccacaatgtcactgagaaggtcacccaggtcctgtccctgggcgccgacgtgctgcctgagtacaagctgcaggcaccgcgcatccaccgctggaccatcctgcattacagccccttcaaggccgtgtgggactggctcatcctgctgctggtcatctacacggctgtcttcacaccctactcggctgccttcctgctgaaggagacggaagaaggcccgcctgctaccgagtgtggctacgcctgccagccgctggctgtggtggacctcatcgtggacatcatgttcattgtggacatcctcatcaacttccgcaacacctacgtcaatgccaacgaggaggtggtcagccaccccggccgcatcgccgtccactacttcaagggctggttcctcatcgacatggtggccgccatccccttcgacctgctcatcttcggctctggctctgaggagctgatcgggctgctgaagactgcgcggctgctgcggctggtgcgcgtggcgcggaagctggatcgctactcagagtacggcgcggccgtgctgttcttgctcatgtgcacctttgcgctcatcgcgcactggctagcctgcatctggtacgccatcggcaacatggagcagccacacatggactcacgcatcggctggctgcacaacctgggcgaccagataggcaaaccctacaacagcagcggcctgggcggcccctccatcaaggacaagtatgtgacggcgctctacttcaccttcagcagcctcaccagtgtgggcttcggcaacgtctctcccaacaccaactcagagaagatcttctccatctgcgtcatgctcattggctccctcatgtatgctagcatcttcggcaacgtgtcggccatcatccagcggctgtactcgggcacagcccgctaccacacacagatgctgcgggtgcgggagttcatccgcttccaccagatccccaatcccctgcgccagcgcctcgaggagtacttccagcacgcctggtcctacaccaacggcatcgacatgaacgcggtgctgaagggcttccctgagtgcctgcaggctgacatctgcctgcacctgaaccgctcactgctgcagcactgcaaacccttccgaggggccaccaagggctgccttcgggccctggccatgaagttcaagaccacacatgcaccgccaggggacacactggtgcatgctggggacctgctcaccgccctgtacttcatctcccggggctccatcgagatcctgcggggcgacgtcgtcgtggccatcctggggaagaatgacatctttggggagcctctgaacctgtatgcaaggcctggcaagtcgaacggggatgtgcgggccctcacctactgtgacctacacaagatccatcgggacgacctgctggaggtgctggacatgtaccctgagttctccgaccacttctggtccagcctggagatcaccttcaacctgcgagataccaacatgatcccgggctcccccggcagtacggagttagagggtggcttcagtcggcaacgcaagcgcaagttgtccttccgcaggcgcacggacaaggacacggagcagccaggggaggtgtcggccttggggccgggccgggcgggggcagggccgagtagccggggccggccgggggggccgtggggggagagcccgtccagtggcccctccagccctgagagcagtgaggatgagggcccaggccgcagctccagccccctccgcctggtgcccttctccagccccaggccccccggagagccgccgggtggggagcccctgatggaggactgcgagaagagcagcgacacttgcaaccccctgtcaggcgccttctcaggagtgtccaacattttcagcttctggggggacagtcggggccgccagtaccaggagctccctcgatgccccgcccccacccccagcctcctcaacatccccctctccagcccgggtcggcggccccggggcgacgtggagagcaggctggatgccctccagcgccagctcaacaggctggagacccggctgagtgcagacatggccactgtcctgcagctgctacagaggcagatgacgctggtcccgcccgcctacagtgctgtgaccaccccggggcctggccccacttccacatccccgctgttgcccgtcagccccctccccaccctcaccttggactcgctttctcaggtttcccagttcatggcgtgtgaggagctgcccccgggggccccagagcttccccaagaaggccccacacgacgcctctccctaccgggccagctgggggccctcacctcccagcccctgcacagacacggctcggacccgggcagttagtggggctgcccagtgtggacacgtggctcacccagggatcaaggcgctgctgggccgctccccttggaggccctgctcaggaggccctgaccgtggaaggggagaggaactcgaaagcacagctcctcccccagcccttgggaccatcttctcctgcagtcccctgggccccagtgagaggggcaggggcagggccggcagtaggtggggcctgtggtccccccactgccctgagggcattagctggtctaactgcccggaggcacccggccctgggccttaggcacctcaaggacttttctgctatttactgctcttattgttaaggataataattaaggatcatatgaataattaatgaagatgctgatgactatgaataataaataattatcctgaggaga

SEQ ID NO: 101 - DNA, 3884 bp, Homo sapiens
  source 1..3884: mol_type = genomic DNA
  misc_feature 1..3884: note = cDNA of KCNH2 gene SNP c.1418C>T (p.Thr473Ile)
atgccggtgcggaggggccacgtcgcgccgcagaacaccttcctggacaccatcatccgcaagtttgagggccagagccgtaagttcatcatcgccaacgctcgggtggagaactgcgccgtcatctactgcaacgacggcttctgcgagctgtgcggctactcgcgggccgaggtgatgcagcgaccctgcacctgcgacttcctgcacgggccgcgcacgcagcgccgcgctgccgcgcagatcgcgcaggcactgctgggcgccgaggagcgcaaagtggaaatcgccttctaccggaaagatgggagctgcttcctatgtctggtggatgtggtgcccgtgaagaacgaggatggggctgtcatcatgttcatcctcaatttcgaggtggtgatggagaaggacatggtggggtccccggctcatgacaccaaccaccggggcccccccaccagctggctggccccaggccgcgccaagaccttccgcctgaagctgcccgcgctgctggcgctgacggcccgggagtcgtcggtgcggtcgggcggcgcgggcggcgcgggcgccccgggggccgtggtggtggacgtggacctgacgcccgcggcacccagcagcgagtcgctggccctggacgaagtgacagccatggacaaccacgtggcagggctcgggcccgcggaggagcggcgtgcgctggtgggtcccggctctccgccccgcagcgcgcccggccagctcccatcgccccgggcgcacagcctcaaccccgacgcctcgggctccagctgcagcctggcccggacgcgctcccgagaaagctgcgccagcgtgcgccgcgcctcgtcggccgacgacatcgaggccatgcgcgccggggtgctgcccccgccaccgcgccacgccagcaccggggccatgcacccactgcgcagcggcttgctcaactccacctcggactccgacctcgtgcgctaccgcaccattagcaagattccccaaatcaccctcaactttgtggacctcaagggcgaccccttcttggcttcgcccaccagtgaccgtgagatcatagcacctaagataaaggagcgaacccacaatgtcactgagaaggtcacccaggtcctgtccctgggcgccgacgtgctgcctgagtacaagctgcaggcaccgcgcatccaccgctggaccatcctgcattacagccccttcaaggccgtgtgggactggctcatcctgctgctggtcatctacacggctgtcttcacaccctactcggctgccttcctgctgaaggagacggaagaaggcccgcctgctaccgagtgtggctacgcctgccagccgctggctgtggtggacctcatcgtggacatcatgttcattgtggacatcctcatcaacttccgcatcacctacgtcaatgccaacgaggaggtggtcagccaccccggccgcatcgccgtccactacttcaagggctggttcctcatcgacatggtggccgccatccccttcgacctgctcatcttcggctctggctctgaggagctgatcgggctgctgaagactgcgcggctgctgcggctggtgcgcgtggcgcggaagctggatcgctactcagagtacggcgcggccgtgctgttcttgctcatgtgcacctttgcgctcatcgcgcactggctagcctgcatctggtacgccatcggcaacatggagcagccacacatggactcacgcatcggctggctgcacaacctgggcgaccagataggcaaaccctacaacagcagcggcctgggcggcccctccatcaaggacaagtatgtgacggcgctctacttcaccttcagcagcctcaccagtgtgggcttcggcaacgtctctcccaacaccaactcagagaagatcttctccatctgcgtcatgctcattggctccctcatgtatgctagcatcttcggcaacgtgtcggccatcatccagcggctgtactcgggcacagcccgctaccacacacagatgctgcgggtgcgggagttcatccgcttccaccagatccccaatcccctgcgccagcgcctcgaggagtacttccagcacgcctggtcctacaccaacggcatcgacatgaacgcggtgctgaagggcttccctgagtgcctgcaggctgacatctgcctgcacctgaaccgctcactgctgcagcactgcaaacccttccgaggggccaccaagggctgccttcgggccctggccatgaagttcaagaccacacatgcaccgccaggggacacactggtgcatgctggggacctgctcaccgccctgtacttcatctcccggggctccatcgagatcctgcggggcgacgtcgtcgtggccatcctggggaagaatgacatctttggggagcctctgaacctgtatgcaaggcctggcaagtcgaacggggatgtgcgggccctcacctactgtgacctacacaagatccatcgggacgacctgctggaggtgctggacatgtaccctgagttctccgaccacttctggtccagcctggagatcaccttcaacctgcgagataccaacatgatcccgggctcccccggcagtacggagttagagggtggcttcagtcggcaacgcaagcgcaagttgtccttccgcaggcgcacggacaaggacacggagcagccaggggaggtgtcggccttggggccgggccgggcgggggcagggccgagtagccggggccggccgggggggccgtggggggagagcccgtccagtggcccctccagccctgagagcagtgaggatgagggcccaggccgcagctccagccccctccgcctggtgcccttctccagccccaggccccccggagagccgccgggtggggagcccctgatggaggactgcgagaagagcagcgacacttgcaaccccctgtcaggcgccttctcaggagtgtccaacattttcagcttctggggggacagtcggggccgccagtaccaggagctccctcgatgccccgcccccacccccagcctcctcaacatccccctctccagcccgggtcggcggccccggggcgacgtggagagcaggctggatgccctccagcgccagctcaacaggctggagacccggctgagtgcagacatggccactgtcctgcagctgctacagaggcagatgacgctggtcccgcccgcctacagtgctgtgaccaccccggggcctggccccacttccacatccccgctgttgcccgtcagccccctccccaccctcaccttggactcgctttctcaggtttcccagttcatggcgtgtgaggagctgcccccgggggccccagagcttccccaagaaggccccacacgacgcctctccctaccgggccagctgggggccctcacctcccagcccctgcacagacacggctcggacccgggcagttagtggggctgcccagtgtggacacgtggctcacccagggatcaaggcgctgctgggccgctccccttggaggccctgctcaggaggccctgaccgtggaaggggagaggaactcgaaagcacagctcctcccccagcccttgggaccatcttctcctgcagtcccctgggccccagtgagaggggcaggggcagggccggcagtaggtggggcctgtggtccccccactgccctgagggcattagctggtctaactgcccggaggcacccggccctgggccttaggcacctcaaggacttttctgctatttactgctcttattgttaaggataataattaaggatcatatgaataattaatgaagatgctgatgactatgaataataaataattatcctgaggaga

SEQ ID NO: 102 - DNA, 3884 bp, Homo sapiens
  source 1..3884: mol_type = genomic DNA
  misc_feature 1..3884: note = cDNA of KCNH2 gene SNP c.1421C>T (p.Thr474Ile)
atgccggtgcggaggggccacgtcgcgccgcagaacaccttcctggacaccatcatccgcaagtttgagggccagagccgtaagttcatcatcgccaacgctcgggtggagaactgcgccgtcatctactgcaacgacggcttctgcgagctgtgcggctactcgcgggccgaggtgatgcagcgaccctgcacctgcgacttcctgcacgggccgcgcacgcagcgccgcgctgccgcgcagatcgcgcaggcactgctgggcgccgaggagcgcaaagtggaaatcgccttctaccggaaagatgggagctgcttcctatgtctggtggatgtggtgcccgtgaagaacgaggatggggctgtcatcatgttcatcctcaatttcgaggtggtgatggagaaggacatggtggggtccccggctcatgacaccaaccaccggggcccccccaccagctggctggccccaggccgcgccaagaccttccgcctgaagctgcccgcgctgctggcgctgacggcccgggagtcgtcggtgcggtcgggcggcgcgggcggcgcgggcgccccgggggccgtggtggtggacgtggacctgacgcccgcggcacccagcagcgagtcgctggccctggacgaagtgacagccatggacaaccacgtggcagggctcgggcccgcggaggagcggcgtgcgctggtgggtcccggctctccgccccgcagcgcgcccggccagctcccatcgccccgggcgcacagcctcaaccccgacgcctcgggctccagctgcagcctggcccggacgcgctcccgagaaagctgcgccagcgtgcgccgcgcctcgtcggccgacgacatcgaggccatgcgcgccggggtgctgcccccgccaccgcgccacgccagcaccggggccatgcacccactgcgcagcggcttgctcaactccacctcggactccgacctcgtgcgctaccgcaccattagcaagattccccaaatcaccctcaactttgtggacctcaagggcgaccccttcttggcttcgcccaccagtgaccgtgagatcatagcacctaagataaaggagcgaacccacaatgtcactgagaaggtcacccaggtcctgtccctgggcgccgacgtgctgcctgagtacaagctgcaggcaccgcgcatccaccgctggaccatcctgcattacagccccttcaaggccgtgtgggactggctcatcctgctgctggtcatctacacggctgtcttcacaccctactcggctgccttcctgctgaaggagacggaagaaggcccgcctgctaccgagtgtggctacgcctgccagccgctggctgtggtggacctcatcgtggacatcatgttcattgtggacatcctcatcaacttccgcaccatctacgtcaatgccaacgaggaggtggtcagccaccccggccgcatcgccgtccactacttcaagggctggttcctcatcgacatggtggccgccatccccttcgacctgctcatcttcggctctggctctgaggagctgatcgggctgctgaagactgcgcggctgctgcggctggtgcgcgtggcgcggaagctggatcgctactcagagtacggcgcggccgtgctgttcttgctcatgtgcacctttgcgctcatcgcgcactggctagcctgcatctggtacgccatcggcaacatggagcagccacacatggactcacgcatcggctggctgcacaacctgggcgaccagataggcaaaccctacaacagcagcggcctgggcggcccctccatcaaggacaagtatgtgacggcgctctacttcaccttcagcagcctcaccagtgtgggcttcggcaacgtctctcccaacaccaactcagagaagatcttctccatctgcgtcatgctcattggctccctcatgtatgctagcatcttcggcaacgtgtcggccatcatccagcggctgtactcgggcacagcccgctaccacacacagatgctgcgggtgcgggagttcatccgcttccaccagatccccaatcccctgcgccagcgcctcgaggagtacttccagcacgcctggtcctacaccaacggcatcgacatgaacgcggtgctgaagggcttccctgagtgcctgcaggctgacatctgcctgcacctgaaccgctcactgctgcagcactgcaaacccttccgaggggccaccaagggctgccttcgggccctggccatgaagttcaagaccacacatgcaccgccaggggacacactggtgcatgctggggacctgctcaccgccctgtacttcatctcccggggctccatcgagatcctgcggggcgacgtcgtcgtggccatcctggggaagaatgacatctttggggagcctctgaacctgtatgcaaggcctggcaagtcgaacggggatgtgcgggccctcacctactgtgacctacacaagatccatcgggacgacctgctggaggtgctggacatgtaccctgagttctccgaccacttctggtccagcctggagatcaccttcaacctgcgagataccaacatgatcccgggctcccccggcagtacggagttagagggtggcttcagtcggcaacgcaagcgcaagttgtccttccgcaggcgcacggacaaggacacggagcagccaggggaggtgtcggccttggggccgggccgggcgggggcagggccgagtagccggggccggccgggggggccgtggggggagagcccgtccagtggcccctccagccctgagagcagtgaggatgagggcccaggccgcagctccagccccctccgcctggtgcccttctccagccccaggccccccggagagccgccgggtggggagcccctgatggaggactgcgagaagagcagcgacacttgcaaccccctgtcaggcgccttctcaggagtgtccaacattttcagcttctggggggacagtcggggccgccagtaccaggagctccctcgatgccccgcccccacccccagcctcctcaacatccccctctccagcccgggtcggcggccccggggcgacgtggagagcaggctggatgccctccagcgccagctcaacaggctggagacccggctgagtgcagacatggccactgtcctgcagctgctacagaggcagatgacgctggtcccgcccgcctacagtgctgtgaccaccccggggcctggccccacttccacatccccgctgttgcccgtcagccccctccccaccctcaccttggactcgctttctcaggtttcccagttcatggcgtgtgaggagctgcccccgggggccccagagcttccccaagaaggccccacacgacgcctctccctaccgggccagctgggggccctcacctcccagcccctgcacagacacggctcggacccgggcagttagtggggctgcccagtgtggacacgtggctcacccagggatcaaggcgctgctgggccgctccccttggaggccctgctcaggaggccctgaccgtggaaggggagaggaactcgaaagcacagctcctcccccagcccttgggaccatcttctcctgcagtcccctgggccccagtgagaggggcaggggcagggccggcagtaggtggggcctgtggtccccccactgccctgagggcattagctggtctaactgcccggaggcacccggccctgggccttaggcacctcaaggacttttctgctatttactgctcttattgttaaggataataattaaggatcatatgaataattaatgaagatgctgatgactatgaataataaataattatcctgaggaga

SEQ ID NO: 103 - DNA, 3884 bp, Homo sapiens
  source 1..3884: mol_type = genomic DNA
  misc_feature 1..3884: note = cDNA of KCNH2 gene SNP c.1424A>G (p.Tyr475Cys)
atgccggtgcggaggggccacgtcgcgccgcagaacaccttcctggacaccatcatccgcaagtttgagggccagagccgtaagttcatcatcgccaacgctcgggtggagaactgcgccgtcatctactgcaacgacggcttctgcgagctgtgcggctactcgcgggccgaggtgatgcagcgaccctgcacctgcgacttcctgcacgggccgcgcacgcagcgccgcgctgccgcgcagatcgcgcaggcactgctgggcgccgaggagcgcaaagtggaaatcgccttctaccggaaagatgggagctgcttcctatgtctggtggatgtggtgcccgtgaagaacgaggatggggctgtcatcatgttcatcctcaatttcgaggtggtgatggagaaggacatggtggggtccccggctcatgacaccaaccaccggggcccccccaccagctggctggccccaggccgcgccaagaccttccgcctgaagctgcccgcgctgctggcgctgacggcccgggagtcgtcggtgcggtcgggcggcgcgggcggcgcgggcgccccgggggccgtggtggtggacgtggacctgacgcccgcggcacccagcagcgagtcgctggccctggacgaagtgacagccatggacaaccacgtggcagggctcgggcccgcggaggagcggcgtgcgctggtgggtcccggctctccgccccgcagcgcgcccggccagctcccatcgccccgggcgcacagcctcaaccccgacgcctcgggctccagctgcagcctggcccggacgcgctcccgagaaagctgcgccagcgtgcgccgcgcctcgtcggccgacgacatcgaggccatgcgcgccggggtgctgcccccgccaccgcgccacgccagcaccggggccatgcacccactgcgcagcggcttgctcaactccacctcggactccgacctcgtgcgctaccgcaccattagcaagattccccaaatcaccctcaactttgtggacctcaagggcgaccccttcttggcttcgcccaccagtgaccgtgagatcatagcacctaagataaaggagcgaacccacaatgtcactgagaaggtcacccaggtcctgtccctgggcgccgacgtgctgcctgagtacaagctgcaggcaccgcgcatccaccgctggaccatcctgcattacagccccttcaaggccgtgtgggactggctcatcctgctgctggtcatctacacggctgtcttcacaccctactcggctgccttcctgctgaaggagacggaagaaggcccgcctgctaccgagtgtggctacgcctgccagccgctggctgtggtggacctcatcgtggacatcatgttcattgtggacatcctcatcaacttccgcaccacctgcgtcaatgccaacgaggaggtggtcagccaccccggccgcatcgccgtccactacttcaagggctggttcctcatcgacatggtggccgccatccccttcgacctgctcatcttcggctctggctctgaggagctgatcgggctgctgaagactgcgcggctgctgcggctggtgcgcgtggcgcggaagctggatcgctactcagagtacggcgcggccgtgctgttcttgctcatgtgcacctttgcgctcatcgcgcactggctagcctgcatctggtacgccatcggcaacatggagcagccacacatggactcacgcatcggctggctgcacaacctgggcgaccagataggcaaaccctacaacagcagcggcctgggcggcccctccatcaaggacaagtatgtgacggcgctctacttcaccttcagcagcctcaccagtgtgggcttcggcaacgtctctcccaacaccaactcagagaagatcttctccatctgcgtcatgctcattggctccctcatgtatgctagcatcttcggcaacgtgtcggccatcatccagcggctgtactcgggcacagcccgctaccacacacagatgctgcgggtgcgggagttcatccgcttccaccagatccccaatcccctgcgccagcgcctcgaggagtacttccagcacgcctggtcctacaccaacggcatcgacatgaacgcggtgctgaagggcttccctgagtgcctgcaggctgacatctgcctgcacctgaaccgctcactgctgcagcactgcaaacccttccgaggggccaccaagggctgccttcgggccctggccatgaagttcaagaccacacatgcaccgccaggggacacactggtgcatgctggggacctgctcaccgccctgtacttcatctcccggggctccatcgagatcctgcggggcgacgtcgtcgtggccatcctggggaagaatgacatctttggggagcctctgaacctgtatgcaaggcctggcaagtcgaacggggatgtgcgggccctcacctactgtgacctacacaagatccatcgggacgacctgctggaggtgctggacatgtaccctgagttctccgaccacttctggtccagcctggagatcaccttcaacctgcgagataccaacatgatcccgggctcccccggcagtacggagttagagggtggcttcagtcggcaacgcaagcgcaagttgtccttccgcaggcgcacggacaaggacacggagcagccaggggaggtgtcggccttggggccgggccgggcgggggcagggccgagtagccggggccggccgggggggccgtggggggagagcccgtccagtggcccctccagccctgagagcagtgaggatgagggcccaggccgcagctccagccccctccgcctggtgcccttctccagccccaggccccccggagagccgccgggtggggagcccctgatggaggactgcgagaagagcagcgacacttgcaaccccctgtcaggcgccttctcaggagtgtccaacattttcagcttctggggggacagtcggggccgccagtaccaggagctccctcgatgccccgcccccacccccagcctcctcaacatccccctctccagcccgggtcggcggccccggggcgacgtggagagcaggctggatgccctccagcgccagctcaacaggctggagacccggctgagtgcagacatggccactgtcctgcagctgctacagaggcagatgacgctggtcccgcccgcctacagtgctgtgaccaccccggggcctggccccacttccacatccccgctgttgcccgtcagccccctccccaccctcaccttggactcgctttctcaggtttcccagttcatggcgtgtgaggagctgcccccgggggccccagagcttccccaagaaggccccacacgacgcctctccctaccgggccagctgggggccctcacctcccagcccctgcacagacacggctcggacccgggcagttagtggggctgcccagtgtggacacgtggctcacccagggatcaaggcgctgctgggccgctccccttggaggccctgctcaggaggccctgaccgtggaaggggagaggaactcgaaagcacagctcctcccccagcccttgggaccatcttctcctgcagtcccctgggccccagtgagaggggcaggggcagggccggcagtaggtggggcctgtggtccccccactgccctgagggcattagctggtctaactgcccggaggcacccggccctgggccttaggcacctcaaggacttttctgctatttactgctcttattgttaaggataataattaaggatcatatgaataattaatgaagatgctgatgactatgaataataaataattatcctgaggaga

SEQ ID NO: 104 - DNA, 3884 bp, Homo sapiens
  source 1..3884: mol_type = genomic DNA
  misc_feature 1..3884: note = cDNA of KCNH2 gene SNP c.1425C>A (p.Tyr475Ter)
atgccggtgcggaggggccacgtcgcgccgcagaacaccttcctggacaccatcatccgcaagtttgagggccagagccgtaagttcatcatcgccaacgctcgggtggagaactgcgccgtcatctactgcaacgacggcttctgcgagctgtgcggctactcgcgggccgaggtgatgcagcgaccctgcacctgcgacttcctgcacgggccgcgcacgcagcgccgcgctgccgcgcagatcgcgcaggcactgctgggcgccgaggagcgcaaagtggaaatcgccttctaccggaaagatgggagctgcttcctatgtctggtggatgtggtgcccgtgaagaacgaggatggggctgtcatcatgttcatcctcaatttcgaggtggtgatggagaaggacatggtggggtccccggctcatgacaccaaccaccggggcccccccaccagctggctggccccaggccgcgccaagaccttccgcctgaagctgcccgcgctgctggcgctgacggcccgggagtcgtcggtgcggtcgggcggcgcgggcggcgcgggcgccccgggggccgtggtggtggacgtggacctgacgcccgcggcacccagcagcgagtcgctggccctggacgaagtgacagccatggacaaccacgtggcagggctcgggcccgcggaggagcggcgtgcgctggtgggtcccggctctccgccccgcagcgcgcccggccagctcccatcgccccgggcgcacagcctcaaccccgacgcctcgggctccagctgcagcctggcccggacgcgctcccgagaaagctgcgccagcgtgcgccgcgcctcgtcggccgacgacatcgaggccatgcgcgccggggtgctgcccccgccaccgcgccacgccagcaccggggccatgcacccactgcgcagcggcttgctcaactccacctcggactccgacctcgtgcgctaccgcaccattagcaagattccccaaatcaccctcaactttgtggacctcaagggcgaccccttcttggcttcgcccaccagtgaccgtgagatcatagcacctaagataaaggagcgaacccacaatgtcactgagaaggtcacccaggtcctgtccctgggcgccgacgtgctgcctgagtacaagctgcaggcaccgcgcatccaccgctggaccatcctgcattacagccccttcaaggccgtgtgggactggctcatcctgctgctggtcatctacacggctgtcttcacaccctactcggctgccttcctgctgaaggagacggaagaaggcccgcctgctaccgagtgtggctacgcctgccagccgctggctgtggtggacctcatcgtggacatcatgttcattgtggacatcctcatcaacttccgcaccacctaagtcaatgccaacgaggaggtggtcagccaccccggccgcatcgccgtccactacttcaagggctggttcctcatcgacatggtggccgccatccccttcgacctgctcatcttcggctctggctctgaggagctgatcgggctgctgaagactgcgcggctgctgcggctggtgcgcgtggcgcggaagctggatcgctactcagagtacggcgcggccgtgctgttcttgctcatgtgcacctttgcgctcatcgcgcactggctagcctgcatctggtacgccatcggcaacatggagcagccacacatggactcacgcatcggctggctgcacaacctgggcgaccagataggcaaaccctacaacagcagcggcctgggcggcccctccatcaaggacaagtatgtgacggcgctctacttcaccttcagcagcctcaccagtgtgggcttcggcaacgtctctcccaacaccaactcagagaagatcttctccatctgcgtcatgctcattggctccctcatgtatgctagcatcttcggcaacgtgtcggccatcatccagcggctgtactcgggcacagcccgctaccacacacagatgctgcgggtgcgggagttcatccgcttccaccagatccccaatcccctgcgccagcgcctcgaggagtacttccagcacgcctggtcctacaccaacggcatcgacatgaacgcggtgctgaagggcttccctgagtgcctgcaggctgacatctgcctgcacctgaaccgctcactgctgcagcactgcaaacccttccgaggggccaccaagggctgccttcgggccctggccatgaagttcaagaccacacatgcaccgccaggggacacactggtgcatgctggggacctgctcaccgccctgtacttcatctcccggggctccatcgagatcctgcggggcgacgtcgtcgtggccatcctggggaagaatgacatctttggggagcctctgaacctgtatgcaaggcctggcaagtcgaacggggatgtgcgggccctcacctactgtgacctacacaagatccatcgggacgacctgctggaggtgctggacatgtaccctgagttctccgaccacttctggtccagcctggagatcaccttcaacctgcgagataccaacatgatcccgggctcccccggcagtacggagttagagggtggcttcagtcggcaacgcaagcgcaagttgtccttccgcaggcgcacggacaaggacacggagcagccaggggaggtgtcggccttggggccgggccgggcgggggcagggccgagtagccggggccggccgggggggccgtggggggagagcccgtccagtggcccctccagccctgagagcagtgaggatgagggcccaggccgcagctccagccccctccgcctggtgcccttctccagccccaggccccccggagagccgccgggtggggagcccctgatggaggactgcgagaagagcagcgacacttgcaaccccctgtcaggcgccttctcaggagtgtccaacattttcagcttctggggggacagtcggggccgccagtaccaggagctccctcgatgccccgcccccacccccagcctcctcaacatccccctctccagcccgggtcggcggccccggggcgacgtggagagcaggctggatgccctccagcgccagctcaacaggctggagacccggctgagtgcagacatggccactgtcctgcagctgctacagaggcagatgacgctggtcccgcccgcctacagtgctgtgaccaccccggggcctggccccacttccacatccccgctgttgcccgtcagccccctccccaccctcaccttggactcgctttctcaggtttcccagttcatggcgtgtgaggagctgcccccgggggccccagagcttccccaagaaggccccacacgacgcctctccctaccgggccagctgggggccctcacctcccagcccctgcacagacacggctcggacccgggcagttagtggggctgcccagtgtggacacgtggctcacccagggatcaaggcgctgctgggccgctccccttggaggccctgctcaggaggccctgaccgtggaaggggagaggaactcgaaagcacagctcctcccccagcccttgggaccatcttctcctgcagtcccctgggccccagtgagaggggcaggggcagggccggcagtaggtggggcctgtggtccccccactgccctgagggcattagctggtctaactgcccggaggcacccggccctgggccttaggcacctcaaggacttttctgctatttactgctcttattgttaaggataataattaaggatcatatgaataattaatgaagatgctgatgactatgaataataaataattatcctgaggaga

SEQ ID NO: 105 - DNA, 3884 bp, Homo sapiens
  source 1..3884: mol_type = genomic DNA
  misc_feature 1..3884: note = cDNA of KCNH2 gene SNP c.1426G>A (p.Val476Ile)
atgccggtgcggaggggccacgtcgcgccgcagaacaccttcctggacaccatcatccgcaagtttgagggccagagccgtaagttcatcatcgccaacgctcgggtggagaactgcgccgtcatctactgcaacgacggcttctgcgagctgtgcggctactcgcgggccgaggtgatgcagcgaccctgcacctgcgacttcctgcacgggccgcgcacgcagcgccgcgctgccgcgcagatcgcgcaggcactgctgggcgccgaggagcgcaaagtggaaatcgccttctaccggaaagatgggagctgcttcctatgtctggtggatgtggtgcccgtgaagaacgaggatggggctgtcatcatgttcatcctcaatttcgaggtggtgatggagaaggacatggtggggtccccggctcatgacaccaaccaccggggcccccccaccagctggctggccccaggccgcgccaagaccttccgcctgaagctgcccgcgctgctggcgctgacggcccgggagtcgtcggtgcggtcgggcggcgcgggcggcgcgggcgccccgggggccgtggtggtggacgtggacctgacgcccgcggcacccagcagcgagtcgctggccctggacgaagtgacagccatggacaaccacgtggcagggctcgggcccgcggaggagcggcgtgcgctggtgggtcccggctctccgccccgcagcgcgcccggccagctcccatcgccccgggcgcacagcctcaaccccgacgcctcgggctccagctgcagcctggcccggacgcgctcccgagaaagctgcgccagcgtgcgccgcgcctcgtcggccgacgacatcgaggccatgcgcgccggggtgctgcccccgccaccgcgccacgccagcaccggggccatgcacccactgcgcagcggcttgctcaactccacctcggactccgacctcgtgcgctaccgcaccattagcaagattccccaaatcaccctcaactttgtggacctcaagggcgaccccttcttggcttcgcccaccagtgaccgtgagatcatagcacctaagataaaggagcgaacccacaatgtcactgagaaggtcacccaggtcctgtccctgggcgccgacgtgctgcctgagtacaagctgcaggcaccgcgcatccaccgctggaccatcctgcattacagccccttcaaggccgtgtgggactggctcatcctgctgctggtcatctacacggctgtcttcacaccctactcggctgccttcctgctgaaggagacggaagaaggcccgcctgctaccgagtgtggctacgcctgccagccgctggctgtggtggacctcatcgtggacatcatgttcattgtggacatcctcatcaacttccgcaccacctacatcaatgccaacgaggaggtggtcagccaccccggccgcatcgccgtccactacttcaagggctggttcctcatcgacatggtggccgccatccccttcgacctgctcatcttcggctctggctctgaggagctgatcgggctgctgaagactgcgcggctgctgcggctggtgcgcgtggcgcggaagctggatcgctactcagagtacggcgcggccgtgctgttcttgctcatgtgcacctttgcgctcatcgcgcactggctagcctgcatctggtacgccatcggcaacatggagcagccacacatggactcacgcatcggctggctgcacaacctgggcgaccagataggcaaaccctacaacagcagcggcctgggcggcccctccatcaaggacaagtatgtgacggcgctctacttcaccttcagcagcctcaccagtgtgggcttcggcaacgtctctcccaacaccaactcagagaagatcttctccatctgcgtcatgctcattggctccctcatgtatgctagcatcttcggcaacgtgtcggccatcatccagcggctgtactcgggcacagcccgctaccacacacagatgctgcgggtgcgggagttcatccgcttccaccagatccccaatcccctgcgccagcgcctcgaggagtacttccagcacgcctggtcctacaccaacggcatcgacatgaacgcggtgctgaagggcttccctgagtgcctgcaggctgacatctgcctgcacctgaaccgctcactgctgcagcactgcaaacccttccgaggggccaccaagggctgccttcgggccctggccatgaagttcaagaccacacatgcaccgccaggggacacactggtgcatgctggggacctgctcaccgccctgtacttcatctcccggggctccatcgagatcctgcggggcgacgtcgtcgtggccatcctggggaagaatgacatctttggggagcctctgaacctgtatgcaaggcctggcaagtcgaacggggatgtgcgggccctcacctactgtgacctacacaagatccatcgggacgacctgctggaggtgctggacatgtaccctgagttctccgaccacttctggtccagcctggagatcaccttcaacctgcgagataccaacatgatcccgggctcccccggcagtacggagttagagggtggcttcagtcggcaacgcaagcgcaagttgtccttccgcaggcgcacggacaaggacacggagcagccaggggaggtgtcggccttggggccgggccgggcgggggcagggccgagtagccggggccggccgggggggccgtggggggagagcccgtccagtggcccctccagccctgagagcagtgaggatgagggcccaggccgcagctccagccccctccgcctggtgcccttctccagccccaggccccccggagagccgccgggtggggagcccctgatggaggactgcgagaagagcagcgacacttgcaaccccctgtcaggcgccttctcaggagtgtccaacattttcagcttctggggggacagtcggggccgccagtaccaggagctccctcgatgccccgcccccacccccagcctcctcaacatccccctctccagcccgggtcggcggccccggggcgacgtggagagcaggctggatgccctccagcgccagctcaacaggctggagacccggctgagtgcagacatggccactgtcctgcagctgctacagaggcagatgacgctggtcccgcccgcctacagtgctgtgaccaccccggggcctggccccacttccacatccccgctgttgcccgtcagccccctccccaccctcaccttggactcgctttctcaggtttcccagttcatggcgtgtgaggagctgcccccgggggccccagagcttccccaagaaggccccacacgacgcctctccctaccgggccagctgggggccctcacctcccagcccctgcacagacacggctcggacccgggcagttagtggggctgcccagtgtggacacgtggctcacccagggatcaaggcgctgctgggccgctccccttggaggccctgctcaggaggccctgaccgtggaaggggagaggaactcgaaagcacagctcctcccccagcccttgggaccatcttctcctgcagtcccctgggccccagtgagaggggcaggggcagggccggcagtaggtggggcctgtggtccccccactgccctgagggcattagctggtctaactgcccggaggcacccggccctgggccttaggcacctcaaggacttttctgctatttactgctcttattgttaaggataataattaaggatcatatgaataattaatgaagatgctgatgactatgaataataaataattatcctgaggaga

SEQ ID NO: 106 - DNA, 3884 bp, Homo sapiens
  source 1..3884: mol_type = genomic DNA
  misc_feature 1..3884: note = cDNA of KCNH2 gene SNP c.1447G>A (p.Val483Ile)
atgccggtgcggaggggccacgtcgcgccgcagaacaccttcctggacaccatcatccgcaagtttgagggccagagccgtaagttcatcatcgccaacgctcgggtggagaactgcgccgtcatctactgcaacgacggcttctgcgagctgtgcggctactcgcgggccgaggtgatgcagcgaccctgcacctgcgacttcctgcacgggccgcgcacgcagcgccgcgctgccgcgcagatcgcgcaggcactgctgggcgccgaggagcgcaaagtggaaatcgccttctaccggaaagatgggagctgcttcctatgtctggtggatgtggtgcccgtgaagaacgaggatggggctgtcatcatgttcatcctcaatttcgaggtggtgatggagaaggacatggtggggtccccggctcatgacaccaaccaccggggcccccccaccagctggctggccccaggccgcgccaagaccttccgcctgaagctgcccgcgctgctggcgctgacggcccgggagtcgtcggtgcggtcgggcggcgcgggcggcgcgggcgccccgggggccgtggtggtggacgtggacctgacgcccgcggcacccagcagcgagtcgctggccctggacgaagtgacagccatggacaaccacgtggcagggctcgggcccgcggaggagcggcgtgcgctggtgggtcccggctctccgccccgcagcgcgcccggccagctcccatcgccccgggcgcacagcctcaaccccgacgcctcgggctccagctgcagcctggcccggacgcgctcccgagaaagctgcgccagcgtgcgccgcgcctcgtcggccgacgacatcgaggccatgcgcgccggggtgctgcccccgccaccgcgccacgccagcaccggggccatgcacccactgcgcagcggcttgctcaactccacctcggactccgacctcgtgcgctaccgcaccattagcaagattccccaaatcaccctcaactttgtggacctcaagggcgaccccttcttggcttcgcccaccagtgaccgtgagatcatagcacctaagataaaggagcgaacccacaatgtcactgagaaggtcacccaggtcctgtccctgggcgccgacgtgctgcctgagtacaagctgcaggcaccgcgcatccaccgctggaccatcctgcattacagccccttcaaggccgtgtgggactggctcatcctgctgctggtcatctacacggctgtcttcacaccctactcggctgccttcctgctgaaggagacggaagaaggcccgcctgctaccgagtgtggctacgcctgccagccgctggctgtggtggacctcatcgtggacatcatgttcattgtggacatcctcatcaacttccgcaccacctacgtcaatgccaacgaggaggtgatcagccaccccggccgcatcgccgtccactacttcaagggctggttcctcatcgacatggtggccgccatccccttcgacctgctcatcttcggctctggctctgaggagctgatcgggctgctgaagactgcgcggctgctgcggctggtgcgcgtggcgcggaagctggatcgctactcagagtacggcgcggccgtgctgttcttgctcatgtgcacctttgcgctcatcgcgcactggctagcctgcatctggtacgccatcggcaacatggagcagccacacatggactcacgcatcggctggctgcacaacctgggcgaccagataggcaaaccctacaacagcagcggcctgggcggcccctccatcaaggacaagtatgtgacggcgctctacttcaccttcagcagcctcaccagtgtgggcttcggcaacgtctctcccaacaccaactcagagaagatcttctccatctgcgtcatgctcattggctccctcatgtatgctagcatcttcggcaacgtgtcggccatcatccagcggctgtactcgggcacagcccgctaccacacacagatgctgcgggtgcgggagttcatccgcttccaccagatccccaatcccctgcgccagcgcctcgaggagtacttccagcacgcctggtcctacaccaacggcatcgacatgaacgcggtgctgaagggcttccctgagtgcctgcaggctgacatctgcctgcacctgaaccgctcactgctgcagcactgcaaacccttccgaggggccaccaagggctgccttcgggccctggccatgaagttcaagaccacacatgcaccgccaggggacacactggtgcatgctggggacctgctcaccgccctgtacttcatctcccggggctccatcgagatcctgcggggcgacgtcgtcgtggccatcctggggaagaatgacatctttggggagcctctgaacctgtatgcaaggcctggcaagtcgaacggggatgtgcgggccctcacctactgtgacctacacaagatccatcgggacgacctgctggaggtgctggacatgtaccctgagttctccgaccacttctggtccagcctggagatcaccttcaacctgcgagataccaacatgatcccgggctcccccggcagtacggagttagagggtggcttcagtcggcaacgcaagcgcaagttgtccttccgcaggcgcacggacaaggacacggagcagccaggggaggtgtcggccttggggccgggccgggcgggggcagggccgagtagccggggccggccgggggggccgtggggggagagcccgtccagtggcccctccagccctgagagcagtgaggatgagggcccaggccgcagctccagccccctccgcctggtgcccttctccagccccaggccccccggagagccgccgggtggggagcccctgatggaggactgcgagaagagcagcgacacttgcaaccccctgtcaggcgccttctcaggagtgtccaacattttcagcttctggggggacagtcggggccgccagtaccaggagctccctcgatgccccgcccccacccccagcctcctcaacatccccctctccagcccgggtcggcggccccggggcgacgtggagagcaggctggatgccctccagcgccagctcaacaggctggagacccggctgagtgcagacatggccactgtcctgcagctgctacagaggcagatgacgctggtcccgcccgcctacagtgctgtgaccaccccggggcctggccccacttccacatccccgctgttgcccgtcagccccctccccaccctcaccttggactcgctttctcaggtttcccagttcatggcgtgtgaggagctgcccccgggggccccagagcttccccaagaaggccccacacgacgcctctccctaccgggccagctgggggccctcacctcccagcccctgcacagacacggctcggacccgggcagttagtggggctgcccagtgtggacacgtggctcacccagggatcaaggcgctgctgggccgctccccttggaggccctgctcaggaggccctgaccgtggaaggggagaggaactcgaaagcacagctcctcccccagcccttgggaccatcttctcctgcagtcccctgggccccagtgagaggggcaggggcagggccggcagtaggtggggcctgtggtccccccactgccctgagggcattagctggtctaactgcccggaggcacccggccctgggccttaggcacctcaaggacttttctgctatttactgctcttattgttaaggataataattaaggatcatatgaataattaatgaagatgctgatgactatgaataataaataattatcctgaggaga

SEQ ID NO: 107 - DNA, 3884 bp, Homo sapiens
  source 1..3884: mol_type = genomic DNA
  misc_feature 1..3884: note = cDNA of KCNH2 gene SNP c.1447G>T (p.Val483Phe)
atgccggtgcggaggggccacgtcgcgccgcagaacaccttcctggacaccatcatccgcaagtttgagggccagagccgtaagttcatcatcgccaacgctcgggtggagaactgcgccgtcatctactgcaacgacggcttctgcgagctgtgcggctactcgcgggccgaggtgatgcagcgaccctgcacctgcgacttcctgcacgggccgcgcacgcagcgccgcgctgccgcgcagatcgcgcaggcactgctgggcgccgaggagcgcaaagtggaaatcgccttctaccggaaagatgggagctgcttcctatgtctggtggatgtggtgcccgtgaagaacgaggatggggctgtcatcatgttcatcctcaatttcgaggtggtgatggagaaggacatggtggggtccccggctcatgacaccaaccaccggggcccccccaccagctggctggccccaggccgcgccaagaccttccgcctgaagctgcccgcgctgctggcgctgacggcccgggagtcgtcggtgcggtcgggcggcgcgggcggcgcgggcgccccgggggccgtggtggtggacgtggacctgacgcccgcggcacccagcagcgagtcgctggccctggacgaagtgacagccatggacaaccacgtggcagggctcgggcccgcggaggagcggcgtgcgctggtgggtcccggctctccgccccgcagcgcgcccggccagctcccatcgccccgggcgcacagcctcaaccccgacgcctcgggctccagctgcagcctggcccggacgcgctcccgagaaagctgcgccagcgtgcgccgcgcctcgtcggccgacgacatcgaggccatgcgcgccggggtgctgcccccgccaccgcgccacgccagcaccggggccatgcacccactgcgcagcggcttgctcaactccacctcggactccgacctcgtgcgctaccgcaccattagcaagattccccaaatcaccctcaactttgtggacctcaagggcgaccccttcttggcttcgcccaccagtgaccgtgagatcatagcacctaagataaaggagcgaacccacaatgtcactgagaaggtcacccaggtcctgtccctgggcgccgacgtgctgcctgagtacaagctgcaggcaccgcgcatccaccgctggaccatcctgcattacagccccttcaaggccgtgtgggactggctcatcctgctgctggtcatctacacggctgtcttcacaccctactcggctgccttcctgctgaaggagacggaagaaggcccgcctgctaccgagtgtggctacgcctgccagccgctggctgtggtggacctcatcgtggacatcatgttcattgtggacatcctcatcaacttccgcaccacctacgtcaatgccaacgaggaggtgttcagccaccccggccgcatcgccgtccactacttcaagggctggttcctcatcgacatggtggccgccatccccttcgacctgctcatcttcggctctggctctgaggagctgatcgggctgctgaagactgcgcggctgctgcggctggtgcgcgtggcgcggaagctggatcgctactcagagtacggcgcggccgtgctgttcttgctcatgtgcacctttgcgctcatcgcgcactggctagcctgcatctggtacgccatcggcaacatggagcagccacacatggactcacgcatcggctggctgcacaacctgggcgaccagataggcaaaccctacaacagcagcggcctgggcggcccctccatcaaggacaagtatgtgacggcgctctacttcaccttcagcagcctcaccagtgtgggcttcggcaacgtctctcccaacaccaactcagagaagatcttctccatctgcgtcatgctcattggctccctcatgtatgctagcatcttcggcaacgtgtcggccatcatccagcggctgtactcgggcacagcccgctaccacacacagatgctgcgggtgcgggagttcatccgcttccaccagatccccaatcccctgcgccagcgcctcgaggagtacttccagcacgcctggtcctacaccaacggcatcgacatgaacgcggtgctgaagggcttccctgagtgcctgcaggctgacatctgcctgcacctgaaccgctcactgctgcagcactgcaaacccttccgaggggccaccaagggctgccttcgggccctggccatgaagttcaagaccacacatgcaccgccaggggacacactggtgcatgctggggacctgctcaccgccctgtacttcatctcccggggctccatcgagatcctgcggggcgacgtcgtcgtggccatcctggggaagaatgacatctttggggagcctctgaacctgtatgcaaggcctggcaagtcgaacggggatgtgcgggccctcacctactgtgacctacacaagatccatcgggacgacctgctggaggtgctggacatgtaccctgagttctccgaccacttctggtccagcctggagatcaccttcaacctgcgagataccaacatgatcccgggctcccccggcagtacggagttagagggtggcttcagtcggcaacgcaagcgcaagttgtccttccgcaggcgcacggacaaggacacggagcagccaggggaggtgtcggccttggggccgggccgggcgggggcagggccgagtagccggggccggccgggggggccgtggggggagagcccgtccagtggcccctccagccctgagagcagtgaggatgagggcccaggccgcagctccagccccctccgcctggtgcccttctccagccccaggccccccggagagccgccgggtggggagcccctgatggaggactgcgagaagagcagcgacacttgcaaccccctgtcaggcgccttctcaggagtgtccaacattttcagcttctggggggacagtcggggccgccagtaccaggagctccctcgatgccccgcccccacccccagcctcctcaacatccccctctccagcccgggtcggcggccccggggcgacgtggagagcaggctggatgccctccagcgccagctcaacaggctggagacccggctgagtgcagacatggccactgtcctgcagctgctacagaggcagatgacgctggtcccgcccgcctacagtgctgtgaccaccccggggcctggccccacttccacatccccgctgttgcccgtcagccccctccccaccctcaccttggactcgctttctcaggtttcccagttcatggcgtgtgaggagctgcccccgggggccccagagcttccccaagaaggccccacacgacgcctctccctaccgggccagctgggggccctcacctcccagcccctgcacagacacggctcggacccgggcagttagtggggctgcccagtgtggacacgtggctcacccagggatcaaggcgctgctgggccgctccccttggaggccctgctcaggaggccctgaccgtggaaggggagaggaactcgaaagcacagctcctcccccagcccttgggaccatcttctcctgcagtcccctgggccccagtgagaggggcaggggcagggccggcagtaggtggggcctgtggtccccccactgccctgagggcattagctggtctaactgcccggaggcacccggccctgggccttaggcacctcaaggacttttctgctatttactgctcttattgttaaggataataattaaggatcatatgaataattaatgaagatgctgatgactatgaataataaataattatcctgaggaga

SEQ ID NO: 108 - DNA, 3884 bp, Homo sapiens
  source 1..3884: mol_type = genomic DNA
  misc_feature 1..3884: note = cDNA of KCNH2 gene SNP c.1459G>A (p.Gly487Ser)
atgccggtgcggaggggccacgtcgcgccgcagaacaccttcctggacaccatcatccgcaagtttgagggccagagccgtaagttcatcatcgccaacgctcgggtggagaactgcgccgtcatctactgcaacgacggcttctgcgagctgtgcggctactcgcgggccgaggtgatgcagcgaccctgcacctgcgacttcctgcacgggccgcgcacgcagcgccgcgctgccgcgcagatcgcgcaggcactgctgggcgccgaggagcgcaaagtggaaatcgccttctaccggaaagatgggagctgcttcctatgtctggtggatgtggtgcccgtgaagaacgaggatggggctgtcatcatgttcatcctcaatttcgaggtggtgatggagaaggacatggtggggtccccggctcatgacaccaaccaccggggcccccccaccagctggctggccccaggccgcgccaagaccttccgcctgaagctgcccgcgctgctggcgctgacggcccgggagtcgtcggtgcggtcgggcggcgcgggcggcgcgggcgccccgggggccgtggtggtggacgtggacctgacgcccgcggcacccagcagcgagtcgctggccctggacgaagtgacagccatggacaaccacgtggcagggctcgggcccgcggaggagcggcgtgcgctggtgggtcccggctctccgccccgcagcgcgcccggccagctcccatcgccccgggcgcacagcctcaaccccgacgcctcgggctccagctgcagcctggcccggacgcgctcccgagaaagctgcgccagcgtgcgccgcgcctcgtcggccgacgacatcgaggccatgcgcgccggggtgctgcccccgccaccgcgccacgccagcaccggggccatgcacccactgcgcagcggcttgctcaactccacctcggactccgacctcgtgcgctaccgcaccattagcaagattccccaaatcaccctcaactttgtggacctcaagggcgaccccttcttggcttcgcccaccagtgaccgtgagatcatagcacctaagataaaggagcgaacccacaatgtcactgagaaggtcacccaggtcctgtccctgggcgccgacgtgctgcctgagtacaagctgcaggcaccgcgcatccaccgctggaccatcctgcattacagccccttcaaggccgtgtgggactggctcatcctgctgctggtcatctacacggctgtcttcacaccctactcggctgccttcctgctgaaggagacggaagaaggcccgcctgctaccgagtgtggctacgcctgccagccgctggctgtggtggacctcatcgtggacatcatgttcattgtggacatcctcatcaacttccgcaccacctacgtcaatgccaacgaggaggtggtcagccaccccagccgcatcgccgtccactacttcaagggctggttcctcatcgacatggtggccgccatccccttcgacctgctcatcttcggctctggctctgaggagctgatcgggctgctgaagactgcgcggctgctgcggctggtgcgcgtggcgcggaagctggatcgctactcagagtacggcgcggccgtgctgttcttgctcatgtgcacctttgcgctcatcgcgcactggctagcctgcatctggtacgccatcggcaacatggagcagccacacatggactcacgcatcggctggctgcacaacctgggcgaccagataggcaaaccctacaacagcagcggcctgggcggcccctccatcaaggacaagtatgtgacggcgctctacttcaccttcagcagcctcaccagtgtgggcttcggcaacgtctctcccaacaccaactcagagaagatcttctccatctgcgtcatgctcattggctccctcatgtatgctagcatcttcggcaacgtgtcggccatcatccagcggctgtactcgggcacagcccgctaccacacacagatgctgcgggtgcgggagttcatccgcttccaccagatccccaatcccctgcgccagcgcctcgaggagtacttccagcacgcctggtcctacaccaacggcatcgacatgaacgcggtgctgaagggcttccctgagtgcctgcaggctgacatctgcctgcacctgaaccgctcactgctgcagcactgcaaacccttccgaggggccaccaagggctgccttcgggccctggccatgaagttcaagaccacacatgcaccgccaggggacacactggtgcatgctggggacctgctcaccgccctgtacttcatctcccggggctccatcgagatcctgcggggcgacgtcgtcgtggccatcctggggaagaatgacatctttggggagcctctgaacctgtatgcaaggcctggcaagtcgaacggggatgtgcgggccctcacctactgtgacctacacaagatccatcgggacgacctgctggaggtgctggacatgtaccctgagttctccgaccacttctggtccagcctggagatcaccttcaacctgcgagataccaacatgatcccgggctcccccggcagtacggagttagagggtggcttcagtcggcaacgcaagcgcaagttgtccttccgcaggcgcacggacaaggacacggagcagccaggggaggtgtcggccttggggccgggccgggcgggggcagggccgagtagccggggccggccgggggggccgtggggggagagcccgtccagtggcccctccagccctgagagcagtgaggatgagggcccaggccgcagctccagccccctccgcctggtgcccttctccagccccaggccccccggagagccgccgggtggggagcccctgatggaggactgcgagaagagcagcgacacttgcaaccccctgtcaggcgccttctcaggagtgtccaacattttcagcttctggggggacagtcggggccgccagtaccaggagctccctcgatgccccgcccccacccccagcctcctcaacatccccctctccagcccgggtcggcggccccggggcgacgtggagagcaggctggatgccctccagcgccagctcaacaggctggagacccggctgagtgcagacatggccactgtcctgcagctgctacagaggcagatgacgctggtcccgcccgcctacagtgctgtgaccaccccggggcctggccccacttccacatccccgctgttgcccgtcagccccctccccaccctcaccttggactcgctttctcaggtttcccagttcatggcgtgtgaggagctgcccccgggggccccagagcttccccaagaaggccccacacgacgcctctccctaccgggccagctgggggccctcacctcccagcccctgcacagacacggctcggacccgggcagttagtggggctgcccagtgtggacacgtggctcacccagggatcaaggcgctgctgggccgctccccttggaggccctgctcaggaggccctgaccgtggaaggggagaggaactcgaaagcacagctcctcccccagcccttgggaccatcttctcctgcagtcccctgggccccagtgagaggggcaggggcagggccggcagtaggtggggcctgtggtccccccactgccctgagggcattagctggtctaactgcccggaggcacccggccctgggccttaggcacctcaaggacttttctgctatttactgctcttattgttaaggataataattaaggatcatatgaataattaatgaagatgctgatgactatgaataataaataattatcctgaggaga

SEQ ID NO: 109 - DNA, 3884 bp, Homo sapiens
  source 1..3884: mol_type = genomic DNA
  misc_feature 1..3884: note = cDNA of KCNH2 gene SNP c.1460G>C (p.Gly487Ala)
atgccggtgcggaggggccacgtcgcgccgcagaacaccttcctggacaccatcatccgcaagtttgagggccagagccgtaagttcatcatcgccaacgctcgggtggagaactgcgccgtcatctactgcaacgacggcttctgcgagctgtgcggctactcgcgggccgaggtgatgcagcgaccctgcacctgcgacttcctgcacgggccgcgcacgcagcgccgcgctgccgcgcagatcgcgcaggcactgctgggcgccgaggagcgcaaagtggaaatcgccttctaccggaaagatgggagctgcttcctatgtctggtggatgtggtgcccgtgaagaacgaggatggggctgtcatcatgttcatcctcaatttcgaggtggtgatggagaaggacatggtggggtccccggctcatgacaccaaccaccggggcccccccaccagctggctggccccaggccgcgccaagaccttccgcctgaagctgcccgcgctgctggcgctgacggcccgggagtcgtcggtgcggtcgggcggcgcgggcggcgcgggcgccccgggggccgtggtggtggacgtggacctgacgcccgcggcacccagcagcgagtcgctggccctggacgaagtgacagccatggacaaccacgtggcagggctcgggcccgcggaggagcggcgtgcgctggtgggtcccggctctccgccccgcagcgcgcccggccagctcccatcgccccgggcgcacagcctcaaccccgacgcctcgggctccagctgcagcctggcccggacgcgctcccgagaaagctgcgccagcgtgcgccgcgcctcgtcggccgacgacatcgaggccatgcgcgccggggtgctgcccccgccaccgcgccacgccagcaccggggccatgcacccactgcgcagcggcttgctcaactccacctcggactccgacctcgtgcgctaccgcaccattagcaagattccccaaatcaccctcaactttgtggacctcaagggcgaccccttcttggcttcgcccaccagtgaccgtgagatcatagcacctaagataaaggagcgaacccacaatgtcactgagaaggtcacccaggtcctgtccctgggcgccgacgtgctgcctgagtacaagctgcaggcaccgcgcatccaccgctggaccatcctgcattacagccccttcaaggccgtgtgggactggctcatcctgctgctggtcatctacacggctgtcttcacaccctactcggctgccttcctgctgaaggagacggaagaaggcccgcctgctaccgagtgtggctacgcctgccagccgctggctgtggtggacctcatcgtggacatcatgttcattgtggacatcctcatcaacttccgcaccacctacgtcaatgccaacgaggaggtggtcagccaccccgcccgcatcgccgtccactacttcaagggctggttcctcatcgacatggtggccgccatccccttcgacctgctcatcttcggctctggctctgaggagctgatcgggctgctgaagactgcgcggctgctgcggctggtgcgcgtggcgcggaagctggatcgctactcagagtacggcgcggccgtgctgttcttgctcatgtgcacctttgcgctcatcgcgcactggctagcctgcatctggtacgccatcggcaacatggagcagccacacatggactcacgcatcggctggctgcacaacctgggcgaccagataggcaaaccctacaacagcagcggcctgggcggcccctccatcaaggacaagtatgtgacggcgctctacttcaccttcagcagcctcaccagtgtgggcttcggcaacgtctctcccaacaccaactcagagaagatcttctccatctgcgtcatgctcattggctccctcatgtatgctagcatcttcggcaacgtgtcggccatcatccagcggctgtactcgggcacagcccgctaccacacacagatgctgcgggtgcgggagttcatccgcttccaccagatccccaatcccctgcgccagcgcctcgaggagtacttccagcacgcctggtcctacaccaacggcatcgacatgaacgcggtgctgaagggcttccctgagtgcctgcaggctgacatctgcctgcacctgaaccgctcactgctgcagcactgcaaacccttccgaggggccaccaagggctgccttcgggccctggccatgaagttcaagaccacacatgcaccgccaggggacacactggtgcatgctggggacctgctcaccgccctgtacttcatctcccggggctccatcgagatcctgcggggcgacgtcgtcgtggccatcctggggaagaatgacatctttggggagcctctgaacctgtatgcaaggcctggcaagtcgaacggggatgtgcgggccctcacctactgtgacctacacaagatccatcgggacgacctgctggaggtgctggacatgtaccctgagttctccgaccacttctggtccagcctggagatcaccttcaacctgcgagataccaacatgatcccgggctcccccggcagtacggagttagagggtggcttcagtcggcaacgcaagcgcaagttgtccttccgcaggcgcacggacaaggacacggagcagccaggggaggtgtcggccttggggccgggccgggcgggggcagggccgagtagccggggccggccgggggggccgtggggggagagcccgtccagtggcccctccagccctgagagcagtgaggatgagggcccaggccgcagctccagccccctccgcctggtgcccttctccagccccaggccccccggagagccgccgggtggggagcccctgatggaggactgcgagaagagcagcgacacttgcaaccccctgtcaggcgccttctcaggagtgtccaacattttcagcttctggggggacagtcggggccgccagtaccaggagctccctcgatgccccgcccccacccccagcctcctcaacatccccctctccagcccgggtcggcggccccggggcgacgtggagagcaggctggatgccctccagcgccagctcaacaggctggagacccggctgagtgcagacatggccactgtcctgcagctgctacagaggcagatgacgctggtcccgcccgcctacagtgctgtgaccaccccggggcctggccccacttccacatccccgctgttgcccgtcagccccctccccaccctcaccttggactcgctttctcaggtttcccagttcatggcgtgtgaggagctgcccccgggggccccagagcttccccaagaaggccccacacgacgcctctccctaccgggccagctgggggccctcacctcccagcccctgcacagacacggctcggacccgggcagttagtggggctgcccagtgtggacacgtggctcacccagggatcaaggcgctgctgggccgctccccttggaggccctgctcaggaggccctgaccgtggaaggggagaggaactcgaaagcacagctcctcccccagcccttgggaccatcttctcctgcagtcccctgggccccagtgagaggggcaggggcagggccggcagtaggtggggcctgtggtccccccactgccctgagggcattagctggtctaactgcccggaggcacccggccctgggccttaggcacctcaaggacttttctgctatttactgctcttattgttaaggataataattaaggatcatatgaataattaatgaagatgctgatgactatgaataataaataattatcctgaggaga

SEQ ID NO: 110 - DNA, 3884 bp, Homo sapiens
  source 1..3884: mol_type = genomic DNA
  misc_feature 1..3884: note = cDNA of KCNH2 gene SNP c.1462C>T (p.Arg488Cys)
atgccggtgcggaggggccacgtcgcgccgcagaacaccttcctggacaccatcatccgcaagtttgagggccagagccgtaagttcatcatcgccaacgctcgggtggagaactgcgccgtcatctactgcaacgacggcttctgcgagctgtgcggctactcgcgggccgaggtgatgcagcgaccctgcacctgcgacttcctgcacgggccgcgcacgcagcgccgcgctgccgcgcagatcgcgcaggcactgctgggcgccgaggagcgcaaagtggaaatcgccttctaccggaaagatgggagctgcttcctatgtctggtggatgtggtgcccgtgaagaacgaggatggggctgtcatcatgttcatcctcaatttcgaggtggtgatggagaaggacatggtggggtccccggctcatgacaccaaccaccggggcccccccaccagctggctggccccaggccgcgccaagaccttccgcctgaagctgcccgcgctgctggcgctgacggcccgggagtcgtcggtgcggtcgggcggcgcgggcggcgcgggcgccccgggggccgtggtggtggacgtggacctgacgcccgcggcacccagcagcgagtcgctggccctggacgaagtgacagccatggacaaccacgtggcagggctcgggcccgcggaggagcggcgtgcgctggtgggtcccggctctccgccccgcagcgcgcccggccagctcccatcgccccgggcgcacagcctcaaccccgacgcctcgggctccagctgcagcctggcccggacgcgctcccgagaaagctgcgccagcgtgcgccgcgcctcgtcggccgacgacatcgaggccatgcgcgccggggtgctgcccccgccaccgcgccacgccagcaccggggccatgcacccactgcgcagcggcttgctcaactccacctcggactccgacctcgtgcgctaccgcaccattagcaagattccccaaatcaccctcaactttgtggacctcaagggcgaccccttcttggcttcgcccaccagtgaccgtgagatcatagcacctaagataaaggagcgaacccacaatgtcactgagaaggtcacccaggtcctgtccctgggcgccgacgtgctgcctgagtacaagctgcaggcaccgcgcatccaccgctggaccatcctgcattacagccccttcaaggccgtgtgggactggctcatcctgctgctggtcatctacacggctgtcttcacaccctactcggctgccttcctgctgaaggagacggaagaaggcccgcctgctaccgagtgtggctacgcctgccagccgctggctgtggtggacctcatcgtggacatcatgttcattgtggacatcctcatcaacttccgcaccacctacgtcaatgccaacgaggaggtggtcagccaccccggctgcatcgccgtccactacttcaagggctggttcctcatcgacatggtggccgccatccccttcgacctgctcatcttcggctctggctctgaggagctgatcgggctgctgaagactgcgcggctgctgcggctggtgcgcgtggcgcggaagctggatcgctactcagagtacggcgcggccgtgctgttcttgctcatgtgcacctttgcgctcatcgcgcactggctagcctgcatctggtacgccatcggcaacatggagcagccacacatggactcacgcatcggctggctgcacaacctgggcgaccagataggcaaaccctacaacagcagcggcctgggcggcccctccatcaaggacaagtatgtgacggcgctctacttcaccttcagcagcctcaccagtgtgggcttcggcaacgtctctcccaacaccaactcagagaagatcttctccatctgcgtcatgctcattggctccctcatgtatgctagcatcttcggcaacgtgtcggccatcatccagcggctgtactcgggcacagcccgctaccacacacagatgctgcgggtgcgggagttcatccgcttccaccagatccccaatcccctgcgccagcgcctcgaggagtacttccagcacgcctggtcctacaccaacggcatcgacatgaacgcggtgctgaagggcttccctgagtgcctgcaggctgacatctgcctgcacctgaaccgctcactgctgcagcactgcaaacccttccgaggggccaccaagggctgccttcgggccctggccatgaagttcaagaccacacatgcaccgccaggggacacactggtgcatgctggggacctgctcaccgccctgtacttcatctcccggggctccatcgagatcctgcggggcgacgtcgtcgtggccatcctggggaagaatgacatctttggggagcctctgaacctgtatgcaaggcctggcaagtcgaacggggatgtgcgggccctcacctactgtgacctacacaagatccatcgggacgacctgctggaggtgctggacatgtaccctgagttctccgaccacttctggtccagcctggagatcaccttcaacctgcgagataccaacatgatcccgggctcccccggcagtacggagttagagggtggcttcagtcggcaacgcaagcgcaagttgtccttccgcaggcgcacggacaaggacacggagcagccaggggaggtgtcggccttggggccgggccgggcgggggcagggccgagtagccggggccggccgggggggccgtggggggagagcccgtccagtggcccctccagccctgagagcagtgaggatgagggcccaggccgcagctccagccccctccgcctggtgcccttctccagccccaggccccccggagagccgccgggtggggagcccctgatggaggactgcgagaagagcagcgacacttgcaaccccctgtcaggcgccttctcaggagtgtccaacattttcagcttctggggggacagtcggggccgccagtaccaggagctccctcgatgccccgcccccacccccagcctcctcaacatccccctctccagcccgggtcggcggccccggggcgacgtggagagcaggctggatgccctccagcgccagctcaacaggctggagacccggctgagtgcagacatggccactgtcctgcagctgctacagaggcagatgacgctggtcccgcccgcctacagtgctgtgaccaccccggggcctggccccacttccacatccccgctgttgcccgtcagccccctccccaccctcaccttggactcgctttctcaggtttcccagttcatggcgtgtgaggagctgcccccgggggccccagagcttccccaagaaggccccacacgacgcctctccctaccgggccagctgggggccctcacctcccagcccctgcacagacacggctcggacccgggcagttagtggggctgcccagtgtggacacgtggctcacccagggatcaaggcgctgctgggccgctccccttggaggccctgctcaggaggccctgaccgtggaaggggagaggaactcgaaagcacagctcctcccccagcccttgggaccatcttctcctgcagtcccctgggccccagtgagaggggcaggggcagggccggcagtaggtggggcctgtggtccccccactgccctgagggcattagctggtctaactgcccggaggcacccggccctgggccttaggcacctcaaggacttttctgctatttactgctcttattgttaaggataataattaaggatcatatgaataattaatgaagatgctgatgactatgaataataaataattatcctgaggaga

SEQ ID NO: 111 - DNA, 3884 bp, Homo sapiens
  source 1..3884: mol_type = genomic DNA
  misc_feature 1..3884: note = cDNA of KCNH2 gene SNP c.1465A>T (p.Ile489Phe)
atgccggtgcggaggggccacgtcgcgccgcagaacaccttcctggacaccatcatccgcaagtttgagggccagagccgtaagttcatcatcgccaacgctcgggtggagaactgcgccgtcatctactgcaacgacggcttctgcgagctgtgcggctactcgcgggccgaggtgatgcagcgaccctgcacctgcgacttcctgcacgggccgcgcacgcagcgccgcgctgccgcgcagatcgcgcaggcactgctgggcgccgaggagcgcaaagtggaaatcgccttctaccggaaagatgggagctgcttcctatgtctggtggatgtggtgcccgtgaagaacgaggatggggctgtcatcatgttcatcctcaatttcgaggtggtgatggagaaggacatggtggggtccccggctcatgacaccaaccaccggggcccccccaccagctggctggccccaggccgcgccaagaccttccgcctgaagctgcccgcgctgctggcgctgacggcccgggagtcgtcggtgcggtcgggcggcgcgggcggcgcgggcgccccgggggccgtggtggtggacgtggacctgacgcccgcggcacccagcagcgagtcgctggccctggacgaagtgacagccatggacaaccacgtggcagggctcgggcccgcggaggagcggcgtgcgctggtgggtcccggctctccgccccgcagcgcgcccggccagctcccatcgccccgggcgcacagcctcaaccccgacgcctcgggctccagctgcagcctggcccggacgcgctcccgagaaagctgcgccagcgtgcgccgcgcctcgtcggccgacgacatcgaggccatgcgcgccggggtgctgcccccgccaccgcgccacgccagcaccggggccatgcacccactgcgcagcggcttgctcaactccacctcggactccgacctcgtgcgctaccgcaccattagcaagattccccaaatcaccctcaactttgtggacctcaagggcgaccccttcttggcttcgcccaccagtgaccgtgagatcatagcacctaagataaaggagcgaacccacaatgtcactgagaaggtcacccaggtcctgtccctgggcgccgacgtgctgcctgagtacaagctgcaggcaccgcgcatccaccgctggaccatcctgcattacagccccttcaaggccgtgtgggactggctcatcctgctgctggtcatctacacggctgtcttcacaccctactcggctgccttcctgctgaaggagacggaagaaggcccgcctgctaccgagtgtggctacgcctgccagccgctggctgtggtggacctcatcgtggacatcatgttcattgtggacatcctcatcaacttccgcaccacctacgtcaatgccaacgaggaggtggtcagccaccccggccgcttcgccgtccactacttcaagggctggttcctcatcgacatggtggccgccatccccttcgacctgctcatcttcggctctggctctgaggagctgatcgggctgctgaagactgcgcggctgctgcggctggtgcgcgtggcgcggaagctggatcgctactcagagtacggcgcggccgtgctgttcttgctcatgtgcacctttgcgctcatcgcgcactggctagcctgcatctggtacgccatcggcaacatggagcagccacacatggactcacgcatcggctggctgcacaacctgggcgaccagataggcaaaccctacaacagcagcggcctgggcggcccctccatcaaggacaagtatgtgacggcgctctacttcaccttcagcagcctcaccagtgtgggcttcggcaacgtctctcccaacaccaactcagagaagatcttctccatctgcgtcatgctcattggctccctcatgtatgctagcatcttcggcaacgtgtcggccatcatccagcggctgtactcgggcacagcccgctaccacacacagatgctgcgggtgcgggagttcatccgcttccaccagatccccaatcccctgcgccagcgcctcgaggagtacttccagcacgcctggtcctacaccaacggcatcgacatgaacgcggtgctgaagggcttccctgagtgcctgcaggctgacatctgcctgcacctgaaccgctcactgctgcagcactgcaaacccttccgaggggccaccaagggctgccttcgggccctggccatgaagttcaagaccacacatgcaccgccaggggacacactggtgcatgctggggacctgctcaccgccctgtacttcatctcccggggctccatcgagatcctgcggggcgacgtcgtcgtggccatcctggggaagaatgacatctttggggagcctctgaacctgtatgcaaggcctggcaagtcgaacggggatgtgcgggccctcacctactgtgacctacacaagatccatcgggacgacctgctggaggtgctggacatgtaccctgagttctccgaccacttctggtccagcctggagatcaccttcaacctgcgagataccaacatgatcccgggctcccccggcagtacggagttagagggtggcttcagtcggcaacgcaagcgcaagttgtccttccgcaggcgcacggacaaggacacggagcagccaggggaggtgtcggccttggggccgggccgggcgggggcagggccgagtagccggggccggccgggggggccgtggggggagagcccgtccagtggcccctccagccctgagagcagtgaggatgagggcccaggccgcagctccagccccctccgcctggtgcccttctccagccccaggccccccggagagccgccgggtggggagcccctgatggaggactgcgagaagagcagcgacacttgcaaccccctgtcaggcgccttctcaggagtgtccaacattttcagcttctggggggacagtcggggccgccagtaccaggagctccctcgatgccccgcccccacccccagcctcctcaacatccccctctccagcccgggtcggcggccccggggcgacgtggagagcaggctggatgccctccagcgccagctcaacaggctggagacccggctgagtgcagacatggccactgtcctgcagctgctacagaggcagatgacgctggtcccgcccgcctacagtgctgtgaccaccccggggcctggccccacttccacatccccgctgttgcccgtcagccccctccccaccctcaccttggactcgctttctcaggtttcccagttcatggcgtgtgaggagctgcccccgggggccccagagcttccccaagaaggccccacacgacgcctctccctaccgggccagctgggggccctcacctcccagcccctgcacagacacggctcggacccgggcagttagtggggctgcccagtgtggacacgtggctcacccagggatcaaggcgctgctgggccgctccccttggaggccctgctcaggaggccctgaccgtggaaggggagaggaactcgaaagcacagctcctcccccagcccttgggaccatcttctcctgcagtcccctgggccccagtgagaggggcaggggcagggccggcagtaggtggggcctgtggtccccccactgccctgagggcattagctggtctaactgcccggaggcacccggccctgggccttaggcacctcaaggacttttctgctatttactgctcttattgttaaggataataattaaggatcatatgaataattaatgaagatgctgatgactatgaataataaataattatcctgaggaga

SEQ ID NO: 112 - DNA, 3884 bp, Homo sapiens
  source 1..3884: mol_type = genomic DNA
  misc_feature 1..3884: note = cDNA of KCNH2 gene SNP c.1468G>A (p.Ala490Thr)
atgccggtgcggaggggccacgtcgcgccgcagaacaccttcctggacaccatcatccgcaagtttgagggccagagccgtaagttcatcatcgccaacgctcgggtggagaactgcgccgtcatctactgcaacgacggcttctgcgagctgtgcggctactcgcgggccgaggtgatgcagcgaccctgcacctgcgacttcctgcacgggccgcgcacgcagcgccgcgctgccgcgcagatcgcgcaggcactgctgggcgccgaggagcgcaaagtggaaatcgccttctaccggaaagatgggagctgcttcctatgtctggtggatgtggtgcccgtgaagaacgaggatggggctgtcatcatgttcatcctcaatttcgaggtggtgatggagaaggacatggtggggtccccggctcatgacaccaaccaccggggcccccccaccagctggctggccccaggccgcgccaagaccttccgcctgaagctgcccgcgctgctggcgctgacggcccgggagtcgtcggtgcggtcgggcggcgcgggcggcgcgggcgccccgggggccgtggtggtggacgtggacctgacgcccgcggcacccagcagcgagtcgctggccctggacgaagtgacagccatggacaaccacgtggcagggctcgggcccgcggaggagcggcgtgcgctggtgggtcccggctctccgccccgcagcgcgcccggccagctcccatcgccccgggcgcacagcctcaaccccgacgcctcgggctccagctgcagcctggcccggacgcgctcccgagaaagctgcgccagcgtgcgccgcgcctcgtcggccgacgacatcgaggccatgcgcgccggggtgctgcccccgccaccgcgccacgccagcaccggggccatgcacccactgcgcagcggcttgctcaactccacctcggactccgacctcgtgcgctaccgcaccattagcaagattccccaaatcaccctcaactttgtggacctcaagggcgaccccttcttggcttcgcccaccagtgaccgtgagatcatagcacctaagataaaggagcgaacccacaatgtcactgagaaggtcacccaggtcctgtccctgggcgccgacgtgctgcctgagtacaagctgcaggcaccgcgcatccaccgctggaccatcctgcattacagccccttcaaggccgtgtgggactggctcatcctgctgctggtcatctacacggctgtcttcacaccctactcggctgccttcctgctgaaggagacggaagaaggcccgcctgctaccgagtgtggctacgcctgccagccgctggctgtggtggacctcatcgtggacatcatgttcattgtggacatcctcatcaacttccgcaccacctacgtcaatgccaacgaggaggtggtcagccaccccggccgcatcaccgtccactacttcaagggctggttcctcatcgacatggtggccgccatccccttcgacctgctcatcttcggctctggctctgaggagctgatcgggctgctgaagactgcgcggctgctgcggctggtgcgcgtggcgcggaagctggatcgctactcagagtacggcgcggccgtgctgttcttgctcatgtgcacctttgcgctcatcgcgcactggctagcctgcatctggtacgccatcggcaacatggagcagccacacatggactcacgcatcggctggctgcacaacctgggcgaccagataggcaaaccctacaacagcagcggcctgggcggcccctccatcaaggacaagtatgtgacggcgctctacttcaccttcagcagcctcaccagtgtgggcttcggcaacgtctctcccaacaccaactcagagaagatcttctccatctgcgtcatgctcattggctccctcatgtatgctagcatcttcggcaacgtgtcggccatcatccagcggctgtactcgggcacagcccgctaccacacacagatgctgcgggtgcgggagttcatccgcttccaccagatccccaatcccctgcgccagcgcctcgaggagtacttccagcacgcctggtcctacaccaacggcatcgacatgaacgcggtgctgaagggcttccctgagtgcctgcaggctgacatctgcctgcacctgaaccgctcactgctgcagcactgcaaacccttccgaggggccaccaagggctgccttcgggccctggccatgaagttcaagaccacacatgcaccgccaggggacacactggtgcatgctggggacctgctcaccgccctgtacttcatctcccggggctccatcgagatcctgcggggcgacgtcgtcgtggccatcctggggaagaatgacatctttggggagcctctgaacctgtatgcaaggcctggcaagtcgaacggggatgtgcgggccctcacctactgtgacctacacaagatccatcgggacgacctgctggaggtgctggacatgtaccctgagttctccgaccacttctggtccagcctggagatcaccttcaacctgcgagataccaacatgatcccgggctcccccggcagtacggagttagagggtggcttcagtcggcaacgcaagcgcaagttgtccttccgcaggcgcacggacaaggacacggagcagccaggggaggtgtcggccttggggccgggccgggcgggggcagggccgagtagccggggccggccgggggggccgtggggggagagcccgtccagtggcccctccagccctgagagcagtgaggatgagggcccaggccgcagctccagccccctccgcctggtgcccttctccagccccaggccccccggagagccgccgggtggggagcccctgatggaggactgcgagaagagcagcgacacttgcaaccccctgtcaggcgccttctcaggagtgtccaacattttcagcttctggggggacagtcggggccgccagtaccaggagctccctcgatgccccgcccccacccccagcctcctcaacatccccctctccagcccgggtcggcggccccggggcgacgtggagagcaggctggatgccctccagcgccagctcaacaggctggagacccggctgagtgcagacatggccactgtcctgcagctgctacagaggcagatgacgctggtcccgcccgcctacagtgctgtgaccaccccggggcctggccccacttccacatccccgctgttgcccgtcagccccctccccaccctcaccttggactcgctttctcaggtttcccagttcatggcgtgtgaggagctgcccccgggggccccagagcttccccaagaaggccccacacgacgcctctccctaccgggccagctgggggccctcacctcccagcccctgcacagacacggctcggacccgggcagttagtggggctgcccagtgtggacacgtggctcacccagggatcaaggcgctgctgggccgctccccttggaggccctgctcaggaggccctgaccgtggaaggggagaggaactcgaaagcacagctcctcccccagcccttgggaccatcttctcctgcagtcccctgggccccagtgagaggggcaggggcagggccggcagtaggtggggcctgtggtccccccactgccctgagggcattagctggtctaactgcccggaggcacccggccctgggccttaggcacctcaaggacttttctgctatttactgctcttattgttaaggataataattaaggatcatatgaataattaatgaagatgctgatgactatgaataataaataattatcctgaggaga

SEQ ID NO: 113 - DNA, 3884 bp, Homo sapiens
  source 1..3884: mol_type = genomic DNA
  misc_feature 1..3884: note = cDNA of KCNH2 gene SNP c.1468G>C (p.Ala490Pro)
atgccggtgcggaggggccacgtcgcgccgcagaacaccttcctggacaccatcatccgcaagtttgagggccagagccgtaagttcatcatcgccaacgctcgggtggagaactgcgccgtcatctactgcaacgacggcttctgcgagctgtgcggctactcgcgggccgaggtgatgcagcgaccctgcacctgcgacttcctgcacgggccgcgcacgcagcgccgcgctgccgcgcagatcgcgcaggcactgctgggcgccgaggagcgcaaagtggaaatcgccttctaccggaaagatgggagctgcttcctatgtctggtggatgtggtgcccgtgaagaacgaggatggggctgtcatcatgttcatcctcaatttcgaggtggtgatggagaaggacatggtggggtccccggctcatgacaccaaccaccggggcccccccaccagctggctggccccaggccgcgccaagaccttccgcctgaagctgcccgcgctgctggcgctgacggcccgggagtcgtcggtgcggtcgggcggcgcgggcggcgcgggcgccccgggggccgtggtggtggacgtggacctgacgcccgcggcacccagcagcgagtcgctggccctggacgaagtgacagccatggacaaccacgtggcagggctcgggcccgcggaggagcggcgtgcgctggtgggtcccggctctccgccccgcagcgcgcccggccagctcccatcgccccgggcgcacagcctcaaccccgacgcctcgggctccagctgcagcctggcccggacgcgctcccgagaaagctgcgccagcgtgcgccgcgcctcgtcggccgacgacatcgaggccatgcgcgccggggtgctgcccccgccaccgcgccacgccagcaccggggccatgcacccactgcgcagcggcttgctcaactccacctcggactccgacctcgtgcgctaccgcaccattagcaagattccccaaatcaccctcaactttgtggacctcaagggcgaccccttcttggcttcgcccaccagtgaccgtgagatcatagcacctaagataaaggagcgaacccacaatgtcactgagaaggtcacccaggtcctgtccctgggcgccgacgtgctgcctgagtacaagctgcaggcaccgcgcatccaccgctggaccatcctgcattacagccccttcaaggccgtgtgggactggctcatcctgctgctggtcatctacacggctgtcttcacaccctactcggctgccttcctgctgaaggagacggaagaaggcccgcctgctaccgagtgtggctacgcctgccagccgctggctgtggtggacctcatcgtggacatcatgttcattgtggacatcctcatcaacttccgcaccacctacgtcaatgccaacgaggaggtggtcagccaccccggccgcatccccgtccactacttcaagggctggttcctcatcgacatggtggccgccatccccttcgacctgctcatcttcggctctggctctgaggagctgatcgggctgctgaagactgcgcggctgctgcggctggtgcgcgtggcgcggaagctggatcgctactcagagtacggcgcggccgtgctgttcttgctcatgtgcacctttgcgctcatcgcgcactggctagcctgcatctggtacgccatcggcaacatggagcagccacacatggactcacgcatcggctggctgcacaacctgggcgaccagataggcaaaccctacaacagcagcggcctgggcggcccctccatcaaggacaagtatgtgacggcgctctacttcaccttcagcagcctcaccagtgtgggcttcggcaacgtctctcccaacaccaactcagagaagatcttctccatctgcgtcatgctcattggctccctcatgtatgctagcatcttcggcaacgtgtcggccatcatccagcggctgtactcgggcacagcccgctaccacacacagatgctgcgggtgcgggagttcatccgcttccaccagatccccaatcccctgcgccagcgcctcgaggagtacttccagcacgcctggtcctacaccaacggcatcgacatgaacgcggtgctgaagggcttccctgagtgcctgcaggctgacatctgcctgcacctgaaccgctcactgctgcagcactgcaaacccttccgaggggccaccaagggctgccttcgggccctggccatgaagttcaagaccacacatgcaccgccaggggacacactggtgcatgctggggacctgctcaccgccctgtacttcatctcccggggctccatcgagatcctgcggggcgacgtcgtcgtggccatcctggggaagaatgacatctttggggagcctctgaacctgtatgcaaggcctggcaagtcgaacggggatgtgcgggccctcacctactgtgacctacacaagatccatcgggacgacctgctggaggtgctggacatgtaccctgagttctccgaccacttctggtccagcctggagatcaccttcaacctgcgagataccaacatgatcccgggctcccccggcagtacggagttagagggtggcttcagtcggcaacgcaagcgcaagttgtccttccgcaggcgcacggacaaggacacggagcagccaggggaggtgtcggccttggggccgggccgggcgggggcagggccgagtagccggggccggccgggggggccgtggggggagagcccgtccagtggcccctccagccctgagagcagtgaggatgagggcccaggccgcagctccagccccctccgcctggtgcccttctccagccccaggccccccggagagccgccgggtggggagcccctgatggaggactgcgagaagagcagcgacacttgcaaccccctgtcaggcgccttctcaggagtgtccaacattttcagcttctggggggacagtcggggccgccagtaccaggagctccctcgatgccccgcccccacccccagcctcctcaacatccccctctccagcccgggtcggcggccccggggcgacgtggagagcaggctggatgccctccagcgccagctcaacaggctggagacccggctgagtgcagacatggccactgtcctgcagctgctacagaggcagatgacgctggtcccgcccgcctacagtgctgtgaccaccccggggcctggccccacttccacatccccgctgttgcccgtcagccccctccccaccctcaccttggactcgctttctcaggtttcccagttcatggcgtgtgaggagctgcccccgggggccccagagcttccccaagaaggccccacacgacgcctctccctaccgggccagctgggggccctcacctcccagcccctgcacagacacggctcggacccgggcagttagtggggctgcccagtgtggacacgtggctcacccagggatcaaggcgctgctgggccgctccccttggaggccctgctcaggaggccctgaccgtggaaggggagaggaactcgaaagcacagctcctcccccagcccttgggaccatcttctcctgcagtcccctgggccccagtgagaggggcaggggcagggccggcagtaggtggggcctgtggtccccccactgccctgagggcattagctggtctaactgcccggaggcacccggccctgggccttaggcacctcaaggacttttctgctatttactgctcttattgttaaggataataattaaggatcatatgaataattaatgaagatgctgatgactatgaataataaataattatcctgaggaga

SEQ ID NO: 114 - DNA, 3884 bp, Homo sapiens
  source 1..3884: mol_type = genomic DNA
  misc_feature 1..3884: note = cDNA of KCNH2 gene SNP c.1469C>T (p.Ala490Val)
atgccggtgcggaggggccacgtcgcgccgcagaacaccttcctggacaccatcatccgcaagtttgagggccagagccgtaagttcatcatcgccaacgctcgggtggagaactgcgccgtcatctactgcaacgacggcttctgcgagctgtgcggctactcgcgggccgaggtgatgcagcgaccctgcacctgcgacttcctgcacgggccgcgcacgcagcgccgcgctgccgcgcagatcgcgcaggcactgctgggcgccgaggagcgcaaagtggaaatcgccttctaccggaaagatgggagctgcttcctatgtctggtggatgtggtgcccgtgaagaacgaggatggggctgtcatcatgttcatcctcaatttcgaggtggtgatggagaaggacatggtggggtccccggctcatgacaccaaccaccggggcccccccaccagctggctggccccaggccgcgccaagaccttccgcctgaagctgcccgcgctgctggcgctgacggcccgggagtcgtcggtgcggtcgggcggcgcgggcggcgcgggcgccccgggggccgtggtggtggacgtggacctgacgcccgcggcacccagcagcgagtcgctggccctggacgaagtgacagccatggacaaccacgtggcagggctcgggcccgcggaggagcggcgtgcgctggtgggtcccggctctccgccccgcagcgcgcccggccagctcccatcgccccgggcgcacagcctcaaccccgacgcctcgggctccagctgcagcctggcccggacgcgctcccgagaaagctgcgccagcgtgcgccgcgcctcgtcggccgacgacatcgaggccatgcgcgccggggtgctgcccccgccaccgcgccacgccagcaccggggccatgcacccactgcgcagcggcttgctcaactccacctcggactccgacctcgtgcgctaccgcaccattagcaagattccccaaatcaccctcaactttgtggacctcaagggcgaccccttcttggcttcgcccaccagtgaccgtgagatcatagcacctaagataaaggagcgaacccacaatgtcactgagaaggtcacccaggtcctgtccctgggcgccgacgtgctgcctgagtacaagctgcaggcaccgcgcatccaccgctggaccatcctgcattacagccccttcaaggccgtgtgggactggctcatcctgctgctggtcatctacacggctgtcttcacaccctactcggctgccttcctgctgaaggagacggaagaaggcccgcctgctaccgagtgtggctacgcctgccagccgctggctgtggtggacctcatcgtggacatcatgttcattgtggacatcctcatcaacttccgcaccacctacgtcaatgccaacgaggaggtggtcagccaccccggccgcatcgtcgtccactacttcaagggctggttcctcatcgacatggtggccgccatccccttcgacctgctcatcttcggctctggctctgaggagctgatcgggctgctgaagactgcgcggctgctgcggctggtgcgcgtggcgcggaagctggatcgctactcagagtacggcgcggccgtgctgttcttgctcatgtgcacctttgcgctcatcgcgcactggctagcctgcatctggtacgccatcggcaacatggagcagccacacatggactcacgcatcggctggctgcacaacctgggcgaccagataggcaaaccctacaacagcagcggcctgggcggcccctccatcaaggacaagtatgtgacggcgctctacttcaccttcagcagcctcaccagtgtgggcttcggcaacgtctctcccaacaccaactcagagaagatcttctccatctgcgtcatgctcattggctccctcatgtatgctagcatcttcggcaacgtgtcggccatcatccagcggctgtactcgggcacagcccgctaccacacacagatgctgcgggtgcgggagttcatccgcttccaccagatccccaatcccctgcgccagcgcctcgaggagtacttccagcacgcctggtcctacaccaacggcatcgacatgaacgcggtgctgaagggcttccctgagtgcctgcaggctgacatctgcctgcacctgaaccgctcactgctgcagcactgcaaacccttccgaggggccaccaagggctgccttcgggccctggccatgaagttcaagaccacacatgcaccgccaggggacacactggtgcatgctggggacctgctcaccgccctgtacttcatctcccggggctccatcgagatcctgcggggcgacgtcgtcgtggccatcctggggaagaatgacatctttggggagcctctgaacctgtatgcaaggcctggcaagtcgaacggggatgtgcgggccctcacctactgtgacctacacaagatccatcgggacgacctgctggaggtgctggacatgtaccctgagttctccgaccacttctggtccagcctggagatcaccttcaacctgcgagataccaacatgatcccgggctcccccggcagtacggagttagagggtggcttcagtcggcaacgcaagcgcaagttgtccttccgcaggcgcacggacaaggacacggagcagccaggggaggtgtcggccttggggccgggccgggcgggggcagggccgagtagccggggccggccgggggggccgtggggggagagcccgtccagtggcccctccagccctgagagcagtgaggatgagggcccaggccgcagctccagccccctccgcctggtgcccttctccagccccaggccccccggagagccgccgggtggggagcccctgatggaggactgcgagaagagcagcgacacttgcaaccccctgtcaggcgccttctcaggagtgtccaacattttcagcttctggggggacagtcggggccgccagtaccaggagctccctcgatgccccgcccccacccccagcctcctcaacatccccctctccagcccgggtcggcggccccggggcgacgtggagagcaggctggatgccctccagcgccagctcaacaggctggagacccggctgagtgcagacatggccactgtcctgcagctgctacagaggcagatgacgctggtcccgcccgcctacagtgctgtgaccaccccggggcctggccccacttccacatccccgctgttgcccgtcagccccctccccaccctcaccttggactcgctttctcaggtttcccagttcatggcgtgtgaggagctgcccccgggggccccagagcttccccaagaaggccccacacgacgcctctccctaccgggccagctgggggccctcacctcccagcccctgcacagacacggctcggacccgggcagttagtggggctgcccagtgtggacacgtggctcacccagggatcaaggcgctgctgggccgctccccttggaggccctgctcaggaggccctgaccgtggaaggggagaggaactcgaaagcacagctcctcccccagcccttgggaccatcttctcctgcagtcccctgggccccagtgagaggggcaggggcagggccggcagtaggtggggcctgtggtccccccactgccctgagggcattagctggtctaactgcccggaggcacccggccctgggccttaggcacctcaaggacttttctgctatttactgctcttattgttaaggataataattaaggatcatatgaataattaatgaagatgctgatgactatgaataataaataattatcctgaggaga

SEQ ID NO: 115 - DNA, 3884 bp, Homo sapiens
  source 1..3884: mol_type = genomic DNA
  misc_feature 1..3884: note = cDNA of KCNH2 gene SNP c.146G>A (p.Cys49Tyr)
atgccggtgcggaggggccacgtcgcgccgcagaacaccttcctggacaccatcatccgcaagtttgagggccagagccgtaagttcatcatcgccaacgctcgggtggagaactgcgccgtcatctactgcaacgacggcttctacgagctgtgcggctactcgcgggccgaggtgatgcagcgaccctgcacctgcgacttcctgcacgggccgcgcacgcagcgccgcgctgccgcgcagatcgcgcaggcactgctgggcgccgaggagcgcaaagtggaaatcgccttctaccggaaagatgggagctgcttcctatgtctggtggatgtggtgcccgtgaagaacgaggatggggctgtcatcatgttcatcctcaatttcgaggtggtgatggagaaggacatggtggggtccccggctcatgacaccaaccaccggggcccccccaccagctggctggccccaggccgcgccaagaccttccgcctgaagctgcccgcgctgctggcgctgacggcccgggagtcgtcggtgcggtcgggcggcgcgggcggcgcgggcgccccgggggccgtggtggtggacgtggacctgacgcccgcggcacccagcagcgagtcgctggccctggacgaagtgacagccatggacaaccacgtggcagggctcgggcccgcggaggagcggcgtgcgctggtgggtcccggctctccgccccgcagcgcgcccggccagctcccatcgccccgggcgcacagcctcaaccccgacgcctcgggctccagctgcagcctggcccggacgcgctcccgagaaagctgcgccagcgtgcgccgcgcctcgtcggccgacgacatcgaggccatgcgcgccggggtgctgcccccgccaccgcgccacgccagcaccggggccatgcacccactgcgcagcggcttgctcaactccacctcggactccgacctcgtgcgctaccgcaccattagcaagattccccaaatcaccctcaactttgtggacctcaagggcgaccccttcttggcttcgcccaccagtgaccgtgagatcatagcacctaagataaaggagcgaacccacaatgtcactgagaaggtcacccaggtcctgtccctgggcgccgacgtgctgcctgagtacaagctgcaggcaccgcgcatccaccgctggaccatcctgcattacagccccttcaaggccgtgtgggactggctcatcctgctgctggtcatctacacggctgtcttcacaccctactcggctgccttcctgctgaaggagacggaagaaggcccgcctgctaccgagtgtggctacgcctgccagccgctggctgtggtggacctcatcgtggacatcatgttcattgtggacatcctcatcaacttccgcaccacctacgtcaatgccaacgaggaggtggtcagccaccccggccgcatcgccgtccactacttcaagggctggttcctcatcgacatggtggccgccatccccttcgacctgctcatcttcggctctggctctgaggagctgatcgggctgctgaagactgcgcggctgctgcggctggtgcgcgtggcgcggaagctggatcgctactcagagtacggcgcggccgtgctgttcttgctcatgtgcacctttgcgctcatcgcgcactggctagcctgcatctggtacgccatcggcaacatggagcagccacacatggactcacgcatcggctggctgcacaacctgggcgaccagataggcaaaccctacaacagcagcggcctgggcggcccctccatcaaggacaagtatgtgacggcgctctacttcaccttcagcagcctcaccagtgtgggcttcggcaacgtctctcccaacaccaactcagagaagatcttctccatctgcgtcatgctcattggctccctcatgtatgctagcatcttcggcaacgtgtcggccatcatccagcggctgtactcgggcacagcccgctaccacacacagatgctgcgggtgcgggagttcatccgcttccaccagatccccaatcccctgcgccagcgcctcgaggagtacttccagcacgcctggtcctacaccaacggcatcgacatgaacgcggtgctgaagggcttccctgagtgcctgcaggctgacatctgcctgcacctgaaccgctcactgctgcagcactgcaaacccttccgaggggccaccaagggctgccttcgggccctggccatgaagttcaagaccacacatgcaccgccaggggacacactggtgcatgctggggacctgctcaccgccctgtacttcatctcccggggctccatcgagatcctgcggggcgacgtcgtcgtggccatcctggggaagaatgacatctttggggagcctctgaacctgtatgcaaggcctggcaagtcgaacggggatgtgcgggccctcacctactgtgacctacacaagatccatcgggacgacctgctggaggtgctggacatgtaccctgagttctccgaccacttctggtccagcctggagatcaccttcaacctgcgagataccaacatgatcccgggctcccccggcagtacggagttagagggtggcttcagtcggcaacgcaagcgcaagttgtccttccgcaggcgcacggacaaggacacggagcagccaggggaggtgtcggccttggggccgggccgggcgggggcagggccgagtagccggggccggccgggggggccgtggggggagagcccgtccagtggcccctccagccctgagagcagtgaggatgagggcccaggccgcagctccagccccctccgcctggtgcccttctccagccccaggccccccggagagccgccgggtggggagcccctgatggaggactgcgagaagagcagcgacacttgcaaccccctgtcaggcgccttctcaggagtgtccaacattttcagcttctggggggacagtcggggccgccagtaccaggagctccctcgatgccccgcccccacccccagcctcctcaacatccccctctccagcccgggtcggcggccccggggcgacgtggagagcaggctggatgccctccagcgccagctcaacaggctggagacccggctgagtgcagacatggccactgtcctgcagctgctacagaggcagatgacgctggtcccgcccgcctacagtgctgtgaccaccccggggcctggccccacttccacatccccgctgttgcccgtcagccccctccccaccctcaccttggactcgctttctcaggtttcccagttcatggcgtgtgaggagctgcccccgggggccccagagcttccccaagaaggccccacacgacgcctctccctaccgggccagctgggggccctcacctcccagcccctgcacagacacggctcggacccgggcagttagtggggctgcccagtgtggacacgtggctcacccagggatcaaggcgctgctgggccgctccccttggaggccctgctcaggaggccctgaccgtggaaggggagaggaactcgaaagcacagctcctcccccagcccttgggaccatcttctcctgcagtcccctgggccccagtgagaggggcaggggcagggccggcagtaggtggggcctgtggtccccccactgccctgagggcattagctggtctaactgcccggaggcacccggccctgggccttaggcacctcaaggacttttctgctatttactgctcttattgttaaggataataattaaggatcatatgaataattaatgaagatgctgatgactatgaataataaataattatcctgaggaga

SEQ ID NO: 116 - DNA, 3884 bp, Homo sapiens
  source 1..3884: mol_type = genomic DNA
  misc_feature 1..3884: note = cDNA of KCNH2 gene SNP c.146G>T (p.Cys49Phe)
atgccggtgcggaggggccacgtcgcgccgcagaacaccttcctggacaccatcatccgcaagtttgagggccagagccgtaagttcatcatcgccaacgctcgggtggagaactgcgccgtcatctactgcaacgacggcttcttcgagctgtgcggctactcgcgggccgaggtgatgcagcgaccctgcacctgcgacttcctgcacgggccgcgcacgcagcgccgcgctgccgcgcagatcgcgcaggcactgctgggcgccgaggagcgcaaagtggaaatcgccttctaccggaaagatgggagctgcttcctatgtctggtggatgtggtgcccgtgaagaacgaggatggggctgtcatcatgttcatcctcaatttcgaggtggtgatggagaaggacatggtggggtccccggctcatgacaccaaccaccggggcccccccaccagctggctggccccaggccgcgccaagaccttccgcctgaagctgcccgcgctgctggcgctgacggcccgggagtcgtcggtgcggtcgggcggcgcgggcggcgcgggcgccccgggggccgtggtggtggacgtggacctgacgcccgcggcacccagcagcgagtcgctggccctggacgaagtgacagccatggacaaccacgtggcagggctcgggcccgcggaggagcggcgtgcgctggtgggtcccggctctccgccccgcagcgcgcccggccagctcccatcgccccgggcgcacagcctcaaccccgacgcctcgggctccagctgcagcctggcccggacgcgctcccgagaaagctgcgccagcgtgcgccgcgcctcgtcggccgacgacatcgaggccatgcgcgccggggtgctgcccccgccaccgcgccacgccagcaccggggccatgcacccactgcgcagcggcttgctcaactccacctcggactccgacctcgtgcgctaccgcaccattagcaagattccccaaatcaccctcaactttgtggacctcaagggcgaccccttcttggcttcgcccaccagtgaccgtgagatcatagcacctaagataaaggagcgaacccacaatgtcactgagaaggtcacccaggtcctgtccctgggcgccgacgtgctgcctgagtacaagctgcaggcaccgcgcatccaccgctggaccatcctgcattacagccccttcaaggccgtgtgggactggctcatcctgctgctggtcatctacacggctgtcttcacaccctactcggctgccttcctgctgaaggagacggaagaaggcccgcctgctaccgagtgtggctacgcctgccagccgctggctgtggtggacctcatcgtggacatcatgttcattgtggacatcctcatcaacttccgcaccacctacgtcaatgccaacgaggaggtggtcagccaccccggccgcatcgccgtccactacttcaagggctggttcctcatcgacatggtggccgccatccccttcgacctgctcatcttcggctctggctctgaggagctgatcgggctgctgaagactgcgcggctgctgcggctggtgcgcgtggcgcggaagctggatcgctactcagagtacggcgcggccgtgctgttcttgctcatgtgcacctttgcgctcatcgcgcactggctagcctgcatctggtacgccatcggcaacatggagcagccacacatggactcacgcatcggctggctgcacaacctgggcgaccagataggcaaaccctacaacagcagcggcctgggcggcccctccatcaaggacaagtatgtgacggcgctctacttcaccttcagcagcctcaccagtgtgggcttcggcaacgtctctcccaacaccaactcagagaagatcttctccatctgcgtcatgctcattggctccctcatgtatgctagcatcttcggcaacgtgtcggccatcatccagcggctgtactcgggcacagcccgctaccacacacagatgctgcgggtgcgggagttcatccgcttccaccagatccccaatcccctgcgccagcgcctcgaggagtacttccagcacgcctggtcctacaccaacggcatcgacatgaacgcggtgctgaagggcttccctgagtgcctgcaggctgacatctgcctgcacctgaaccgctcactgctgcagcactgcaaacccttccgaggggccaccaagggctgccttcgggccctggccatgaagttcaagaccacacatgcaccgccaggggacacactggtgcatgctggggacctgctcaccgccctgtacttcatctcccggggctccatcgagatcctgcggggcgacgtcgtcgtggccatcctggggaagaatgacatctttggggagcctctgaacctgtatgcaaggcctggcaagtcgaacggggatgtgcgggccctcacctactgtgacctacacaagatccatcgggacgacctgctggaggtgctggacatgtaccctgagttctccgaccacttctggtccagcctggagatcaccttcaacctgcgagataccaacatgatcccgggctcccccggcagtacggagttagagggtggcttcagtcggcaacgcaagcgcaagttgtccttccgcaggcgcacggacaaggacacggagcagccaggggaggtgtcggccttggggccgggccgggcgggggcagggccgagtagccggggccggccgggggggccgtggggggagagcccgtccagtggcccctccagccctgagagcagtgaggatgagggcccaggccgcagctccagccccctccgcctggtgcccttctccagccccaggccccccggagagccgccgggtggggagcccctgatggaggactgcgagaagagcagcgacacttgcaaccccctgtcaggcgccttctcaggagtgtccaacattttcagcttctggggggacagtcggggccgccagtaccaggagctccctcgatgccccgcccccacccccagcctcctcaacatccccctctccagcccgggtcggcggccccggggcgacgtggagagcaggctggatgccctccagcgccagctcaacaggctggagacccggctgagtgcagacatggccactgtcctgcagctgctacagaggcagatgacgctggtcccgcccgcctacagtgctgtgaccaccccggggcctggccccacttccacatccccgctgttgcccgtcagccccctccccaccctcaccttggactcgctttctcaggtttcccagttcatggcgtgtgaggagctgcccccgggggccccagagcttccccaagaaggccccacacgacgcctctccctaccgggccagctgggggccctcacctcccagcccctgcacagacacggctcggacccgggcagttagtggggctgcccagtgtggacacgtggctcacccagggatcaaggcgctgctgggccgctccccttggaggccctgctcaggaggccctgaccgtggaaggggagaggaactcgaaagcacagctcctcccccagcccttgggaccatcttctcctgcagtcccctgggccccagtgagaggggcaggggcagggccggcagtaggtggggcctgtggtccccccactgccctgagggcattagctggtctaactgcccggaggcacccggccctgggccttaggcacctcaaggacttttctgctatttactgctcttattgttaaggataataattaaggatcatatgaataattaatgaagatgctgatgactatgaataataaataattatcctgaggaga

SEQ ID NO: 117 - DNA, 3884 bp, Homo sapiens
  source 1..3884: mol_type = genomic DNA
  misc_feature 1..3884: note = cDNA of KCNH2 gene SNP c.1471G>A (p.Val491Ile)
atgccggtgcggaggggccacgtcgcgccgcagaacaccttcctggacaccatcatccgcaagtttgagggccagagccgtaagttcatcatcgccaacgctcgggtggagaactgcgccgtcatctactgcaacgacggcttctgcgagctgtgcggctactcgcgggccgaggtgatgcagcgaccctgcacctgcgacttcctgcacgggccgcgcacgcagcgccgcgctgccgcgcagatcgcgcaggcactgctgggcgccgaggagcgcaaagtggaaatcgccttctaccggaaagatgggagctgcttcctatgtctggtggatgtggtgcccgtgaagaacgaggatggggctgtcatcatgttcatcctcaatttcgaggtggtgatggagaaggacatggtggggtccccggctcatgacaccaaccaccggggcccccccaccagctggctggccccaggccgcgccaagaccttccgcctgaagctgcccgcgctgctggcgctgacggcccgggagtcgtcggtgcggtcgggcggcgcgggcggcgcgggcgccccgggggccgtggtggtggacgtggacctgacgcccgcggcacccagcagcgagtcgctggccctggacgaagtgacagccatggacaaccacgtggcagggctcgggcccgcggaggagcggcgtgcgctggtgggtcccggctctccgccccgcagcgcgcccggccagctcccatcgccccgggcgcacagcctcaaccccgacgcctcgggctccagctgcagcctggcccggacgcgctcccgagaaagctgcgccagcgtgcgccgcgcctcgtcggccgacgacatcgaggccatgcgcgccggggtgctgcccccgccaccgcgccacgccagcaccggggccatgcacccactgcgcagcggcttgctcaactccacctcggactccgacctcgtgcgctaccgcaccattagcaagattccccaaatcaccctcaactttgtggacctcaagggcgaccccttcttggcttcgcccaccagtgaccgtgagatcatagcacctaagataaaggagcgaacccacaatgtcactgagaaggtcacccaggtcctgtccctgggcgccgacgtgctgcctgagtacaagctgcaggcaccgcgcatccaccgctggaccatcctgcattacagccccttcaaggccgtgtgggactggctcatcctgctgctggtcatctacacggctgtcttcacaccctactcggctgccttcctgctgaaggagacggaagaaggcccgcctgctaccgagtgtggctacgcctgccagccgctggctgtggtggacctcatcgtggacatcatgttcattgtggacatcctcatcaacttccgcaccacctacgtcaatgccaacgaggaggtggtcagccaccccggccgcatcgccatccactacttcaagggctggttcctcatcgacatggtggccgccatccccttcgacctgctcatcttcggctctggctctgaggagctgatcgggctgctgaagactgcgcggctgctgcggctggtgcgcgtggcgcggaagctggatcgctactcagagtacggcgcggccgtgctgttcttgctcatgtgcacctttgcgctcatcgcgcactggctagcctgcatctggtacgccatcggcaacatggagcagccacacatggactcacgcatcggctggctgcacaacctgggcgaccagataggcaaaccctacaacagcagcggcctgggcggcccctccatcaaggacaagtatgtgacggcgctctacttcaccttcagcagcctcaccagtgtgggcttcggcaacgtctctcccaacaccaactcagagaagatcttctccatctgcgtcatgctcattggctccctcatgtatgctagcatcttcggcaacgtgtcggccatcatccagcggctgtactcgggcacagcccgctaccacacacagatgctgcgggtgcgggagttcatccgcttccaccagatccccaatcccctgcgccagcgcctcgaggagtacttccagcacgcctggtcctacaccaacggcatcgacatgaacgcggtgctgaagggcttccctgagtgcctgcaggctgacatctgcctgcacctgaaccgctcactgctgcagcactgcaaacccttccgaggggccaccaagggctgccttcgggccctggccatgaagttcaagaccacacatgcaccgccaggggacacactggtgcatgctggggacctgctcaccgccctgtacttcatctcccggggctccatcgagatcctgcggggcgacgtcgtcgtggccatcctggggaagaatgacatctttggggagcctctgaacctgtatgcaaggcctggcaagtcgaacggggatgtgcgggccctcacctactgtgacctacacaagatccatcgggacgacctgctggaggtgctggacatgtaccctgagttctccgaccacttctggtccagcctggagatcaccttcaacctgcgagataccaacatgatcccgggctcccccggcagtacggagttagagggtggcttcagtcggcaacgcaagcgcaagttgtccttccgcaggcgcacggacaaggacacggagcagccaggggaggtgtcggccttggggccgggccgggcgggggcagggccgagtagccggggccggccgggggggccgtggggggagagcccgtccagtggcccctccagccctgagagcagtgaggatgagggcccaggccgcagctccagccccctccgcctggtgcccttctccagccccaggccccccggagagccgccgggtggggagcccctgatggaggactgcgagaagagcagcgacacttgcaaccccctgtcaggcgccttctcaggagtgtccaacattttcagcttctggggggacagtcggggccgccagtaccaggagctccctcgatgccccgcccccacccccagcctcctcaacatccccctctccagcccgggtcggcggccccggggcgacgtggagagcaggctggatgccctccagcgccagctcaacaggctggagacccggctgagtgcagacatggccactgtcctgcagctgctacagaggcagatgacgctggtcccgcccgcctacagtgctgtgaccaccccggggcctggccccacttccacatccccgctgttgcccgtcagccccctccccaccctcaccttggactcgctttctcaggtttcccagttcatggcgtgtgaggagctgcccccgggggccccagagcttccccaagaaggccccacacgacgcctctccctaccgggccagctgggggccctcacctcccagcccctgcacagacacggctcggacccgggcagttagtggggctgcccagtgtggacacgtggctcacccagggatcaaggcgctgctgggccgctccccttggaggccctgctcaggaggccctgaccgtggaaggggagaggaactcgaaagcacagctcctcccccagcccttgggaccatcttctcctgcagtcccctgggccccagtgagaggggcaggggcagggccggcagtaggtggggcctgtggtccccccactgccctgagggcattagctggtctaactgcccggaggcacccggccctgggccttaggcacctcaaggacttttctgctatttactgctcttattgttaaggataataattaaggatcatatgaataattaatgaagatgctgatgactatgaataataaataattatcctgaggaga

SEQ ID NO: 118 - DNA, 3884 bp, Homo sapiens
  source 1..3884: mol_type = genomic DNA
  misc_feature 1..3884: note = cDNA of KCNH2 gene SNP c.1474C>T (p.His492Tyr)
atgccggtgcggaggggccacgtcgcgccgcagaacaccttcctggacaccatcatccgcaagtttgagggccagagccgtaagttcatcatcgccaacgctcgggtggagaactgcgccgtcatctactgcaacgacggcttctgcgagctgtgcggctactcgcgggccgaggtgatgcagcgaccctgcacctgcgacttcctgcacgggccgcgcacgcagcgccgcgctgccgcgcagatcgcgcaggcactgctgggcgccgaggagcgcaaagtggaaatcgccttctaccggaaagatgggagctgcttcctatgtctggtggatgtggtgcccgtgaagaacgaggatggggctgtcatcatgttcatcctcaatttcgaggtggtgatggagaaggacatggtggggtccccggctcatgacaccaaccaccggggcccccccaccagctggctggccccaggccgcgccaagaccttccgcctgaagctgcccgcgctgctggcgctgacggcccgggagtcgtcggtgcggtcgggcggcgcgggcggcgcgggcgccccgggggccgtggtggtggacgtggacctgacgcccgcggcacccagcagcgagtcgctggccctggacgaagtgacagccatggacaaccacgtggcagggctcgggcccgcggaggagcggcgtgcgctggtgggtcccggctctccgccccgcagcgcgcccggccagctcccatcgccccgggcgcacagcctcaaccccgacgcctcgggctccagctgcagcctggcccggacgcgctcccgagaaagctgcgccagcgtgcgccgcgcctcgtcggccgacgacatcgaggccatgcgcgccggggtgctgcccccgccaccgcgccacgccagcaccggggccatgcacccactgcgcagcggcttgctcaactccacctcggactccgacctcgtgcgctaccgcaccattagcaagattccccaaatcaccctcaactttgtggacctcaagggcgaccccttcttggcttcgcccaccagtgaccgtgagatcatagcacctaagataaaggagcgaacccacaatgtcactgagaaggtcacccaggtcctgtccctgggcgccgacgtgctgcctgagtacaagctgcaggcaccgcgcatccaccgctggaccatcctgcattacagccccttcaaggccgtgtgggactggctcatcctgctgctggtcatctacacggctgtcttcacaccctactcggctgccttcctgctgaaggagacggaagaaggcccgcctgctaccgagtgtggctacgcctgccagccgctggctgtggtggacctcatcgtggacatcatgttcattgtggacatcctcatcaacttccgcaccacctacgtcaatgccaacgaggaggtggtcagccaccccggccgcatcgccgtctactacttcaagggctggttcctcatcgacatggtggccgccatccccttcgacctgctcatcttcggctctggctctgaggagctgatcgggctgctgaagactgcgcggctgctgcggctggtgcgcgtggcgcggaagctggatcgctactcagagtacggcgcggccgtgctgttcttgctcatgtgcacctttgcgctcatcgcgcactggctagcctgcatctggtacgccatcggcaacatggagcagccacacatggactcacgcatcggctggctgcacaacctgggcgaccagataggcaaaccctacaacagcagcggcctgggcggcccctccatcaaggacaagtatgtgacggcgctctacttcaccttcagcagcctcaccagtgtgggcttcggcaacgtctctcccaacaccaactcagagaagatcttctccatctgcgtcatgctcattggctccctcatgtatgctagcatcttcggcaacgtgtcggccatcatccagcggctgtactcgggcacagcccgctaccacacacagatgctgcgggtgcgggagttcatccgcttccaccagatccccaatcccctgcgccagcgcctcgaggagtacttccagcacgcctggtcctacaccaacggcatcgacatgaacgcggtgctgaagggcttccctgagtgcctgcaggctgacatctgcctgcacctgaaccgctcactgctgcagcactgcaaacccttccgaggggccaccaagggctgccttcgggccctggccatgaagttcaagaccacacatgcaccgccaggggacacactggtgcatgctggggacctgctcaccgccctgtacttcatctcccggggctccatcgagatcctgcggggcgacgtcgtcgtggccatcctggggaagaatgacatctttggggagcctctgaacctgtatgcaaggcctggcaagtcgaacggggatgtgcgggccctcacctactgtgacctacacaagatccatcgggacgacctgctggaggtgctggacatgtaccctgagttctccgaccacttctggtccagcctggagatcaccttcaacctgcgagataccaacatgatcccgggctcccccggcagtacggagttagagggtggcttcagtcggcaacgcaagcgcaagttgtccttccgcaggcgcacggacaaggacacggagcagccaggggaggtgtcggccttggggccgggccgggcgggggcagggccgagtagccggggccggccgggggggccgtggggggagagcccgtccagtggcccctccagccctgagagcagtgaggatgagggcccaggccgcagctccagccccctccgcctggtgcccttctccagccccaggccccccggagagccgccgggtggggagcccctgatggaggactgcgagaagagcagcgacacttgcaaccccctgtcaggcgccttctcaggagtgtccaacattttcagcttctggggggacagtcggggccgccagtaccaggagctccctcgatgccccgcccccacccccagcctcctcaacatccccctctccagcccgggtcggcggccccggggcgacgtggagagcaggctggatgccctccagcgccagctcaacaggctggagacccggctgagtgcagacatggccactgtcctgcagctgctacagaggcagatgacgctggtcccgcccgcctacagtgctgtgaccaccccggggcctggccccacttccacatccccgctgttgcccgtcagccccctccccaccctcaccttggactcgctttctcaggtttcccagttcatggcgtgtgaggagctgcccccgggggccccagagcttccccaagaaggccccacacgacgcctctccctaccgggccagctgggggccctcacctcccagcccctgcacagacacggctcggacccgggcagttagtggggctgcccagtgtggacacgtggctcacccagggatcaaggcgctgctgggccgctccccttggaggccctgctcaggaggccctgaccgtggaaggggagaggaactcgaaagcacagctcctcccccagcccttgggaccatcttctcctgcagtcccctgggccccagtgagaggggcaggggcagggccggcagtaggtggggcctgtggtccccccactgccctgagggcattagctggtctaactgcccggaggcacccggccctgggccttaggcacctcaaggacttttctgctatttactgctcttattgttaaggataataattaaggatcatatgaataattaatgaagatgctgatgactatgaataataaataattatcctgaggaga

SEQ ID NO: 119 - DNA, 3884 bp, Homo sapiens
  source 1..3884: mol_type = genomic DNA
  misc_feature 1..3884: note = cDNA of KCNH2 gene SNP c.1475A>T (p.His492Leu)
atgccggtgcggaggggccacgtcgcgccgcagaacaccttcctggacaccatcatccgcaagtttgagggccagagccgtaagttcatcatcgccaacgctcgggtggagaactgcgccgtcatctactgcaacgacggcttctgcgagctgtgcggctactcgcgggccgaggtgatgcagcgaccctgcacctgcgacttcctgcacgggccgcgcacgcagcgccgcgctgccgcgcagatcgcgcaggcactgctgggcgccgaggagcgcaaagtggaaatcgccttctaccggaaagatgggagctgcttcctatgtctggtggatgtggtgcccgtgaagaacgaggatggggctgtcatcatgttcatcctcaatttcgaggtggtgatggagaaggacatggtggggtccccggctcatgacaccaaccaccggggcccccccaccagctggctggccccaggccgcgccaagaccttccgcctgaagctgcccgcgctgctggcgctgacggcccgggagtcgtcggtgcggtcgggcggcgcgggcggcgcgggcgccccgggggccgtggtggtggacgtggacctgacgcccgcggcacccagcagcgagtcgctggccctggacgaagtgacagccatggacaaccacgtggcagggctcgggcccgcggaggagcggcgtgcgctggtgggtcccggctctccgccccgcagcgcgcccggccagctcccatcgccccgggcgcacagcctcaaccccgacgcctcgggctccagctgcagcctggcccggacgcgctcccgagaaagctgcgccagcgtgcgccgcgcctcgtcggccgacgacatcgaggccatgcgcgccggggtgctgcccccgccaccgcgccacgccagcaccggggccatgcacccactgcgcagcggcttgctcaactccacctcggactccgacctcgtgcgctaccgcaccattagcaagattccccaaatcaccctcaactttgtggacctcaagggcgaccccttcttggcttcgcccaccagtgaccgtgagatcatagcacctaagataaaggagcgaacccacaatgtcactgagaaggtcacccaggtcctgtccctgggcgccgacgtgctgcctgagtacaagctgcaggcaccgcgcatccaccgctggaccatcctgcattacagccccttcaaggccgtgtgggactggctcatcctgctgctggtcatctacacggctgtcttcacaccctactcggctgccttcctgctgaaggagacggaagaaggcccgcctgctaccgagtgtggctacgcctgccagccgctggctgtggtggacctcatcgtggacatcatgttcattgtggacatcctcatcaacttccgcaccacctacgtcaatgccaacgaggaggtggtcagccaccccggccgcatcgccgtcctctacttcaagggctggttcctcatcgacatggtggccgccatccccttcgacctgctcatcttcggctctggctctgaggagctgatcgggctgctgaagactgcgcggctgctgcggctggtgcgcgtggcgcggaagctggatcgctactcagagtacggcgcggccgtgctgttcttgctcatgtgcacctttgcgctcatcgcgcactggctagcctgcatctggtacgccatcggcaacatggagcagccacacatggactcacgcatcggctggctgcacaacctgggcgaccagataggcaaaccctacaacagcagcggcctgggcggcccctccatcaaggacaagtatgtgacggcgctctacttcaccttcagcagcctcaccagtgtgggcttcggcaacgtctctcccaacaccaactcagagaagatcttctccatctgcgtcatgctcattggctccctcatgtatgctagcatcttcggcaacgtgtcggccatcatccagcggctgtactcgggcacagcccgctaccacacacagatgctgcgggtgcgggagttcatccgcttccaccagatccccaatcccctgcgccagcgcctcgaggagtacttccagcacgcctggtcctacaccaacggcatcgacatgaacgcggtgctgaagggcttccctgagtgcctgcaggctgacatctgcctgcacctgaaccgctcactgctgcagcactgcaaacccttccgaggggccaccaagggctgccttcgggccctggccatgaagttcaagaccacacatgcaccgccaggggacacactggtgcatgctggggacctgctcaccgccctgtacttcatctcccggggctccatcgagatcctgcggggcgacgtcgtcgtggccatcctggggaagaatgacatctttggggagcctctgaacctgtatgcaaggcctggcaagtcgaacggggatgtgcgggccctcacctactgtgacctacacaagatccatcgggacgacctgctggaggtgctggacatgtaccctgagttctccgaccacttctggtccagcctggagatcaccttcaacctgcgagataccaacatgatcccgggctcccccggcagtacggagttagagggtggcttcagtcggcaacgcaagcgcaagttgtccttccgcaggcgcacggacaaggacacggagcagccaggggaggtgtcggccttggggccgggccgggcgggggcagggccgagtagccggggccggccgggggggccgtggggggagagcccgtccagtggcccctccagccctgagagcagtgaggatgagggcccaggccgcagctccagccccctccgcctggtgcccttctccagccccaggccccccggagagccgccgggtggggagcccctgatggaggactgcgagaagagcagcgacacttgcaaccccctgtcaggcgccttctcaggagtgtccaacattttcagcttctggggggacagtcggggccgccagtaccaggagctccctcgatgccccgcccccacccccagcctcctcaacatccccctctccagcccgggtcggcggccccggggcgacgtggagagcaggctggatgccctccagcgccagctcaacaggctggagacccggctgagtgcagacatggccactgtcctgcagctgctacagaggcagatgacgctggtcccgcccgcctacagtgctgtgaccaccccggggcctggccccacttccacatccccgctgttgcccgtcagccccctccccaccctcaccttggactcgctttctcaggtttcccagttcatggcgtgtgaggagctgcccccgggggccccagagcttccccaagaaggccccacacgacgcctctccctaccgggccagctgggggccctcacctcccagcccctgcacagacacggctcggacccgggcagttagtggggctgcccagtgtggacacgtggctcacccagggatcaaggcgctgctgggccgctccccttggaggccctgctcaggaggccctgaccgtggaaggggagaggaactcgaaagcacagctcctcccccagcccttgggaccatcttctcctgcagtcccctgggccccagtgagaggggcaggggcagggccggcagtaggtggggcctgtggtccccccactgccctgagggcattagctggtctaactgcccggaggcacccggccctgggccttaggcacctcaaggacttttctgctatttactgctcttattgttaaggataataattaaggatcatatgaataattaatgaagatgctgatgactatgaataataaataattatcctgaggaga

SEQ ID NO: 120 - DNA, 3884 bp, Homo sapiens
  source 1..3884: mol_type = genomic DNA
  misc_feature 1..3884: note = cDNA of KCNH2 gene SNP c.1477T>C (p.Tyr493His)
atgccggtgcggaggggccacgtcgcgccgcagaacaccttcctggacaccatcatccgcaagtttgagggccagagccgtaagttcatcatcgccaacgctcgggtggagaactgcgccgtcatctactgcaacgacggcttctgcgagctgtgcggctactcgcgggccgaggtgatgcagcgaccctgcacctgcgacttcctgcacgggccgcgcacgcagcgccgcgctgccgcgcagatcgcgcaggcactgctgggcgccgaggagcgcaaagtggaaatcgccttctaccggaaagatgggagctgcttcctatgtctggtggatgtggtgcccgtgaagaacgaggatggggctgtcatcatgttcatcctcaatttcgaggtggtgatggagaaggacatggtggggtccccggctcatgacaccaaccaccggggcccccccaccagctggctggccccaggccgcgccaagaccttccgcctgaagctgcccgcgctgctggcgctgacggcccgggagtcgtcggtgcggtcgggcggcgcgggcggcgcgggcgccccgggggccgtggtggtggacgtggacctgacgcccgcggcacccagcagcgagtcgctggccctggacgaagtgacagccatggacaaccacgtggcagggctcgggcccgcggaggagcggcgtgcgctggtgggtcccggctctccgccccgcagcgcgcccggccagctcccatcgccccgggcgcacagcctcaaccccgacgcctcgggctccagctgcagcctggcccggacgcgctcccgagaaagctgcgccagcgtgcgccgcgcctcgtcggccgacgacatcgaggccatgcgcgccggggtgctgcccccgccaccgcgccacgccagcaccggggccatgcacccactgcgcagcggcttgctcaactccacctcggactccgacctcgtgcgctaccgcaccattagcaagattccccaaatcaccctcaactttgtggacctcaagggcgaccccttcttggcttcgcccaccagtgaccgtgagatcatagcacctaagataaaggagcgaacccacaatgtcactgagaaggtcacccaggtcctgtccctgggcgccgacgtgctgcctgagtacaagctgcaggcaccgcgcatccaccgctggaccatcctgcattacagccccttcaaggccgtgtgggactggctcatcctgctgctggtcatctacacggctgtcttcacaccctactcggctgccttcctgctgaaggagacggaagaaggcccgcctgctaccgagtgtggctacgcctgccagccgctggctgtggtggacctcatcgtggacatcatgttcattgtggacatcctcatcaacttccgcaccacctacgtcaatgccaacgaggaggtggtcagccaccccggccgcatcgccgtccaccacttcaagggctggttcctcatcgacatggtggccgccatccccttcgacctgctcatcttcggctctggctctgaggagctgatcgggctgctgaagactgcgcggctgctgcggctggtgcgcgtggcgcggaagctggatcgctactcagagtacggcgcggccgtgctgttcttgctcatgtgcacctttgcgctcatcgcgcactggctagcctgcatctggtacgccatcggcaacatggagcagccacacatggactcacgcatcggctggctgcacaacctgggcgaccagataggcaaaccctacaacagcagcggcctgggcggcccctccatcaaggacaagtatgtgacggcgctctacttcaccttcagcagcctcaccagtgtgggcttcggcaacgtctctcccaacaccaactcagagaagatcttctccatctgcgtcatgctcattggctccctcatgtatgctagcatcttcggcaacgtgtcggccatcatccagcggctgtactcgggcacagcccgctaccacacacagatgctgcgggtgcgggagttcatccgcttccaccagatccccaatcccctgcgccagcgcctcgaggagtacttccagcacgcctggtcctacaccaacggcatcgacatgaacgcggtgctgaagggcttccctgagtgcctgcaggctgacatctgcctgcacctgaaccgctcactgctgcagcactgcaaacccttccgaggggccaccaagggctgccttcgggccctggccatgaagttcaagaccacacatgcaccgccaggggacacactggtgcatgctggggacctgctcaccgccctgtacttcatctcccggggctccatcgagatcctgcggggcgacgtcgtcgtggccatcctggggaagaatgacatctttggggagcctctgaacctgtatgcaaggcctggcaagtcgaacggggatgtgcgggccctcacctactgtgacctacacaagatccatcgggacgacctgctggaggtgctggacatgtaccctgagttctccgaccacttctggtccagcctggagatcaccttcaacctgcgagataccaacatgatcccgggctcccccggcagtacggagttagagggtggcttcagtcggcaacgcaagcgcaagttgtccttccgcaggcgcacggacaaggacacggagcagccaggggaggtgtcggccttggggccgggccgggcgggggcagggccgagtagccggggccggccgggggggccgtggggggagagcccgtccagtggcccctccagccctgagagcagtgaggatgagggcccaggccgcagctccagccccctccgcctggtgcccttctccagccccaggccccccggagagccgccgggtggggagcccctgatggaggactgcgagaagagcagcgacacttgcaaccccctgtcaggcgccttctcaggagtgtccaacattttcagcttctggggggacagtcggggccgccagtaccaggagctccctcgatgccccgcccccacccccagcctcctcaacatccccctctccagcccgggtcggcggccccggggcgacgtggagagcaggctggatgccctccagcgccagctcaacaggctggagacccggctgagtgcagacatggccactgtcctgcagctgctacagaggcagatgacgctggtcccgcccgcctacagtgctgtgaccaccccggggcctggccccacttccacatccccgctgttgcccgtcagccccctccccaccctcaccttggactcgctttctcaggtttcccagttcatggcgtgtgaggagctgcccccgggggccccagagcttccccaagaaggccccacacgacgcctctccctaccgggccagctgggggccctcacctcccagcccctgcacagacacggctcggacccgggcagttagtggggctgcccagtgtggacacgtggctcacccagggatcaaggcgctgctgggccgctccccttggaggccctgctcaggaggccctgaccgtggaaggggagaggaactcgaaagcacagctcctcccccagcccttgggaccatcttctcctgcagtcccctgggccccagtgagaggggcaggggcagggccggcagtaggtggggcctgtggtccccccactgccctgagggcattagctggtctaactgcccggaggcacccggccctgggccttaggcacctcaaggacttttctgctatttactgctcttattgttaaggataataattaaggatcatatgaataattaatgaagatgctgatgactatgaataataaataattatcctgaggaga

SEQ ID NO: 121 - DNA, 3884 bp, Homo sapiens
  source 1..3884: mol_type = genomic DNA
  misc_feature 1..3884: note = cDNA of KCNH2 gene SNP c.1478A>C (p.Tyr493Ser)
atgccggtgcggaggggccacgtcgcgccgcagaacaccttcctggacaccatcatccgcaagtttgagggccagagccgtaagttcatcatcgccaacgctcgggtggagaactgcgccgtcatctactgcaacgacggcttctgcgagctgtgcggctactcgcgggccgaggtgatgcagcgaccctgcacctgcgacttcctgcacgggccgcgcacgcagcgccgcgctgccgcgcagatcgcgcaggcactgctgggcgccgaggagcgcaaagtggaaatcgccttctaccggaaagatgggagctgcttcctatgtctggtggatgtggtgcccgtgaagaacgaggatggggctgtcatcatgttcatcctcaatttcgaggtggtgatggagaaggacatggtggggtccccggctcatgacaccaaccaccggggcccccccaccagctggctggccccaggccgcgccaagaccttccgcctgaagctgcccgcgctgctggcgctgacggcccgggagtcgtcggtgcggtcgggcggcgcgggcggcgcgggcgccccgggggccgtggtggtggacgtggacctgacgcccgcggcacccagcagcgagtcgctggccctggacgaagtgacagccatggacaaccacgtggcagggctcgggcccgcggaggagcggcgtgcgctggtgggtcccggctctccgccccgcagcgcgcccggccagctcccatcgccccgggcgcacagcctcaaccccgacgcctcgggctccagctgcagcctggcccggacgcgctcccgagaaagctgcgccagcgtgcgccgcgcctcgtcggccgacgacatcgaggccatgcgcgccggggtgctgcccccgccaccgcgccacgccagcaccggggccatgcacccactgcgcagcggcttgctcaactccacctcggactccgacctcgtgcgctaccgcaccattagcaagattccccaaatcaccctcaactttgtggacctcaagggcgaccccttcttggcttcgcccaccagtgaccgtgagatcatagcacctaagataaaggagcgaacccacaatgtcactgagaaggtcacccaggtcctgtccctgggcgccgacgtgctgcctgagtacaagctgcaggcaccgcgcatccaccgctggaccatcctgcattacagccccttcaaggccgtgtgggactggctcatcctgctgctggtcatctacacggctgtcttcacaccctactcggctgccttcctgctgaaggagacggaagaaggcccgcctgctaccgagtgtggctacgcctgccagccgctggctgtggtggacctcatcgtggacatcatgttcattgtggacatcctcatcaacttccgcaccacctacgtcaatgccaacgaggaggtggtcagccaccccggccgcatcgccgtccactccttcaagggctggttcctcatcgacatggtggccgccatccccttcgacctgctcatcttcggctctggctctgaggagctgatcgggctgctgaagactgcgcggctgctgcggctggtgcgcgtggcgcggaagctggatcgctactcagagtacggcgcggccgtgctgttcttgctcatgtgcacctttgcgctcatcgcgcactggctagcctgcatctggtacgccatcggcaacatggagcagccacacatggactcacgcatcggctggctgcacaacctgggcgaccagataggcaaaccctacaacagcagcggcctgggcggcccctccatcaaggacaagtatgtgacggcgctctacttcaccttcagcagcctcaccagtgtgggcttcggcaacgtctctcccaacaccaactcagagaagatcttctccatctgcgtcatgctcattggctccctcatgtatgctagcatcttcggcaacgtgtcggccatcatccagcggctgtactcgggcacagcccgctaccacacacagatgctgcgggtgcgggagttcatccgcttccaccagatccccaatcccctgcgccagcgcctcgaggagtacttccagcacgcctggtcctacaccaacggcatcgacatgaacgcggtgctgaagggcttccctgagtgcctgcaggctgacatctgcctgcacctgaaccgctcactgctgcagcactgcaaacccttccgaggggccaccaagggctgccttcgggccctggccatgaagttcaagaccacacatgcaccgccaggggacacactggtgcatgctggggacctgctcaccgccctgtacttcatctcccggggctccatcgagatcctgcggggcgacgtcgtcgtggccatcctggggaagaatgacatctttggggagcctctgaacctgtatgcaaggcctggcaagtcgaacggggatgtgcgggccctcacctactgtgacctacacaagatccatcgggacgacctgctggaggtgctggacatgtaccctgagttctccgaccacttctggtccagcctggagatcaccttcaacctgcgagataccaacatgatcccgggctcccccggcagtacggagttagagggtggcttcagtcggcaacgcaagcgcaagttgtccttccgcaggcgcacggacaaggacacggagcagccaggggaggtgtcggccttggggccgggccgggcgggggcagggccgagtagccggggccggccgggggggccgtggggggagagcccgtccagtggcccctccagccctgagagcagtgaggatgagggcccaggccgcagctccagccccctccgcctggtgcccttctccagccccaggccccccggagagccgccgggtggggagcccctgatggaggactgcgagaagagcagcgacacttgcaaccccctgtcaggcgccttctcaggagtgtccaacattttcagcttctggggggacagtcggggccgccagtaccaggagctccctcgatgccccgcccccacccccagcctcctcaacatccccctctccagcccgggtcggcggccccggggcgacgtggagagcaggctggatgccctccagcgccagctcaacaggctggagacccggctgagtgcagacatggccactgtcctgcagctgctacagaggcagatgacgctggtcccgcccgcctacagtgctgtgaccaccccggggcctggccccacttccacatccccgctgttgcccgtcagccccctccccaccctcaccttggactcgctttctcaggtttcccagttcatggcgtgtgaggagctgcccccgggggccccagagcttccccaagaaggccccacacgacgcctctccctaccgggccagctgggggccctcacctcccagcccctgcacagacacggctcggacccgggcagttagtggggctgcccagtgtggacacgtggctcacccagggatcaaggcgctgctgggccgctccccttggaggccctgctcaggaggccctgaccgtggaaggggagaggaactcgaaagcacagctcctcccccagcccttgggaccatcttctcctgcagtcccctgggccccagtgagaggggcaggggcagggccggcagtaggtggggcctgtggtccccccactgccctgagggcattagctggtctaactgcccggaggcacccggccctgggccttaggcacctcaaggacttttctgctatttactgctcttattgttaaggataataattaaggatcatatgaataattaatgaagatgctgatgactatgaataataaataattatcctgaggaga

SEQ ID NO: 122 - DNA, 3884 bp, Homo sapiens
  source 1..3884: mol_type = genomic DNA
  misc_feature 1..3884: note = cDNA of KCNH2 gene SNP c.1478A>G (p.Tyr493Cys)
atgccggtgcggaggggccacgtcgcgccgcagaacaccttcctggacaccatcatccgcaagtttgagggccagagccgtaagttcatcatcgccaacgctcgggtggagaactgcgccgtcatctactgcaacgacggcttctgcgagctgtgcggctactcgcgggccgaggtgatgcagcgaccctgcacctgcgacttcctgcacgggccgcgcacgcagcgccgcgctgccgcgcagatcgcgcaggcactgctgggcgccgaggagcgcaaagtggaaatcgccttctaccggaaagatgggagctgcttcctatgtctggtggatgtggtgcccgtgaagaacgaggatggggctgtcatcatgttcatcctcaatttcgaggtggtgatggagaaggacatggtggggtccccggctcatgacaccaaccaccggggcccccccaccagctggctggccccaggccgcgccaagaccttccgcctgaagctgcccgcgctgctggcgctgacggcccgggagtcgtcggtgcggtcgggcggcgcgggcggcgcgggcgccccgggggccgtggtggtggacgtggacctgacgcccgcggcacccagcagcgagtcgctggccctggacgaagtgacagccatggacaaccacgtggcagggctcgggcccgcggaggagcggcgtgcgctggtgggtcccggctctccgccccgcagcgcgcccggccagctcccatcgccccgggcgcacagcctcaaccccgacgcctcgggctccagctgcagcctggcccggacgcgctcccgagaaagctgcgccagcgtgcgccgcgcctcgtcggccgacgacatcgaggccatgcgcgccggggtgctgcccccgccaccgcgccacgccagcaccggggccatgcacccactgcgcagcggcttgctcaactccacctcggactccgacctcgtgcgctaccgcaccattagcaagattccccaaatcaccctcaactttgtggacctcaagggcgaccccttcttggcttcgcccaccagtgaccgtgagatcatagcacctaagataaaggagcgaacccacaatgtcactgagaaggtcacccaggtcctgtccctgggcgccgacgtgctgcctgagtacaagctgcaggcaccgcgcatccaccgctggaccatcctgcattacagccccttcaaggccgtgtgggactggctcatcctgctgctggtcatctacacggctgtcttcacaccctactcggctgccttcctgctgaaggagacggaagaaggcccgcctgctaccgagtgtggctacgcctgccagccgctggctgtggtggacctcatcgtggacatcatgttcattgtggacatcctcatcaacttccgcaccacctacgtcaatgccaacgaggaggtggtcagccaccccggccgcatcgccgtccactgcttcaagggctggttcctcatcgacatggtggccgccatccccttcgacctgctcatcttcggctctggctctgaggagctgatcgggctgctgaagactgcgcggctgctgcggctggtgcgcgtggcgcggaagctggatcgctactcagagtacggcgcggccgtgctgttcttgctcatgtgcacctttgcgctcatcgcgcactggctagcctgcatctggtacgccatcggcaacatggagcagccacacatggactcacgcatcggctggctgcacaacctgggcgaccagataggcaaaccctacaacagcagcggcctgggcggcccctccatcaaggacaagtatgtgacggcgctctacttcaccttcagcagcctcaccagtgtgggcttcggcaacgtctctcccaacaccaactcagagaagatcttctccatctgcgtcatgctcattggctccctcatgtatgctagcatcttcggcaacgtgtcggccatcatccagcggctgtactcgggcacagcccgctaccacacacagatgctgcgggtgcgggagttcatccgcttccaccagatccccaatcccctgcgccagcgcctcgaggagtacttccagcacgcctggtcctacaccaacggcatcgacatgaacgcggtgctgaagggcttccctgagtgcctgcaggctgacatctgcctgcacctgaaccgctcactgctgcagcactgcaaacccttccgaggggccaccaagggctgccttcgggccctggccatgaagttcaagaccacacatgcaccgccaggggacacactggtgcatgctggggacctgctcaccgccctgtacttcatctcccggggctccatcgagatcctgcggggcgacgtcgtcgtggccatcctggggaagaatgacatctttggggagcctctgaacctgtatgcaaggcctggcaagtcgaacggggatgtgcgggccctcacctactgtgacctacacaagatccatcgggacgacctgctggaggtgctggacatgtaccctgagttctccgaccacttctggtccagcctggagatcaccttcaacctgcgagataccaacatgatcccgggctcccccggcagtacggagttagagggtggcttcagtcggcaacgcaagcgcaagttgtccttccgcaggcgcacggacaaggacacggagcagccaggggaggtgtcggccttggggccgggccgggcgggggcagggccgagtagccggggccggccgggggggccgtggggggagagcccgtccagtggcccctccagccctgagagcagtgaggatgagggcccaggccgcagctccagccccctccgcctggtgcccttctccagccccaggccccccggagagccgccgggtggggagcccctgatggaggactgcgagaagagcagcgacacttgcaaccccctgtcaggcgccttctcaggagtgtccaacattttcagcttctggggggacagtcggggccgccagtaccaggagctccctcgatgccccgcccccacccccagcctcctcaacatccccctctccagcccgggtcggcggccccggggcgacgtggagagcaggctggatgccctccagcgccagctcaacaggctggagacccggctgagtgcagacatggccactgtcctgcagctgctacagaggcagatgacgctggtcccgcccgcctacagtgctgtgaccaccccggggcctggccccacttccacatccccgctgttgcccgtcagccccctccccaccctcaccttggactcgctttctcaggtttcccagttcatggcgtgtgaggagctgcccccgggggccccagagcttccccaagaaggccccacacgacgcctctccctaccgggccagctgggggccctcacctcccagcccctgcacagacacggctcggacccgggcagttagtggggctgcccagtgtggacacgtggctcacccagggatcaaggcgctgctgggccgctccccttggaggccctgctcaggaggccctgaccgtggaaggggagaggaactcgaaagcacagctcctcccccagcccttgggaccatcttctcctgcagtcccctgggccccagtgagaggggcaggggcagggccggcagtaggtggggcctgtggtccccccactgccctgagggcattagctggtctaactgcccggaggcacccggccctgggccttaggcacctcaaggacttttctgctatttactgctcttattgttaaggataataattaaggatcatatgaataattaatgaagatgctgatgactatgaataataaataattatcctgaggaga

SEQ ID NO: 123 - DNA, 3884 bp, Homo sapiens
  source 1..3884: mol_type = genomic DNA
  misc_feature 1..3884: note = cDNA of KCNH2 gene SNP c.1478A>T (p.Tyr493Phe)
atgccggtgcggaggggccacgtcgcgccgcagaacaccttcctggacaccatcatccgcaagtttgagggccagagccgtaagttcatcatcgccaacgctcgggtggagaactgcgccgtcatctactgcaacgacggcttctgcgagctgtgcggctactcgcgggccgaggtgatgcagcgaccctgcacctgcgacttcctgcacgggccgcgcacgcagcgccgcgctgccgcgcagatcgcgcaggcactgctgggcgccgaggagcgcaaagtggaaatcgccttctaccggaaagatgggagctgcttcctatgtctggtggatgtggtgcccgtgaagaacgaggatggggctgtcatcatgttcatcctcaatttcgaggtggtgatggagaaggacatggtggggtccccggctcatgacaccaaccaccggggcccccccaccagctggctggccccaggccgcgccaagaccttccgcctgaagctgcccgcgctgctggcgctgacggcccgggagtcgtcggtgcggtcgggcggcgcgggcggcgcgggcgccccgggggccgtggtggtggacgtggacctgacgcccgcggcacccagcagcgagtcgctggccctggacgaagtgacagccatggacaaccacgtggcagggctcgggcccgcggaggagcggcgtgcgctggtgggtcccggctctccgccccgcagcgcgcccggccagctcccatcgccccgggcgcacagcctcaaccccgacgcctcgggctccagctgcagcctggcccggacgcgctcccgagaaagctgcgccagcgtgcgccgcgcctcgtcggccgacgacatcgaggccatgcgcgccggggtgctgcccccgccaccgcgccacgccagcaccggggccatgcacccactgcgcagcggcttgctcaactccacctcggactccgacctcgtgcgctaccgcaccattagcaagattccccaaatcaccctcaactttgtggacctcaagggcgaccccttcttggcttcgcccaccagtgaccgtgagatcatagcacctaagataaaggagcgaacccacaatgtcactgagaaggtcacccaggtcctgtccctgggcgccgacgtgctgcctgagtacaagctgcaggcaccgcgcatccaccgctggaccatcctgcattacagccccttcaaggccgtgtgggactggctcatcctgctgctggtcatctacacggctgtcttcacaccctactcggctgccttcctgctgaaggagacggaagaaggcccgcctgctaccgagtgtggctacgcctgccagccgctggctgtggtggacctcatcgtggacatcatgttcattgtggacatcctcatcaacttccgcaccacctacgtcaatgccaacgaggaggtggtcagccaccccggccgcatcgccgtccacttcttcaagggctggttcctcatcgacatggtggccgccatccccttcgacctgctcatcttcggctctggctctgaggagctgatcgggctgctgaagactgcgcggctgctgcggctggtgcgcgtggcgcggaagctggatcgctactcagagtacggcgcggccgtgctgttcttgctcatgtgcacctttgcgctcatcgcgcactggctagcctgcatctggtacgccatcggcaacatggagcagccacacatggactcacgcatcggctggctgcacaacctgggcgaccagataggcaaaccctacaacagcagcggcctgggcggcccctccatcaaggacaagtatgtgacggcgctctacttcaccttcagcagcctcaccagtgtgggcttcggcaacgtctctcccaacaccaactcagagaagatcttctccatctgcgtcatgctcattggctccctcatgtatgctagcatcttcggcaacgtgtcggccatcatccagcggctgtactcgggcacagcccgctaccacacacagatgctgcgggtgcgggagttcatccgcttccaccagatccccaatcccctgcgccagcgcctcgaggagtacttccagcacgcctggtcctacaccaacggcatcgacatgaacgcggtgctgaagggcttccctgagtgcctgcaggctgacatctgcctgcacctgaaccgctcactgctgcagcactgcaaacccttccgaggggccaccaagggctgccttcgggccctggccatgaagttcaagaccacacatgcaccgccaggggacacactggtgcatgctggggacctgctcaccgccctgtacttcatctcccggggctccatcgagatcctgcggggcgacgtcgtcgtggccatcctggggaagaatgacatctttggggagcctctgaacctgtatgcaaggcctggcaagtcgaacggggatgtgcgggccctcacctactgtgacctacacaagatccatcgggacgacctgctggaggtgctggacatgtaccctgagttctccgaccacttctggtccagcctggagatcaccttcaacctgcgagataccaacatgatcccgggctcccccggcagtacggagttagagggtggcttcagtcggcaacgcaagcgcaagttgtccttccgcaggcgcacggacaaggacacggagcagccaggggaggtgtcggccttggggccgggccgggcgggggcagggccgagtagccggggccggccgggggggccgtggggggagagcccgtccagtggcccctccagccctgagagcagtgaggatgagggcccaggccgcagctccagccccctccgcctggtgcccttctccagccccaggccccccggagagccgccgggtggggagcccctgatggaggactgcgagaagagcagcgacacttgcaaccccctgtcaggcgccttctcaggagtgtccaacattttcagcttctggggggacagtcggggccgccagtaccaggagctccctcgatgccccgcccccacccccagcctcctcaacatccccctctccagcccgggtcggcggccccggggcgacgtggagagcaggctggatgccctccagcgccagctcaacaggctggagacccggctgagtgcagacatggccactgtcctgcagctgctacagaggcagatgacgctggtcccgcccgcctacagtgctgtgaccaccccggggcctggccccacttccacatccccgctgttgcccgtcagccccctccccaccctcaccttggactcgctttctcaggtttcccagttcatggcgtgtgaggagctgcccccgggggccccagagcttccccaagaaggccccacacgacgcctctccctaccgggccagctgggggccctcacctcccagcccctgcacagacacggctcggacccgggcagttagtggggctgcccagtgtggacacgtggctcacccagggatcaaggcgctgctgggccgctccccttggaggccctgctcaggaggccctgaccgtggaaggggagaggaactcgaaagcacagctcctcccccagcccttgggaccatcttctcctgcagtcccctgggccccagtgagaggggcaggggcagggccggcagtaggtggggcctgtggtccccccactgccctgagggcattagctggtctaactgcccggaggcacccggccctgggccttaggcacctcaaggacttttctgctatttactgctcttattgttaaggataataattaaggatcatatgaataattaatgaagatgctgatgactatgaataataaataattatcctgaggaga

SEQ ID NO: 124 - DNA, 3884 bp, Homo sapiens
  source 1..3884: mol_type = genomic DNA
  misc_feature 1..3884: note = cDNA of KCNH2 gene SNP c.1479C>A (p.Tyr493Ter)
atgccggtgcggaggggccacgtcgcgccgcagaacaccttcctggacaccatcatccgcaagtttgagggccagagccgtaagttcatcatcgccaacgctcgggtggagaactgcgccgtcatctactgcaacgacggcttctgcgagctgtgcggctactcgcgggccgaggtgatgcagcgaccctgcacctgcgacttcctgcacgggccgcgcacgcagcgccgcgctgccgcgcagatcgcgcaggcactgctgggcgccgaggagcgcaaagtggaaatcgccttctaccggaaagatgggagctgcttcctatgtctggtggatgtggtgcccgtgaagaacgaggatggggctgtcatcatgttcatcctcaatttcgaggtggtgatggagaaggacatggtggggtccccggctcatgacaccaaccaccggggcccccccaccagctggctggccccaggccgcgccaagaccttccgcctgaagctgcccgcgctgctggcgctgacggcccgggagtcgtcggtgcggtcgggcggcgcgggcggcgcgggcgccccgggggccgtggtggtggacgtggacctgacgcccgcggcacccagcagcgagtcgctggccctggacgaagtgacagccatggacaaccacgtggcagggctcgggcccgcggaggagcggcgtgcgctggtgggtcccggctctccgccccgcagcgcgcccggccagctcccatcgccccgggcgcacagcctcaaccccgacgcctcgggctccagctgcagcctggcccggacgcgctcccgagaaagctgcgccagcgtgcgccgcgcctcgtcggccgacgacatcgaggccatgcgcgccggggtgctgcccccgccaccgcgccacgccagcaccggggccatgcacccactgcgcagcggcttgctcaactccacctcggactccgacctcgtgcgctaccgcaccattagcaagattccccaaatcaccctcaactttgtggacctcaagggcgaccccttcttggcttcgcccaccagtgaccgtgagatcatagcacctaagataaaggagcgaacccacaatgtcactgagaaggtcacccaggtcctgtccctgggcgccgacgtgctgcctgagtacaagctgcaggcaccgcgcatccaccgctggaccatcctgcattacagccccttcaaggccgtgtgggactggctcatcctgctgctggtcatctacacggctgtcttcacaccctactcggctgccttcctgctgaaggagacggaagaaggcccgcctgctaccgagtgtggctacgcctgccagccgctggctgtggtggacctcatcgtggacatcatgttcattgtggacatcctcatcaacttccgcaccacctacgtcaatgccaacgaggaggtggtcagccaccccggccgcatcgccgtccactaattcaagggctggttcctcatcgacatggtggccgccatccccttcgacctgctcatcttcggctctggctctgaggagctgatcgggctgctgaagactgcgcggctgctgcggctggtgcgcgtggcgcggaagctggatcgctactcagagtacggcgcggccgtgctgttcttgctcatgtgcacctttgcgctcatcgcgcactggctagcctgcatctggtacgccatcggcaacatggagcagccacacatggactcacgcatcggctggctgcacaacctgggcgaccagataggcaaaccctacaacagcagcggcctgggcggcccctccatcaaggacaagtatgtgacggcgctctacttcaccttcagcagcctcaccagtgtgggcttcggcaacgtctctcccaacaccaactcagagaagatcttctccatctgcgtcatgctcattggctccctcatgtatgctagcatcttcggcaacgtgtcggccatcatccagcggctgtactcgggcacagcccgctaccacacacagatgctgcgggtgcgggagttcatccgcttccaccagatccccaatcccctgcgccagcgcctcgaggagtacttccagcacgcctggtcctacaccaacggcatcgacatgaacgcggtgctgaagggcttccctgagtgcctgcaggctgacatctgcctgcacctgaaccgctcactgctgcagcactgcaaacccttccgaggggccaccaagggctgccttcgggccctggccatgaagttcaagaccacacatgcaccgccaggggacacactggtgcatgctggggacctgctcaccgccctgtacttcatctcccggggctccatcgagatcctgcggggcgacgtcgtcgtggccatcctggggaagaatgacatctttggggagcctctgaacctgtatgcaaggcctggcaagtcgaacggggatgtgcgggccctcacctactgtgacctacacaagatccatcgggacgacctgctggaggtgctggacatgtaccctgagttctccgaccacttctggtccagcctggagatcaccttcaacctgcgagataccaacatgatcccgggctcccccggcagtacggagttagagggtggcttcagtcggcaacgcaagcgcaagttgtccttccgcaggcgcacggacaaggacacggagcagccaggggaggtgtcggccttggggccgggccgggcgggggcagggccgagtagccggggccggccgggggggccgtggggggagagcccgtccagtggcccctccagccctgagagcagtgaggatgagggcccaggccgcagctccagccccctccgcctggtgcccttctccagccccaggccccccggagagccgccgggtggggagcccctgatggaggactgcgagaagagcagcgacacttgcaaccccctgtcaggcgccttctcaggagtgtccaacattttcagcttctggggggacagtcggggccgccagtaccaggagctccctcgatgccccgcccccacccccagcctcctcaacatccccctctccagcccgggtcggcggccccggggcgacgtggagagcaggctggatgccctccagcgccagctcaacaggctggagacccggctgagtgcagacatggccactgtcctgcagctgctacagaggcagatgacgctggtcccgcccgcctacagtgctgtgaccaccccggggcctggccccacttccacatccccgctgttgcccgtcagccccctccccaccctcaccttggactcgctttctcaggtttcccagttcatggcgtgtgaggagctgcccccgggggccccagagcttccccaagaaggccccacacgacgcctctccctaccgggccagctgggggccctcacctcccagcccctgcacagacacggctcggacccgggcagttagtggggctgcccagtgtggacacgtggctcacccagggatcaaggcgctgctgggccgctccccttggaggccctgctcaggaggccctgaccgtggaaggggagaggaactcgaaagcacagctcctcccccagcccttgggaccatcttctcctgcagtcccctgggccccagtgagaggggcaggggcagggccggcagtaggtggggcctgtggtccccccactgccctgagggcattagctggtctaactgcccggaggcacccggccctgggccttaggcacctcaaggacttttctgctatttactgctcttattgttaaggataataattaaggatcatatgaataattaatgaagatgctgatgactatgaataataaataattatcctgaggaga

SEQ ID NO: 125 - DNA, 3884 bp, Homo sapiens
  source 1..3884: mol_type = genomic DNA
  misc_feature 1..3884: note = cDNA of KCNH2 gene SNP c.147C>G (p.Cys49Trp)
atgccggtgcggaggggccacgtcgcgccgcagaacaccttcctggacaccatcatccgcaagtttgagggccagagccgtaagttcatcatcgccaacgctcgggtggagaactgcgccgtcatctactgcaacgacggcttctgggagctgtgcggctactcgcgggccgaggtgatgcagcgaccctgcacctgcgacttcctgcacgggccgcgcacgcagcgccgcgctgccgcgcagatcgcgcaggcactgctgggcgccgaggagcgcaaagtggaaatcgccttctaccggaaagatgggagctgcttcctatgtctggtggatgtggtgcccgtgaagaacgaggatggggctgtcatcatgttcatcctcaatttcgaggtggtgatggagaaggacatggtggggtccccggctcatgacaccaaccaccggggcccccccaccagctggctggccccaggccgcgccaagaccttccgcctgaagctgcccgcgctgctggcgctgacggcccgggagtcgtcggtgcggtcgggcggcgcgggcggcgcgggcgccccgggggccgtggtggtggacgtggacctgacgcccgcggcacccagcagcgagtcgctggccctggacgaagtgacagccatggacaaccacgtggcagggctcgggcccgcggaggagcggcgtgcgctggtgggtcccggctctccgccccgcagcgcgcccggccagctcccatcgccccgggcgcacagcctcaaccccgacgcctcgggctccagctgcagcctggcccggacgcgctcccgagaaagctgcgccagcgtgcgccgcgcctcgtcggccgacgacatcgaggccatgcgcgccggggtgctgcccccgccaccgcgccacgccagcaccggggccatgcacccactgcgcagcggcttgctcaactccacctcggactccgacctcgtgcgctaccgcaccattagcaagattccccaaatcaccctcaactttgtggacctcaagggcgaccccttcttggcttcgcccaccagtgaccgtgagatcatagcacctaagataaaggagcgaacccacaatgtcactgagaaggtcacccaggtcctgtccctgggcgccgacgtgctgcctgagtacaagctgcaggcaccgcgcatccaccgctggaccatcctgcattacagccccttcaaggccgtgtgggactggctcatcctgctgctggtcatctacacggctgtcttcacaccctactcggctgccttcctgctgaaggagacggaagaaggcccgcctgctaccgagtgtggctacgcctgccagccgctggctgtggtggacctcatcgtggacatcatgttcattgtggacatcctcatcaacttccgcaccacctacgtcaatgccaacgaggaggtggtcagccaccccggccgcatcgccgtccactacttcaagggctggttcctcatcgacatggtggccgccatccccttcgacctgctcatcttcggctctggctctgaggagctgatcgggctgctgaagactgcgcggctgctgcggctggtgcgcgtggcgcggaagctggatcgctactcagagtacggcgcggccgtgctgttcttgctcatgtgcacctttgcgctcatcgcgcactggctagcctgcatctggtacgccatcggcaacatggagcagccacacatggactcacgcatcggctggctgcacaacctgggcgaccagataggcaaaccctacaacagcagcggcctgggcggcccctccatcaaggacaagtatgtgacggcgctctacttcaccttcagcagcctcaccagtgtgggcttcggcaacgtctctcccaacaccaactcagagaagatcttctccatctgcgtcatgctcattggctccctcatgtatgctagcatcttcggcaacgtgtcggccatcatccagcggctgtactcgggcacagcccgctaccacacacagatgctgcgggtgcgggagttcatccgcttccaccagatccccaatcccctgcgccagcgcctcgaggagtacttccagcacgcctggtcctacaccaacggcatcgacatgaacgcggtgctgaagggcttccctgagtgcctgcaggctgacatctgcctgcacctgaaccgctcactgctgcagcactgcaaacccttccgaggggccaccaagggctgccttcgggccctggccatgaagttcaagaccacacatgcaccgccaggggacacactggtgcatgctggggacctgctcaccgccctgtacttcatctcccggggctccatcgagatcctgcggggcgacgtcgtcgtggccatcctggggaagaatgacatctttggggagcctctgaacctgtatgcaaggcctggcaagtcgaacggggatgtgcgggccctcacctactgtgacctacacaagatccatcgggacgacctgctggaggtgctggacatgtaccctgagttctccgaccacttctggtccagcctggagatcaccttcaacctgcgagataccaacatgatcccgggctcccccggcagtacggagttagagggtggcttcagtcggcaacgcaagcgcaagttgtccttccgcaggcgcacggacaaggacacggagcagccaggggaggtgtcggccttggggccgggccgggcgggggcagggccgagtagccggggccggccgggggggccgtggggggagagcccgtccagtggcccctccagccctgagagcagtgaggatgagggcccaggccgcagctccagccccctccgcctggtgcccttctccagccccaggccccccggagagccgccgggtggggagcccctgatggaggactgcgagaagagcagcgacacttgcaaccccctgtcaggcgccttctcaggagtgtccaacattttcagcttctggggggacagtcggggccgccagtaccaggagctccctcgatgccccgcccccacccccagcctcctcaacatccccctctccagcccgggtcggcggccccggggcgacgtggagagcaggctggatgccctccagcgccagctcaacaggctggagacccggctgagtgcagacatggccactgtcctgcagctgctacagaggcagatgacgctggtcccgcccgcctacagtgctgtgaccaccccggggcctggccccacttccacatccccgctgttgcccgtcagccccctccccaccctcaccttggactcgctttctcaggtttcccagttcatggcgtgtgaggagctgcccccgggggccccagagcttccccaagaaggccccacacgacgcctctccctaccgggccagctgggggccctcacctcccagcccctgcacagacacggctcggacccgggcagttagtggggctgcccagtgtggacacgtggctcacccagggatcaaggcgctgctgggccgctccccttggaggccctgctcaggaggccctgaccgtggaaggggagaggaactcgaaagcacagctcctcccccagcccttgggaccatcttctcctgcagtcccctgggccccagtgagaggggcaggggcagggccggcagtaggtggggcctgtggtccccccactgccctgagggcattagctggtctaactgcccggaggcacccggccctgggccttaggcacctcaaggacttttctgctatttactgctcttattgttaaggataataattaaggatcatatgaataattaatgaagatgctgatgactatgaataataaataattatcctgaggaga

SEQ ID NO: 126 - DNA, 3884 bp, Homo sapiens
  source 1..3884: mol_type = genomic DNA
  misc_feature 1..3884: note = cDNA of KCNH2 gene SNP c.148G>C (p.Glu50Gln)
atgccggtgcggaggggccacgtcgcgccgcagaacaccttcctggacaccatcatccgcaagtttgagggccagagccgtaagttcatcatcgccaacgctcgggtggagaactgcgccgtcatctactgcaacgacggcttctgccagctgtgcggctactcgcgggccgaggtgatgcagcgaccctgcacctgcgacttcctgcacgggccgcgcacgcagcgccgcgctgccgcgcagatcgcgcaggcactgctgggcgccgaggagcgcaaagtggaaatcgccttctaccggaaagatgggagctgcttcctatgtctggtggatgtggtgcccgtgaagaacgaggatggggctgtcatcatgttcatcctcaatttcgaggtggtgatggagaaggacatggtggggtccccggctcatgacaccaaccaccggggcccccccaccagctggctggccccaggccgcgccaagaccttccgcctgaagctgcccgcgctgctggcgctgacggcccgggagtcgtcggtgcggtcgggcggcgcgggcggcgcgggcgccccgggggccgtggtggtggacgtggacctgacgcccgcggcacccagcagcgagtcgctggccctggacgaagtgacagccatggacaaccacgtggcagggctcgggcccgcggaggagcggcgtgcgctggtgggtcccggctctccgccccgcagcgcgcccggccagctcccatcgccccgggcgcacagcctcaaccccgacgcctcgggctccagctgcagcctggcccggacgcgctcccgagaaagctgcgccagcgtgcgccgcgcctcgtcggccgacgacatcgaggccatgcgcgccggggtgctgcccccgccaccgcgccacgccagcaccggggccatgcacccactgcgcagcggcttgctcaactccacctcggactccgacctcgtgcgctaccgcaccattagcaagattccccaaatcaccctcaactttgtggacctcaagggcgaccccttcttggcttcgcccaccagtgaccgtgagatcatagcacctaagataaaggagcgaacccacaatgtcactgagaaggtcacccaggtcctgtccctgggcgccgacgtgctgcctgagtacaagctgcaggcaccgcgcatccaccgctggaccatcctgcattacagccccttcaaggccgtgtgggactggctcatcctgctgctggtcatctacacggctgtcttcacaccctactcggctgccttcctgctgaaggagacggaagaaggcccgcctgctaccgagtgtggctacgcctgccagccgctggctgtggtggacctcatcgtggacatcatgttcattgtggacatcctcatcaacttccgcaccacctacgtcaatgccaacgaggaggtggtcagccaccccggccgcatcgccgtccactacttcaagggctggttcctcatcgacatggtggccgccatccccttcgacctgctcatcttcggctctggctctgaggagctgatcgggctgctgaagactgcgcggctgctgcggctggtgcgcgtggcgcggaagctggatcgctactcagagtacggcgcggccgtgctgttcttgctcatgtgcacctttgcgctcatcgcgcactggctagcctgcatctggtacgccatcggcaacatggagcagccacacatggactcacgcatcggctggctgcacaacctgggcgaccagataggcaaaccctacaacagcagcggcctgggcggcccctccatcaaggacaagtatgtgacggcgctctacttcaccttcagcagcctcaccagtgtgggcttcggcaacgtctctcccaacaccaactcagagaagatcttctccatctgcgtcatgctcattggctccctcatgtatgctagcatcttcggcaacgtgtcggccatcatccagcggctgtactcgggcacagcccgctaccacacacagatgctgcgggtgcgggagttcatccgcttccaccagatccccaatcccctgcgccagcgcctcgaggagtacttccagcacgcctggtcctacaccaacggcatcgacatgaacgcggtgctgaagggcttccctgagtgcctgcaggctgacatctgcctgcacctgaaccgctcactgctgcagcactgcaaacccttccgaggggccaccaagggctgccttcgggccctggccatgaagttcaagaccacacatgcaccgccaggggacacactggtgcatgctggggacctgctcaccgccctgtacttcatctcccggggctccatcgagatcctgcggggcgacgtcgtcgtggccatcctggggaagaatgacatctttggggagcctctgaacctgtatgcaaggcctggcaagtcgaacggggatgtgcgggccctcacctactgtgacctacacaagatccatcgggacgacctgctggaggtgctggacatgtaccctgagttctccgaccacttctggtccagcctggagatcaccttcaacctgcgagataccaacatgatcccgggctcccccggcagtacggagttagagggtggcttcagtcggcaacgcaagcgcaagttgtccttccgcaggcgcacggacaaggacacggagcagccaggggaggtgtcggccttggggccgggccgggcgggggcagggccgagtagccggggccggccgggggggccgtggggggagagcccgtccagtggcccctccagccctgagagcagtgaggatgagggcccaggccgcagctccagccccctccgcctggtgcccttctccagccccaggccccccggagagccgccgggtggggagcccctgatggaggactgcgagaagagcagcgacacttgcaaccccctgtcaggcgccttctcaggagtgtccaacattttcagcttctggggggacagtcggggccgccagtaccaggagctccctcgatgccccgcccccacccccagcctcctcaacatccccctctccagcccgggtcggcggccccggggcgacgtggagagcaggctggatgccctccagcgccagctcaacaggctggagacccggctgagtgcagacatggccactgtcctgcagctgctacagaggcagatgacgctggtcccgcccgcctacagtgctgtgaccaccccggggcctggccccacttccacatccccgctgttgcccgtcagccccctccccaccctcaccttggactcgctttctcaggtttcccagttcatggcgtgtgaggagctgcccccgggggccccagagcttccccaagaaggccccacacgacgcctctccctaccgggccagctgggggccctcacctcccagcccctgcacagacacggctcggacccgggcagttagtggggctgcccagtgtggacacgtggctcacccagggatcaaggcgctgctgggccgctccccttggaggccctgctcaggaggccctgaccgtggaaggggagaggaactcgaaagcacagctcctcccccagcccttgggaccatcttctcctgcagtcccctgggccccagtgagaggggcaggggcagggccggcagtaggtggggcctgtggtccccccactgccctgagggcattagctggtctaactgcccggaggcacccggccctgggccttaggcacctcaaggacttttctgctatttactgctcttattgttaaggataataattaaggatcatatgaataattaatgaagatgctgatgactatgaataataaataattatcctgaggaga

SEQ ID NO: 127 - DNA, 3884 bp, Homo sapiens
  source 1..3884: mol_type = genomic DNA
  misc_feature 1..3884: note = cDNA of KCNH2 gene SNP c.1496T>G (p.Leu499Arg)
atgccggtgcggaggggccacgtcgcgccgcagaacaccttcctggacaccatcatccgcaagtttgagggccagagccgtaagttcatcatcgccaacgctcgggtggagaactgcgccgtcatctactgcaacgacggcttctgcgagctgtgcggctactcgcgggccgaggtgatgcagcgaccctgcacctgcgacttcctgcacgggccgcgcacgcagcgccgcgctgccgcgcagatcgcgcaggcactgctgggcgccgaggagcgcaaagtggaaatcgccttctaccggaaagatgggagctgcttcctatgtctggtggatgtggtgcccgtgaagaacgaggatggggctgtcatcatgttcatcctcaatttcgaggtggtgatggagaaggacatggtggggtccccggctcatgacaccaaccaccggggcccccccaccagctggctggccccaggccgcgccaagaccttccgcctgaagctgcccgcgctgctggcgctgacggcccgggagtcgtcggtgcggtcgggcggcgcgggcggcgcgggcgccccgggggccgtggtggtggacgtggacctgacgcccgcggcacccagcagcgagtcgctggccctggacgaagtgacagccatggacaaccacgtggcagggctcgggcccgcggaggagcggcgtgcgctggtgggtcccggctctccgccccgcagcgcgcccggccagctcccatcgccccgggcgcacagcctcaaccccgacgcctcgggctccagctgcagcctggcccggacgcgctcccgagaaagctgcgccagcgtgcgccgcgcctcgtcggccgacgacatcgaggccatgcgcgccggggtgctgcccccgccaccgcgccacgccagcaccggggccatgcacccactgcgcagcggcttgctcaactccacctcggactccgacctcgtgcgctaccgcaccattagcaagattccccaaatcaccctcaactttgtggacctcaagggcgaccccttcttggcttcgcccaccagtgaccgtgagatcatagcacctaagataaaggagcgaacccacaatgtcactgagaaggtcacccaggtcctgtccctgggcgccgacgtgctgcctgagtacaagctgcaggcaccgcgcatccaccgctggaccatcctgcattacagccccttcaaggccgtgtgggactggctcatcctgctgctggtcatctacacggctgtcttcacaccctactcggctgccttcctgctgaaggagacggaagaaggcccgcctgctaccgagtgtggctacgcctgccagccgctggctgtggtggacctcatcgtggacatcatgttcattgtggacatcctcatcaacttccgcaccacctacgtcaatgccaacgaggaggtggtcagccaccccggccgcatcgccgtccactacttcaagggctggttccgcatcgacatggtggccgccatccccttcgacctgctcatcttcggctctggctctgaggagctgatcgggctgctgaagactgcgcggctgctgcggctggtgcgcgtggcgcggaagctggatcgctactcagagtacggcgcggccgtgctgttcttgctcatgtgcacctttgcgctcatcgcgcactggctagcctgcatctggtacgccatcggcaacatggagcagccacacatggactcacgcatcggctggctgcacaacctgggcgaccagataggcaaaccctacaacagcagcggcctgggcggcccctccatcaaggacaagtatgtgacggcgctctacttcaccttcagcagcctcaccagtgtgggcttcggcaacgtctctcccaacaccaactcagagaagatcttctccatctgcgtcatgctcattggctccctcatgtatgctagcatcttcggcaacgtgtcggccatcatccagcggctgtactcgggcacagcccgctaccacacacagatgctgcgggtgcgggagttcatccgcttccaccagatccccaatcccctgcgccagcgcctcgaggagtacttccagcacgcctggtcctacaccaacggcatcgacatgaacgcggtgctgaagggcttccctgagtgcctgcaggctgacatctgcctgcacctgaaccgctcactgctgcagcactgcaaacccttccgaggggccaccaagggctgccttcgggccctggccatgaagttcaagaccacacatgcaccgccaggggacacactggtgcatgctggggacctgctcaccgccctgtacttcatctcccggggctccatcgagatcctgcggggcgacgtcgtcgtggccatcctggggaagaatgacatctttggggagcctctgaacctgtatgcaaggcctggcaagtcgaacggggatgtgcgggccctcacctactgtgacctacacaagatccatcgggacgacctgctggaggtgctggacatgtaccctgagttctccgaccacttctggtccagcctggagatcaccttcaacctgcgagataccaacatgatcccgggctcccccggcagtacggagttagagggtggcttcagtcggcaacgcaagcgcaagttgtccttccgcaggcgcacggacaaggacacggagcagccaggggaggtgtcggccttggggccgggccgggcgggggcagggccgagtagccggggccggccgggggggccgtggggggagagcccgtccagtggcccctccagccctgagagcagtgaggatgagggcccaggccgcagctccagccccctccgcctggtgcccttctccagccccaggccccccggagagccgccgggtggggagcccctgatggaggactgcgagaagagcagcgacacttgcaaccccctgtcaggcgccttctcaggagtgtccaacattttcagcttctggggggacagtcggggccgccagtaccaggagctccctcgatgccccgcccccacccccagcctcctcaacatccccctctccagcccgggtcggcggccccggggcgacgtggagagcaggctggatgccctccagcgccagctcaacaggctggagacccggctgagtgcagacatggccactgtcctgcagctgctacagaggcagatgacgctggtcccgcccgcctacagtgctgtgaccaccccggggcctggccccacttccacatccccgctgttgcccgtcagccccctccccaccctcaccttggactcgctttctcaggtttcccagttcatggcgtgtgaggagctgcccccgggggccccagagcttccccaagaaggccccacacgacgcctctccctaccgggccagctgggggccctcacctcccagcccctgcacagacacggctcggacccgggcagttagtggggctgcccagtgtggacacgtggctcacccagggatcaaggcgctgctgggccgctccccttggaggccctgctcaggaggccctgaccgtggaaggggagaggaactcgaaagcacagctcctcccccagcccttgggaccatcttctcctgcagtcccctgggccccagtgagaggggcaggggcagggccggcagtaggtggggcctgtggtccccccactgccctgagggcattagctggtctaactgcccggaggcacccggccctgggccttaggcacctcaaggacttttctgctatttactgctcttattgttaaggataataattaaggatcatatgaataattaatgaagatgctgatgactatgaataataaataattatcctgaggaga

SEQ ID NO: 128 - DNA, 3884 bp, Homo sapiens
  source 1..3884: mol_type = genomic DNA
  misc_feature 1..3884: note = cDNA of KCNH2 gene SNP c.1501G>A (p.Asp501Asn)
atgccggtgcggaggggccacgtcgcgccgcagaacaccttcctggacaccatcatccgcaagtttgagggccagagccgtaagttcatcatcgccaacgctcgggtggagaactgcgccgtcatctactgcaacgacggcttctgcgagctgtgcggctactcgcgggccgaggtgatgcagcgaccctgcacctgcgacttcctgcacgggccgcgcacgcagcgccgcgctgccgcgcagatcgcgcaggcactgctgggcgccgaggagcgcaaagtggaaatcgccttctaccggaaagatgggagctgcttcctatgtctggtggatgtggtgcccgtgaagaacgaggatggggctgtcatcatgttcatcctcaatttcgaggtggtgatggagaaggacatggtggggtccccggctcatgacaccaaccaccggggcccccccaccagctggctggccccaggccgcgccaagaccttccgcctgaagctgcccgcgctgctggcgctgacggcccgggagtcgtcggtgcggtcgggcggcgcgggcggcgcgggcgccccgggggccgtggtggtggacgtggacctgacgcccgcggcacccagcagcgagtcgctggccctggacgaagtgacagccatggacaaccacgtggcagggctcgggcccgcggaggagcggcgtgcgctggtgggtcccggctctccgccccgcagcgcgcccggccagctcccatcgccccgggcgcacagcctcaaccccgacgcctcgggctccagctgcagcctggcccggacgcgctcccgagaaagctgcgccagcgtgcgccgcgcctcgtcggccgacgacatcgaggccatgcgcgccggggtgctgcccccgccaccgcgccacgccagcaccggggccatgcacccactgcgcagcggcttgctcaactccacctcggactccgacctcgtgcgctaccgcaccattagcaagattccccaaatcaccctcaactttgtggacctcaagggcgaccccttcttggcttcgcccaccagtgaccgtgagatcatagcacctaagataaaggagcgaacccacaatgtcactgagaaggtcacccaggtcctgtccctgggcgccgacgtgctgcctgagtacaagctgcaggcaccgcgcatccaccgctggaccatcctgcattacagccccttcaaggccgtgtgggactggctcatcctgctgctggtcatctacacggctgtcttcacaccctactcggctgccttcctgctgaaggagacggaagaaggcccgcctgctaccgagtgtggctacgcctgccagccgctggctgtggtggacctcatcgtggacatcatgttcattgtggacatcctcatcaacttccgcaccacctacgtcaatgccaacgaggaggtggtcagccaccccggccgcatcgccgtccactacttcaagggctggttcctcatcaacatggtggccgccatccccttcgacctgctcatcttcggctctggctctgaggagctgatcgggctgctgaagactgcgcggctgctgcggctggtgcgcgtggcgcggaagctggatcgctactcagagtacggcgcggccgtgctgttcttgctcatgtgcacctttgcgctcatcgcgcactggctagcctgcatctggtacgccatcggcaacatggagcagccacacatggactcacgcatcggctggctgcacaacctgggcgaccagataggcaaaccctacaacagcagcggcctgggcggcccctccatcaaggacaagtatgtgacggcgctctacttcaccttcagcagcctcaccagtgtgggcttcggcaacgtctctcccaacaccaactcagagaagatcttctccatctgcgtcatgctcattggctccctcatgtatgctagcatcttcggcaacgtgtcggccatcatccagcggctgtactcgggcacagcccgctaccacacacagatgctgcgggtgcgggagttcatccgcttccaccagatccccaatcccctgcgccagcgcctcgaggagtacttccagcacgcctggtcctacaccaacggcatcgacatgaacgcggtgctgaagggcttccctgagtgcctgcaggctgacatctgcctgcacctgaaccgctcactgctgcagcactgcaaacccttccgaggggccaccaagggctgccttcgggccctggccatgaagttcaagaccacacatgcaccgccaggggacacactggtgcatgctggggacctgctcaccgccctgtacttcatctcccggggctccatcgagatcctgcggggcgacgtcgtcgtggccatcctggggaagaatgacatctttggggagcctctgaacctgtatgcaaggcctggcaagtcgaacggggatgtgcgggccctcacctactgtgacctacacaagatccatcgggacgacctgctggaggtgctggacatgtaccctgagttctccgaccacttctggtccagcctggagatcaccttcaacctgcgagataccaacatgatcccgggctcccccggcagtacggagttagagggtggcttcagtcggcaacgcaagcgcaagttgtccttccgcaggcgcacggacaaggacacggagcagccaggggaggtgtcggccttggggccgggccgggcgggggcagggccgagtagccggggccggccgggggggccgtggggggagagcccgtccagtggcccctccagccctgagagcagtgaggatgagggcccaggccgcagctccagccccctccgcctggtgcccttctccagccccaggccccccggagagccgccgggtggggagcccctgatggaggactgcgagaagagcagcgacacttgcaaccccctgtcaggcgccttctcaggagtgtccaacattttcagcttctggggggacagtcggggccgccagtaccaggagctccctcgatgccccgcccccacccccagcctcctcaacatccccctctccagcccgggtcggcggccccggggcgacgtggagagcaggctggatgccctccagcgccagctcaacaggctggagacccggctgagtgcagacatggccactgtcctgcagctgctacagaggcagatgacgctggtcccgcccgcctacagtgctgtgaccaccccggggcctggccccacttccacatccccgctgttgcccgtcagccccctccccaccctcaccttggactcgctttctcaggtttcccagttcatggcgtgtgaggagctgcccccgggggccccagagcttccccaagaaggccccacacgacgcctctccctaccgggccagctgggggccctcacctcccagcccctgcacagacacggctcggacccgggcagttagtggggctgcccagtgtggacacgtggctcacccagggatcaaggcgctgctgggccgctccccttggaggccctgctcaggaggccctgaccgtggaaggggagaggaactcgaaagcacagctcctcccccagcccttgggaccatcttctcctgcagtcccctgggccccagtgagaggggcaggggcagggccggcagtaggtggggcctgtggtccccccactgccctgagggcattagctggtctaactgcccggaggcacccggccctgggccttaggcacctcaaggacttttctgctatttactgctcttattgttaaggataataattaaggatcatatgaataattaatgaagatgctgatgactatgaataataaataattatcctgaggaga

SEQ ID NO: 129 - DNA, 3884 bp, Homo sapiens
  source 1..3884: mol_type = genomic DNA
  misc_feature 1..3884: note = cDNA of KCNH2 gene SNP c.1501G>C (p.Asp501His)
atgccggtgcggaggggccacgtcgcgccgcagaacaccttcctggacaccatcatccgcaagtttgagggccagagccgtaagttcatcatcgccaacgctcgggtggagaactgcgccgtcatctactgcaacgacggcttctgcgagctgtgcggctactcgcgggccgaggtgatgcagcgaccctgcacctgcgacttcctgcacgggccgcgcacgcagcgccgcgctgccgcgcagatcgcgcaggcactgctgggcgccgaggagcgcaaagtggaaatcgccttctaccggaaagatgggagctgcttcctatgtctggtggatgtggtgcccgtgaagaacgaggatggggctgtcatcatgttcatcctcaatttcgaggtggtgatggagaaggacatggtggggtccccggctcatgacaccaaccaccggggcccccccaccagctggctggccccaggccgcgccaagaccttccgcctgaagctgcccgcgctgctggcgctgacggcccgggagtcgtcggtgcggtcgggcggcgcgggcggcgcgggcgccccgggggccgtggtggtggacgtggacctgacgcccgcggcacccagcagcgagtcgctggccctggacgaagtgacagccatggacaaccacgtggcagggctcgggcccgcggaggagcggcgtgcgctggtgggtcccggctctccgccccgcagcgcgcccggccagctcccatcgccccgggcgcacagcctcaaccccgacgcctcgggctccagctgcagcctggcccggacgcgctcccgagaaagctgcgccagcgtgcgccgcgcctcgtcggccgacgacatcgaggccatgcgcgccggggtgctgcccccgccaccgcgccacgccagcaccggggccatgcacccactgcgcagcggcttgctcaactccacctcggactccgacctcgtgcgctaccgcaccattagcaagattccccaaatcaccctcaactttgtggacctcaagggcgaccccttcttggcttcgcccaccagtgaccgtgagatcatagcacctaagataaaggagcgaacccacaatgtcactgagaaggtcacccaggtcctgtccctgggcgccgacgtgctgcctgagtacaagctgcaggcaccgcgcatccaccgctggaccatcctgcattacagccccttcaaggccgtgtgggactggctcatcctgctgctggtcatctacacggctgtcttcacaccctactcggctgccttcctgctgaaggagacggaagaaggcccgcctgctaccgagtgtggctacgcctgccagccgctggctgtggtggacctcatcgtggacatcatgttcattgtggacatcctcatcaacttccgcaccacctacgtcaatgccaacgaggaggtggtcagccaccccggccgcatcgccgtccactacttcaagggctggttcctcatccacatggtggccgccatccccttcgacctgctcatcttcggctctggctctgaggagctgatcgggctgctgaagactgcgcggctgctgcggctggtgcgcgtggcgcggaagctggatcgctactcagagtacggcgcggccgtgctgttcttgctcatgtgcacctttgcgctcatcgcgcactggctagcctgcatctggtacgccatcggcaacatggagcagccacacatggactcacgcatcggctggctgcacaacctgggcgaccagataggcaaaccctacaacagcagcggcctgggcggcccctccatcaaggacaagtatgtgacggcgctctacttcaccttcagcagcctcaccagtgtgggcttcggcaacgtctctcccaacaccaactcagagaagatcttctccatctgcgtcatgctcattggctccctcatgtatgctagcatcttcggcaacgtgtcggccatcatccagcggctgtactcgggcacagcccgctaccacacacagatgctgcgggtgcgggagttcatccgcttccaccagatccccaatcccctgcgccagcgcctcgaggagtacttccagcacgcctggtcctacaccaacggcatcgacatgaacgcggtgctgaagggcttccctgagtgcctgcaggctgacatctgcctgcacctgaaccgctcactgctgcagcactgcaaacccttccgaggggccaccaagggctgccttcgggccctggccatgaagttcaagaccacacatgcaccgccaggggacacactggtgcatgctggggacctgctcaccgccctgtacttcatctcccggggctccatcgagatcctgcggggcgacgtcgtcgtggccatcctggggaagaatgacatctttggggagcctctgaacctgtatgcaaggcctggcaagtcgaacggggatgtgcgggccctcacctactgtgacctacacaagatccatcgggacgacctgctggaggtgctggacatgtaccctgagttctccgaccacttctggtccagcctggagatcaccttcaacctgcgagataccaacatgatcccgggctcccccggcagtacggagttagagggtggcttcagtcggcaacgcaagcgcaagttgtccttccgcaggcgcacggacaaggacacggagcagccaggggaggtgtcggccttggggccgggccgggcgggggcagggccgagtagccggggccggccgggggggccgtggggggagagcccgtccagtggcccctccagccctgagagcagtgaggatgagggcccaggccgcagctccagccccctccgcctggtgcccttctccagccccaggccccccggagagccgccgggtggggagcccctgatggaggactgcgagaagagcagcgacacttgcaaccccctgtcaggcgccttctcaggagtgtccaacattttcagcttctggggggacagtcggggccgccagtaccaggagctccctcgatgccccgcccccacccccagcctcctcaacatccccctctccagcccgggtcggcggccccggggcgacgtggagagcaggctggatgccctccagcgccagctcaacaggctggagacccggctgagtgcagacatggccactgtcctgcagctgctacagaggcagatgacgctggtcccgcccgcctacagtgctgtgaccaccccggggcctggccccacttccacatccccgctgttgcccgtcagccccctccccaccctcaccttggactcgctttctcaggtttcccagttcatggcgtgtgaggagctgcccccgggggccccagagcttccccaagaaggccccacacgacgcctctccctaccgggccagctgggggccctcacctcccagcccctgcacagacacggctcggacccgggcagttagtggggctgcccagtgtggacacgtggctcacccagggatcaaggcgctgctgggccgctccccttggaggccctgctcaggaggccctgaccgtggaaggggagaggaactcgaaagcacagctcctcccccagcccttgggaccatcttctcctgcagtcccctgggccccagtgagaggggcaggggcagggccggcagtaggtggggcctgtggtccccccactgccctgagggcattagctggtctaactgcccggaggcacccggccctgggccttaggcacctcaaggacttttctgctatttactgctcttattgttaaggataataattaaggatcatatgaataattaatgaagatgctgatgactatgaataataaataattatcctgaggaga

SEQ ID NO: 130 - DNA, 3884 bp, Homo sapiens
  source 1..3884: mol_type = genomic DNA
  misc_feature 1..3884: note = cDNA of KCNH2 gene SNP c.1502A>G (p.Asp501Gly)
atgccggtgcggaggggccacgtcgcgccgcagaacaccttcctggacaccatcatccgcaagtttgagggccagagccgtaagttcatcatcgccaacgctcgggtggagaactgcgccgtcatctactgcaacgacggcttctgcgagctgtgcggctactcgcgggccgaggtgatgcagcgaccctgcacctgcgacttcctgcacgggccgcgcacgcagcgccgcgctgccgcgcagatcgcgcaggcactgctgggcgccgaggagcgcaaagtggaaatcgccttctaccggaaagatgggagctgcttcctatgtctggtggatgtggtgcccgtgaagaacgaggatggggctgtcatcatgttcatcctcaatttcgaggtggtgatggagaaggacatggtggggtccccggctcatgacaccaaccaccggggcccccccaccagctggctggccccaggccgcgccaagaccttccgcctgaagctgcccgcgctgctggcgctgacggcccgggagtcgtcggtgcggtcgggcggcgcgggcggcgcgggcgccccgggggccgtggtggtggacgtggacctgacgcccgcggcacccagcagcgagtcgctggccctggacgaagtgacagccatggacaaccacgtggcagggctcgggcccgcggaggagcggcgtgcgctggtgggtcccggctctccgccccgcagcgcgcccggccagctcccatcgccccgggcgcacagcctcaaccccgacgcctcgggctccagctgcagcctggcccggacgcgctcccgagaaagctgcgccagcgtgcgccgcgcctcgtcggccgacgacatcgaggccatgcgcgccggggtgctgcccccgccaccgcgccacgccagcaccggggccatgcacccactgcgcagcggcttgctcaactccacctcggactccgacctcgtgcgctaccgcaccattagcaagattccccaaatcaccctcaactttgtggacctcaagggcgaccccttcttggcttcgcccaccagtgaccgtgagatcatagcacctaagataaaggagcgaacccacaatgtcactgagaaggtcacccaggtcctgtccctgggcgccgacgtgctgcctgagtacaagctgcaggcaccgcgcatccaccgctggaccatcctgcattacagccccttcaaggccgtgtgggactggctcatcctgctgctggtcatctacacggctgtcttcacaccctactcggctgccttcctgctgaaggagacggaagaaggcccgcctgctaccgagtgtggctacgcctgccagccgctggctgtggtggacctcatcgtggacatcatgttcattgtggacatcctcatcaacttccgcaccacctacgtcaatgccaacgaggaggtggtcagccaccccggccgcatcgccgtccactacttcaagggctggttcctcatcggcatggtggccgccatccccttcgacctgctcatcttcggctctggctctgaggagctgatcgggctgctgaagactgcgcggctgctgcggctggtgcgcgtggcgcggaagctggatcgctactcagagtacggcgcggccgtgctgttcttgctcatgtgcacctttgcgctcatcgcgcactggctagcctgcatctggtacgccatcggcaacatggagcagccacacatggactcacgcatcggctggctgcacaacctgggcgaccagataggcaaaccctacaacagcagcggcctgggcggcccctccatcaaggacaagtatgtgacggcgctctacttcaccttcagcagcctcaccagtgtgggcttcggcaacgtctctcccaacaccaactcagagaagatcttctccatctgcgtcatgctcattggctccctcatgtatgctagcatcttcggcaacgtgtcggccatcatccagcggctgtactcgggcacagcccgctaccacacacagatgctgcgggtgcgggagttcatccgcttccaccagatccccaatcccctgcgccagcgcctcgaggagtacttccagcacgcctggtcctacaccaacggcatcgacatgaacgcggtgctgaagggcttccctgagtgcctgcaggctgacatctgcctgcacctgaaccgctcactgctgcagcactgcaaacccttccgaggggccaccaagggctgccttcgggccctggccatgaagttcaagaccacacatgcaccgccaggggacacactggtgcatgctggggacctgctcaccgccctgtacttcatctcccggggctccatcgagatcctgcggggcgacgtcgtcgtggccatcctggggaagaatgacatctttggggagcctctgaacctgtatgcaaggcctggcaagtcgaacggggatgtgcgggccctcacctactgtgacctacacaagatccatcgggacgacctgctggaggtgctggacatgtaccctgagttctccgaccacttctggtccagcctggagatcaccttcaacctgcgagataccaacatgatcccgggctcccccggcagtacggagttagagggtggcttcagtcggcaacgcaagcgcaagttgtccttccgcaggcgcacggacaaggacacggagcagccaggggaggtgtcggccttggggccgggccgggcgggggcagggccgagtagccggggccggccgggggggccgtggggggagagcccgtccagtggcccctccagccctgagagcagtgaggatgagggcccaggccgcagctccagccccctccgcctggtgcccttctccagccccaggccccccggagagccgccgggtggggagcccctgatggaggactgcgagaagagcagcgacacttgcaaccccctgtcaggcgccttctcaggagtgtccaacattttcagcttctggggggacagtcggggccgccagtaccaggagctccctcgatgccccgcccccacccccagcctcctcaacatccccctctccagcccgggtcggcggccccggggcgacgtggagagcaggctggatgccctccagcgccagctcaacaggctggagacccggctgagtgcagacatggccactgtcctgcagctgctacagaggcagatgacgctggtcccgcccgcctacagtgctgtgaccaccccggggcctggccccacttccacatccccgctgttgcccgtcagccccctccccaccctcaccttggactcgctttctcaggtttcccagttcatggcgtgtgaggagctgcccccgggggccccagagcttccccaagaaggccccacacgacgcctctccctaccgggccagctgggggccctcacctcccagcccctgcacagacacggctcggacccgggcagttagtggggctgcccagtgtggacacgtggctcacccagggatcaaggcgctgctgggccgctccccttggaggccctgctcaggaggccctgaccgtggaaggggagaggaactcgaaagcacagctcctcccccagcccttgggaccatcttctcctgcagtcccctgggccccagtgagaggggcaggggcagggccggcagtaggtggggcctgtggtccccccactgccctgagggcattagctggtctaactgcccggaggcacccggccctgggccttaggcacctcaaggacttttctgctatttactgctcttattgttaaggataataattaaggatcatatgaataattaatgaagatgctgatgactatgaataataaataattatcctgaggaga

SEQ ID NO: 131 - DNA, 3884 bp, Homo sapiens
  source 1..3884: mol_type = genomic DNA
  misc_feature 1..3884: note = cDNA of KCNH2 gene SNP c.150G>T (p.Glu50Asp)
atgccggtgcggaggggccacgtcgcgccgcagaacaccttcctggacaccatcatccgcaagtttgagggccagagccgtaagttcatcatcgccaacgctcgggtggagaactgcgccgtcatctactgcaacgacggcttctgcgatctgtgcggctactcgcgggccgaggtgatgcagcgaccctgcacctgcgacttcctgcacgggccgcgcacgcagcgccgcgctgccgcgcagatcgcgcaggcactgctgggcgccgaggagcgcaaagtggaaatcgccttctaccggaaagatgggagctgcttcctatgtctggtggatgtggtgcccgtgaagaacgaggatggggctgtcatcatgttcatcctcaatttcgaggtggtgatggagaaggacatggtggggtccccggctcatgacaccaaccaccggggcccccccaccagctggctggccccaggccgcgccaagaccttccgcctgaagctgcccgcgctgctggcgctgacggcccgggagtcgtcggtgcggtcgggcggcgcgggcggcgcgggcgccccgggggccgtggtggtggacgtggacctgacgcccgcggcacccagcagcgagtcgctggccctggacgaagtgacagccatggacaaccacgtggcagggctcgggcccgcggaggagcggcgtgcgctggtgggtcccggctctccgccccgcagcgcgcccggccagctcccatcgccccgggcgcacagcctcaaccccgacgcctcgggctccagctgcagcctggcccggacgcgctcccgagaaagctgcgccagcgtgcgccgcgcctcgtcggccgacgacatcgaggccatgcgcgccggggtgctgcccccgccaccgcgccacgccagcaccggggccatgcacccactgcgcagcggcttgctcaactccacctcggactccgacctcgtgcgctaccgcaccattagcaagattccccaaatcaccctcaactttgtggacctcaagggcgaccccttcttggcttcgcccaccagtgaccgtgagatcatagcacctaagataaaggagcgaacccacaatgtcactgagaaggtcacccaggtcctgtccctgggcgccgacgtgctgcctgagtacaagctgcaggcaccgcgcatccaccgctggaccatcctgcattacagccccttcaaggccgtgtgggactggctcatcctgctgctggtcatctacacggctgtcttcacaccctactcggctgccttcctgctgaaggagacggaagaaggcccgcctgctaccgagtgtggctacgcctgccagccgctggctgtggtggacctcatcgtggacatcatgttcattgtggacatcctcatcaacttccgcaccacctacgtcaatgccaacgaggaggtggtcagccaccccggccgcatcgccgtccactacttcaagggctggttcctcatcgacatggtggccgccatccccttcgacctgctcatcttcggctctggctctgaggagctgatcgggctgctgaagactgcgcggctgctgcggctggtgcgcgtggcgcggaagctggatcgctactcagagtacggcgcggccgtgctgttcttgctcatgtgcacctttgcgctcatcgcgcactggctagcctgcatctggtacgccatcggcaacatggagcagccacacatggactcacgcatcggctggctgcacaacctgggcgaccagataggcaaaccctacaacagcagcggcctgggcggcccctccatcaaggacaagtatgtgacggcgctctacttcaccttcagcagcctcaccagtgtgggcttcggcaacgtctctcccaacaccaactcagagaagatcttctccatctgcgtcatgctcattggctccctcatgtatgctagcatcttcggcaacgtgtcggccatcatccagcggctgtactcgggcacagcccgctaccacacacagatgctgcgggtgcgggagttcatccgcttccaccagatccccaatcccctgcgccagcgcctcgaggagtacttccagcacgcctggtcctacaccaacggcatcgacatgaacgcggtgctgaagggcttccctgagtgcctgcaggctgacatctgcctgcacctgaaccgctcactgctgcagcactgcaaacccttccgaggggccaccaagggctgccttcgggccctggccatgaagttcaagaccacacatgcaccgccaggggacacactggtgcatgctggggacctgctcaccgccctgtacttcatctcccggggctccatcgagatcctgcggggcgacgtcgtcgtggccatcctggggaagaatgacatctttggggagcctctgaacctgtatgcaaggcctggcaagtcgaacggggatgtgcgggccctcacctactgtgacctacacaagatccatcgggacgacctgctggaggtgctggacatgtaccctgagttctccgaccacttctggtccagcctggagatcaccttcaacctgcgagataccaacatgatcccgggctcccccggcagtacggagttagagggtggcttcagtcggcaacgcaagcgcaagttgtccttccgcaggcgcacggacaaggacacggagcagccaggggaggtgtcggccttggggccgggccgggcgggggcagggccgagtagccggggccggccgggggggccgtggggggagagcccgtccagtggcccctccagccctgagagcagtgaggatgagggcccaggccgcagctccagccccctccgcctggtgcccttctccagccccaggccccccggagagccgccgggtggggagcccctgatggaggactgcgagaagagcagcgacacttgcaaccccctgtcaggcgccttctcaggagtgtccaacattttcagcttctggggggacagtcggggccgccagtaccaggagctccctcgatgccccgcccccacccccagcctcctcaacatccccctctccagcccgggtcggcggccccggggcgacgtggagagcaggctggatgccctccagcgccagctcaacaggctggagacccggctgagtgcagacatggccactgtcctgcagctgctacagaggcagatgacgctggtcccgcccgcctacagtgctgtgaccaccccggggcctggccccacttccacatccccgctgttgcccgtcagccccctccccaccctcaccttggactcgctttctcaggtttcccagttcatggcgtgtgaggagctgcccccgggggccccagagcttccccaagaaggccccacacgacgcctctccctaccgggccagctgggggccctcacctcccagcccctgcacagacacggctcggacccgggcagttagtggggctgcccagtgtggacacgtggctcacccagggatcaaggcgctgctgggccgctccccttggaggccctgctcaggaggccctgaccgtggaaggggagaggaactcgaaagcacagctcctcccccagcccttgggaccatcttctcctgcagtcccctgggccccagtgagaggggcaggggcagggccggcagtaggtggggcctgtggtccccccactgccctgagggcattagctggtctaactgcccggaggcacccggccctgggccttaggcacctcaaggacttttctgctatttactgctcttattgttaaggataataattaaggatcatatgaataattaatgaagatgctgatgactatgaataataaataattatcctgaggaga

SEQ ID NO: 132 - DNA, 3884 bp, Homo sapiens
  source 1..3884: mol_type = genomic DNA
  misc_feature 1..3884: note = cDNA of KCNH2 gene SNP c.1516A>G (p.Ile506Val)
atgccggtgcggaggggccacgtcgcgccgcagaacaccttcctggacaccatcatccgcaagtttgagggccagagccgtaagttcatcatcgccaacgctcgggtggagaactgcgccgtcatctactgcaacgacggcttctgcgagctgtgcggctactcgcgggccgaggtgatgcagcgaccctgcacctgcgacttcctgcacgggccgcgcacgcagcgccgcgctgccgcgcagatcgcgcaggcactgctgggcgccgaggagcgcaaagtggaaatcgccttctaccggaaagatgggagctgcttcctatgtctggtggatgtggtgcccgtgaagaacgaggatggggctgtcatcatgttcatcctcaatttcgaggtggtgatggagaaggacatggtggggtccccggctcatgacaccaaccaccggggcccccccaccagctggctggccccaggccgcgccaagaccttccgcctgaagctgcccgcgctgctggcgctgacggcccgggagtcgtcggtgcggtcgggcggcgcgggcggcgcgggcgccccgggggccgtggtggtggacgtggacctgacgcccgcggcacccagcagcgagtcgctggccctggacgaagtgacagccatggacaaccacgtggcagggctcgggcccgcggaggagcggcgtgcgctggtgggtcccggctctccgccccgcagcgcgcccggccagctcccatcgccccgggcgcacagcctcaaccccgacgcctcgggctccagctgcagcctggcccggacgcgctcccgagaaagctgcgccagcgtgcgccgcgcctcgtcggccgacgacatcgaggccatgcgcgccggggtgctgcccccgccaccgcgccacgccagcaccggggccatgcacccactgcgcagcggcttgctcaactccacctcggactccgacctcgtgcgctaccgcaccattagcaagattccccaaatcaccctcaactttgtggacctcaagggcgaccccttcttggcttcgcccaccagtgaccgtgagatcatagcacctaagataaaggagcgaacccacaatgtcactgagaaggtcacccaggtcctgtccctgggcgccgacgtgctgcctgagtacaagctgcaggcaccgcgcatccaccgctggaccatcctgcattacagccccttcaaggccgtgtgggactggctcatcctgctgctggtcatctacacggctgtcttcacaccctactcggctgccttcctgctgaaggagacggaagaaggcccgcctgctaccgagtgtggctacgcctgccagccgctggctgtggtggacctcatcgtggacatcatgttcattgtggacatcctcatcaacttccgcaccacctacgtcaatgccaacgaggaggtggtcagccaccccggccgcatcgccgtccactacttcaagggctggttcctcatcgacatggtggccgccgtccccttcgacctgctcatcttcggctctggctctgaggagctgatcgggctgctgaagactgcgcggctgctgcggctggtgcgcgtggcgcggaagctggatcgctactcagagtacggcgcggccgtgctgttcttgctcatgtgcacctttgcgctcatcgcgcactggctagcctgcatctggtacgccatcggcaacatggagcagccacacatggactcacgcatcggctggctgcacaacctgggcgaccagataggcaaaccctacaacagcagcggcctgggcggcccctccatcaaggacaagtatgtgacggcgctctacttcaccttcagcagcctcaccagtgtgggcttcggcaacgtctctcccaacaccaactcagagaagatcttctccatctgcgtcatgctcattggctccctcatgtatgctagcatcttcggcaacgtgtcggccatcatccagcggctgtactcgggcacagcccgctaccacacacagatgctgcgggtgcgggagttcatccgcttccaccagatccccaatcccctgcgccagcgcctcgaggagtacttccagcacgcctggtcctacaccaacggcatcgacatgaacgcggtgctgaagggcttccctgagtgcctgcaggctgacatctgcctgcacctgaaccgctcactgctgcagcactgcaaacccttccgaggggccaccaagggctgccttcgggccctggccatgaagttcaagaccacacatgcaccgccaggggacacactggtgcatgctggggacctgctcaccgccctgtacttcatctcccggggctccatcgagatcctgcggggcgacgtcgtcgtggccatcctggggaagaatgacatctttggggagcctctgaacctgtatgcaaggcctggcaagtcgaacggggatgtgcgggccctcacctactgtgacctacacaagatccatcgggacgacctgctggaggtgctggacatgtaccctgagttctccgaccacttctggtccagcctggagatcaccttcaacctgcgagataccaacatgatcccgggctcccccggcagtacggagttagagggtggcttcagtcggcaacgcaagcgcaagttgtccttccgcaggcgcacggacaaggacacggagcagccaggggaggtgtcggccttggggccgggccgggcgggggcagggccgagtagccggggccggccgggggggccgtggggggagagcccgtccagtggcccctccagccctgagagcagtgaggatgagggcccaggccgcagctccagccccctccgcctggtgcccttctccagccccaggccccccggagagccgccgggtggggagcccctgatggaggactgcgagaagagcagcgacacttgcaaccccctgtcaggcgccttctcaggagtgtccaacattttcagcttctggggggacagtcggggccgccagtaccaggagctccctcgatgccccgcccccacccccagcctcctcaacatccccctctccagcccgggtcggcggccccggggcgacgtggagagcaggctggatgccctccagcgccagctcaacaggctggagacccggctgagtgcagacatggccactgtcctgcagctgctacagaggcagatgacgctggtcccgcccgcctacagtgctgtgaccaccccggggcctggccccacttccacatccccgctgttgcccgtcagccccctccccaccctcaccttggactcgctttctcaggtttcccagttcatggcgtgtgaggagctgcccccgggggccccagagcttccccaagaaggccccacacgacgcctctccctaccgggccagctgggggccctcacctcccagcccctgcacagacacggctcggacccgggcagttagtggggctgcccagtgtggacacgtggctcacccagggatcaaggcgctgctgggccgctccccttggaggccctgctcaggaggccctgaccgtggaaggggagaggaactcgaaagcacagctcctcccccagcccttgggaccatcttctcctgcagtcccctgggccccagtgagaggggcaggggcagggccggcagtaggtggggcctgtggtccccccactgccctgagggcattagctggtctaactgcccggaggcacccggccctgggccttaggcacctcaaggacttttctgctatttactgctcttattgttaaggataataattaaggatcatatgaataattaatgaagatgctgatgactatgaataataaataattatcctgaggaga

SEQ ID NO: 133 - DNA, 3884 bp, Homo sapiens
  source 1..3884: mol_type = genomic DNA
  misc_feature 1..3884: note = cDNA of KCNH2 gene SNP c.1519C>G (p.Pro507Ala)
atgccggtgcggaggggccacgtcgcgccgcagaacaccttcctggacaccatcatccgcaagtttgagggccagagccgtaagttcatcatcgccaacgctcgggtggagaactgcgccgtcatctactgcaacgacggcttctgcgagctgtgcggctactcgcgggccgaggtgatgcagcgaccctgcacctgcgacttcctgcacgggccgcgcacgcagcgccgcgctgccgcgcagatcgcgcaggcactgctgggcgccgaggagcgcaaagtggaaatcgccttctaccggaaagatgggagctgcttcctatgtctggtggatgtggtgcccgtgaagaacgaggatggggctgtcatcatgttcatcctcaatttcgaggtggtgatggagaaggacatggtggggtccccggctcatgacaccaaccaccggggcccccccaccagctggctggccccaggccgcgccaagaccttccgcctgaagctgcccgcgctgctggcgctgacggcccgggagtcgtcggtgcggtcgggcggcgcgggcggcgcgggcgccccgggggccgtggtggtggacgtggacctgacgcccgcggcacccagcagcgagtcgctggccctggacgaagtgacagccatggacaaccacgtggcagggctcgggcccgcggaggagcggcgtgcgctggtgggtcccggctctccgccccgcagcgcgcccggccagctcccatcgccccgggcgcacagcctcaaccccgacgcctcgggctccagctgcagcctggcccggacgcgctcccgagaaagctgcgccagcgtgcgccgcgcctcgtcggccgacgacatcgaggccatgcgcgccggggtgctgcccccgccaccgcgccacgccagcaccggggccatgcacccactgcgcagcggcttgctcaactccacctcggactccgacctcgtgcgctaccgcaccattagcaagattccccaaatcaccctcaactttgtggacctcaagggcgaccccttcttggcttcgcccaccagtgaccgtgagatcatagcacctaagataaaggagcgaacccacaatgtcactgagaaggtcacccaggtcctgtccctgggcgccgacgtgctgcctgagtacaagctgcaggcaccgcgcatccaccgctggaccatcctgcattacagccccttcaaggccgtgtgggactggctcatcctgctgctggtcatctacacggctgtcttcacaccctactcggctgccttcctgctgaaggagacggaagaaggcccgcctgctaccgagtgtggctacgcctgccagccgctggctgtggtggacctcatcgtggacatcatgttcattgtggacatcctcatcaacttccgcaccacctacgtcaatgccaacgaggaggtggtcagccaccccggccgcatcgccgtccactacttcaagggctggttcctcatcgacatggtggccgccatcgccttcgacctgctcatcttcggctctggctctgaggagctgatcgggctgctgaagactgcgcggctgctgcggctggtgcgcgtggcgcggaagctggatcgctactcagagtacggcgcggccgtgctgttcttgctcatgtgcacctttgcgctcatcgcgcactggctagcctgcatctggtacgccatcggcaacatggagcagccacacatggactcacgcatcggctggctgcacaacctgggcgaccagataggcaaaccctacaacagcagcggcctgggcggcccctccatcaaggacaagtatgtgacggcgctctacttcaccttcagcagcctcaccagtgtgggcttcggcaacgtctctcccaacaccaactcagagaagatcttctccatctgcgtcatgctcattggctccctcatgtatgctagcatcttcggcaacgtgtcggccatcatccagcggctgtactcgggcacagcccgctaccacacacagatgctgcgggtgcgggagttcatccgcttccaccagatccccaatcccctgcgccagcgcctcgaggagtacttccagcacgcctggtcctacaccaacggcatcgacatgaacgcggtgctgaagggcttccctgagtgcctgcaggctgacatctgcctgcacctgaaccgctcactgctgcagcactgcaaacccttccgaggggccaccaagggctgccttcgggccctggccatgaagttcaagaccacacatgcaccgccaggggacacactggtgcatgctggggacctgctcaccgccctgtacttcatctcccggggctccatcgagatcctgcggggcgacgtcgtcgtggccatcctggggaagaatgacatctttggggagcctctgaacctgtatgcaaggcctggcaagtcgaacggggatgtgcgggccctcacctactgtgacctacacaagatccatcgggacgacctgctggaggtgctggacatgtaccctgagttctccgaccacttctggtccagcctggagatcaccttcaacctgcgagataccaacatgatcccgggctcccccggcagtacggagttagagggtggcttcagtcggcaacgcaagcgcaagttgtccttccgcaggcgcacggacaaggacacggagcagccaggggaggtgtcggccttggggccgggccgggcgggggcagggccgagtagccggggccggccgggggggccgtggggggagagcccgtccagtggcccctccagccctgagagcagtgaggatgagggcccaggccgcagctccagccccctccgcctggtgcccttctccagccccaggccccccggagagccgccgggtggggagcccctgatggaggactgcgagaagagcagcgacacttgcaaccccctgtcaggcgccttctcaggagtgtccaacattttcagcttctggggggacagtcggggccgccagtaccaggagctccctcgatgccccgcccccacccccagcctcctcaacatccccctctccagcccgggtcggcggccccggggcgacgtggagagcaggctggatgccctccagcgccagctcaacaggctggagacccggctgagtgcagacatggccactgtcctgcagctgctacagaggcagatgacgctggtcccgcccgcctacagtgctgtgaccaccccggggcctggccccacttccacatccccgctgttgcccgtcagccccctccccaccctcaccttggactcgctttctcaggtttcccagttcatggcgtgtgaggagctgcccccgggggccccagagcttccccaagaaggccccacacgacgcctctccctaccgggccagctgggggccctcacctcccagcccctgcacagacacggctcggacccgggcagttagtggggctgcccagtgtggacacgtggctcacccagggatcaaggcgctgctgggccgctccccttggaggccctgctcaggaggccctgaccgtggaaggggagaggaactcgaaagcacagctcctcccccagcccttgggaccatcttctcctgcagtcccctgggccccagtgagaggggcaggggcagggccggcagtaggtggggcctgtggtccccccactgccctgagggcattagctggtctaactgcccggaggcacccggccctgggccttaggcacctcaaggacttttctgctatttactgctcttattgttaaggataataattaaggatcatatgaataattaatgaagatgctgatgactatgaataataaataattatcctgaggaga

SEQ ID NO: 134 - DNA, 3884 bp, Homo sapiens
  source 1..3884: mol_type = genomic DNA
  misc_feature 1..3884: note = cDNA of KCNH2 gene SNP c.1519C>T (p.Pro507Ser)
atgccggtgcggaggggccacgtcgcgccgcagaacaccttcctggacaccatcatccgcaagtttgagggccagagccgtaagttcatcatcgccaacgctcgggtggagaactgcgccgtcatctactgcaacgacggcttctgcgagctgtgcggctactcgcgggccgaggtgatgcagcgaccctgcacctgcgacttcctgcacgggccgcgcacgcagcgccgcgctgccgcgcagatcgcgcaggcactgctgggcgccgaggagcgcaaagtggaaatcgccttctaccggaaagatgggagctgcttcctatgtctggtggatgtggtgcccgtgaagaacgaggatggggctgtcatcatgttcatcctcaatttcgaggtggtgatggagaaggacatggtggggtccccggctcatgacaccaaccaccggggcccccccaccagctggctggccccaggccgcgccaagaccttccgcctgaagctgcccgcgctgctggcgctgacggcccgggagtcgtcggtgcggtcgggcggcgcgggcggcgcgggcgccccgggggccgtggtggtggacgtggacctgacgcccgcggcacccagcagcgagtcgctggccctggacgaagtgacagccatggacaaccacgtggcagggctcgggcccgcggaggagcggcgtgcgctggtgggtcccggctctccgccccgcagcgcgcccggccagctcccatcgccccgggcgcacagcctcaaccccgacgcctcgggctccagctgcagcctggcccggacgcgctcccgagaaagctgcgccagcgtgcgccgcgcctcgtcggccgacgacatcgaggccatgcgcgccggggtgctgcccccgccaccgcgccacgccagcaccggggccatgcacccactgcgcagcggcttgctcaactccacctcggactccgacctcgtgcgctaccgcaccattagcaagattccccaaatcaccctcaactttgtggacctcaagggcgaccccttcttggcttcgcccaccagtgaccgtgagatcatagcacctaagataaaggagcgaacccacaatgtcactgagaaggtcacccaggtcctgtccctgggcgccgacgtgctgcctgagtacaagctgcaggcaccgcgcatccaccgctggaccatcctgcattacagccccttcaaggccgtgtgggactggctcatcctgctgctggtcatctacacggctgtcttcacaccctactcggctgccttcctgctgaaggagacggaagaaggcccgcctgctaccgagtgtggctacgcctgccagccgctggctgtggtggacctcatcgtggacatcatgttcattgtggacatcctcatcaacttccgcaccacctacgtcaatgccaacgaggaggtggtcagccaccccggccgcatcgccgtccactacttcaagggctggttcctcatcgacatggtggccgccatctccttcgacctgctcatcttcggctctggctctgaggagctgatcgggctgctgaagactgcgcggctgctgcggctggtgcgcgtggcgcggaagctggatcgctactcagagtacggcgcggccgtgctgttcttgctcatgtgcacctttgcgctcatcgcgcactggctagcctgcatctggtacgccatcggcaacatggagcagccacacatggactcacgcatcggctggctgcacaacctgggcgaccagataggcaaaccctacaacagcagcggcctgggcggcccctccatcaaggacaagtatgtgacggcgctctacttcaccttcagcagcctcaccagtgtgggcttcggcaacgtctctcccaacaccaactcagagaagatcttctccatctgcgtcatgctcattggctccctcatgtatgctagcatcttcggcaacgtgtcggccatcatccagcggctgtactcgggcacagcccgctaccacacacagatgctgcgggtgcgggagttcatccgcttccaccagatccccaatcccctgcgccagcgcctcgaggagtacttccagcacgcctggtcctacaccaacggcatcgacatgaacgcggtgctgaagggcttccctgagtgcctgcaggctgacatctgcctgcacctgaaccgctcactgctgcagcactgcaaacccttccgaggggccaccaagggctgccttcgggccctggccatgaagttcaagaccacacatgcaccgccaggggacacactggtgcatgctggggacctgctcaccgccctgtacttcatctcccggggctccatcgagatcctgcggggcgacgtcgtcgtggccatcctggggaagaatgacatctttggggagcctctgaacctgtatgcaaggcctggcaagtcgaacggggatgtgcgggccctcacctactgtgacctacacaagatccatcgggacgacctgctggaggtgctggacatgtaccctgagttctccgaccacttctggtccagcctggagatcaccttcaacctgcgagataccaacatgatcccgggctcccccggcagtacggagttagagggtggcttcagtcggcaacgcaagcgcaagttgtccttccgcaggcgcacggacaaggacacggagcagccaggggaggtgtcggccttggggccgggccgggcgggggcagggccgagtagccggggccggccgggggggccgtggggggagagcccgtccagtggcccctccagccctgagagcagtgaggatgagggcccaggccgcagctccagccccctccgcctggtgcccttctccagccccaggccccccggagagccgccgggtggggagcccctgatggaggactgcgagaagagcagcgacacttgcaaccccctgtcaggcgccttctcaggagtgtccaacattttcagcttctggggggacagtcggggccgccagtaccaggagctccctcgatgccccgcccccacccccagcctcctcaacatccccctctccagcccgggtcggcggccccggggcgacgtggagagcaggctggatgccctccagcgccagctcaacaggctggagacccggctgagtgcagacatggccactgtcctgcagctgctacagaggcagatgacgctggtcccgcccgcctacagtgctgtgaccaccccggggcctggccccacttccacatccccgctgttgcccgtcagccccctccccaccctcaccttggactcgctttctcaggtttcccagttcatggcgtgtgaggagctgcccccgggggccccagagcttccccaagaaggccccacacgacgcctctccctaccgggccagctgggggccctcacctcccagcccctgcacagacacggctcggacccgggcagttagtggggctgcccagtgtggacacgtggctcacccagggatcaaggcgctgctgggccgctccccttggaggccctgctcaggaggccctgaccgtggaaggggagaggaactcgaaagcacagctcctcccccagcccttgggaccatcttctcctgcagtcccctgggccccagtgagaggggcaggggcagggccggcagtaggtggggcctgtggtccccccactgccctgagggcattagctggtctaactgcccggaggcacccggccctgggccttaggcacctcaaggacttttctgctatttactgctcttattgttaaggataataattaaggatcatatgaataattaatgaagatgctgatgactatgaataataaataattatcctgaggaga

SEQ ID NO: 135 - DNA, 3884 bp, Homo sapiens
  source 1..3884: mol_type = genomic DNA
  misc_feature 1..3884: note = cDNA of KCNH2 gene SNP c.1520C>T (p.Pro507Leu)
atgccggtgcggaggggccacgtcgcgccgcagaacaccttcctggacaccatcatccgcaagtttgagggccagagccgtaagttcatcatcgccaacgctcgggtggagaactgcgccgtcatctactgcaacgacggcttctgcgagctgtgcggctactcgcgggccgaggtgatgcagcgaccctgcacctgcgacttcctgcacgggccgcgcacgcagcgccgcgctgccgcgcagatcgcgcaggcactgctgggcgccgaggagcgcaaagtggaaatcgccttctaccggaaagatgggagctgcttcctatgtctggtggatgtggtgcccgtgaagaacgaggatggggctgtcatcatgttcatcctcaatttcgaggtggtgatggagaaggacatggtggggtccccggctcatgacaccaaccaccggggcccccccaccagctggctggccccaggccgcgccaagaccttccgcctgaagctgcccgcgctgctggcgctgacggcccgggagtcgtcggtgcggtcgggcggcgcgggcggcgcgggcgccccgggggccgtggtggtggacgtggacctgacgcccgcggcacccagcagcgagtcgctggccctggacgaagtgacagccatggacaaccacgtggcagggctcgggcccgcggaggagcggcgtgcgctggtgggtcccggctctccgccccgcagcgcgcccggccagctcccatcgccccgggcgcacagcctcaaccccgacgcctcgggctccagctgcagcctggcccggacgcgctcccgagaaagctgcgccagcgtgcgccgcgcctcgtcggccgacgacatcgaggccatgcgcgccggggtgctgcccccgccaccgcgccacgccagcaccggggccatgcacccactgcgcagcggcttgctcaactccacctcggactccgacctcgtgcgctaccgcaccattagcaagattccccaaatcaccctcaactttgtggacctcaagggcgaccccttcttggcttcgcccaccagtgaccgtgagatcatagcacctaagataaaggagcgaacccacaatgtcactgagaaggtcacccaggtcctgtccctgggcgccgacgtgctgcctgagtacaagctgcaggcaccgcgcatccaccgctggaccatcctgcattacagccccttcaaggccgtgtgggactggctcatcctgctgctggtcatctacacggctgtcttcacaccctactcggctgccttcctgctgaaggagacggaagaaggcccgcctgctaccgagtgtggctacgcctgccagccgctggctgtggtggacctcatcgtggacatcatgttcattgtggacatcctcatcaacttccgcaccacctacgtcaatgccaacgaggaggtggtcagccaccccggccgcatcgccgtccactacttcaagggctggttcctcatcgacatggtggccgccatcctcttcgacctgctcatcttcggctctggctctgaggagctgatcgggctgctgaagactgcgcggctgctgcggctggtgcgcgtggcgcggaagctggatcgctactcagagtacggcgcggccgtgctgttcttgctcatgtgcacctttgcgctcatcgcgcactggctagcctgcatctggtacgccatcggcaacatggagcagccacacatggactcacgcatcggctggctgcacaacctgggcgaccagataggcaaaccctacaacagcagcggcctgggcggcccctccatcaaggacaagtatgtgacggcgctctacttcaccttcagcagcctcaccagtgtgggcttcggcaacgtctctcccaacaccaactcagagaagatcttctccatctgcgtcatgctcattggctccctcatgtatgctagcatcttcggcaacgtgtcggccatcatccagcggctgtactcgggcacagcccgctaccacacacagatgctgcgggtgcgggagttcatccgcttccaccagatccccaatcccctgcgccagcgcctcgaggagtacttccagcacgcctggtcctacaccaacggcatcgacatgaacgcggtgctgaagggcttccctgagtgcctgcaggctgacatctgcctgcacctgaaccgctcactgctgcagcactgcaaacccttccgaggggccaccaagggctgccttcgggccctggccatgaagttcaagaccacacatgcaccgccaggggacacactggtgcatgctggggacctgctcaccgccctgtacttcatctcccggggctccatcgagatcctgcggggcgacgtcgtcgtggccatcctggggaagaatgacatctttggggagcctctgaacctgtatgcaaggcctggcaagtcgaacggggatgtgcgggccctcacctactgtgacctacacaagatccatcgggacgacctgctggaggtgctggacatgtaccctgagttctccgaccacttctggtccagcctggagatcaccttcaacctgcgagataccaacatgatcccgggctcccccggcagtacggagttagagggtggcttcagtcggcaacgcaagcgcaagttgtccttccgcaggcgcacggacaaggacacggagcagccaggggaggtgtcggccttggggccgggccgggcgggggcagggccgagtagccggggccggccgggggggccgtggggggagagcccgtccagtggcccctccagccctgagagcagtgaggatgagggcccaggccgcagctccagccccctccgcctggtgcccttctccagccccaggccccccggagagccgccgggtggggagcccctgatggaggactgcgagaagagcagcgacacttgcaaccccctgtcaggcgccttctcaggagtgtccaacattttcagcttctggggggacagtcggggccgccagtaccaggagctccctcgatgccccgcccccacccccagcctcctcaacatccccctctccagcccgggtcggcggccccggggcgacgtggagagcaggctggatgccctccagcgccagctcaacaggctggagacccggctgagtgcagacatggccactgtcctgcagctgctacagaggcagatgacgctggtcccgcccgcctacagtgctgtgaccaccccggggcctggccccacttccacatccccgctgttgcccgtcagccccctccccaccctcaccttggactcgctttctcaggtttcccagttcatggcgtgtgaggagctgcccccgggggccccagagcttccccaagaaggccccacacgacgcctctccctaccgggccagctgggggccctcacctcccagcccctgcacagacacggctcggacccgggcagttagtggggctgcccagtgtggacacgtggctcacccagggatcaaggcgctgctgggccgctccccttggaggccctgctcaggaggccctgaccgtggaaggggagaggaactcgaaagcacagctcctcccccagcccttgggaccatcttctcctgcagtcccctgggccccagtgagaggggcaggggcagggccggcagtaggtggggcctgtggtccccccactgccctgagggcattagctggtctaactgcccggaggcacccggccctgggccttaggcacctcaaggacttttctgctatttactgctcttattgttaaggataataattaaggatcatatgaataattaatgaagatgctgatgactatgaataataaataattatcctgaggaga

SEQ ID NO: 136 - DNA, 3884 bp, Homo sapiens
  source 1..3884: mol_type = genomic DNA
  misc_feature 1..3884: note = cDNA of KCNH2 gene SNP c.1525G>A (p.Asp509Asn)
atgccggtgcggaggggccacgtcgcgccgcagaacaccttcctggacaccatcatccgcaagtttgagggccagagccgtaagttcatcatcgccaacgctcgggtggagaactgcgccgtcatctactgcaacgacggcttctgcgagctgtgcggctactcgcgggccgaggtgatgcagcgaccctgcacctgcgacttcctgcacgggccgcgcacgcagcgccgcgctgccgcgcagatcgcgcaggcactgctgggcgccgaggagcgcaaagtggaaatcgccttctaccggaaagatgggagctgcttcctatgtctggtggatgtggtgcccgtgaagaacgaggatggggctgtcatcatgttcatcctcaatttcgaggtggtgatggagaaggacatggtggggtccccggctcatgacaccaaccaccggggcccccccaccagctggctggccccaggccgcgccaagaccttccgcctgaagctgcccgcgctgctggcgctgacggcccgggagtcgtcggtgcggtcgggcggcgcgggcggcgcgggcgccccgggggccgtggtggtggacgtggacctgacgcccgcggcacccagcagcgagtcgctggccctggacgaagtgacagccatggacaaccacgtggcagggctcgggcccgcggaggagcggcgtgcgctggtgggtcccggctctccgccccgcagcgcgcccggccagctcccatcgccccgggcgcacagcctcaaccccgacgcctcgggctccagctgcagcctggcccggacgcgctcccgagaaagctgcgccagcgtgcgccgcgcctcgtcggccgacgacatcgaggccatgcgcgccggggtgctgcccccgccaccgcgccacgccagcaccggggccatgcacccactgcgcagcggcttgctcaactccacctcggactccgacctcgtgcgctaccgcaccattagcaagattccccaaatcaccctcaactttgtggacctcaagggcgaccccttcttggcttcgcccaccagtgaccgtgagatcatagcacctaagataaaggagcgaacccacaatgtcactgagaaggtcacccaggtcctgtccctgggcgccgacgtgctgcctgagtacaagctgcaggcaccgcgcatccaccgctggaccatcctgcattacagccccttcaaggccgtgtgggactggctcatcctgctgctggtcatctacacggctgtcttcacaccctactcggctgccttcctgctgaaggagacggaagaaggcccgcctgctaccgagtgtggctacgcctgccagccgctggctgtggtggacctcatcgtggacatcatgttcattgtggacatcctcatcaacttccgcaccacctacgtcaatgccaacgaggaggtggtcagccaccccggccgcatcgccgtccactacttcaagggctggttcctcatcgacatggtggccgccatccccttcaacctgctcatcttcggctctggctctgaggagctgatcgggctgctgaagactgcgcggctgctgcggctggtgcgcgtggcgcggaagctggatcgctactcagagtacggcgcggccgtgctgttcttgctcatgtgcacctttgcgctcatcgcgcactggctagcctgcatctggtacgccatcggcaacatggagcagccacacatggactcacgcatcggctggctgcacaacctgggcgaccagataggcaaaccctacaacagcagcggcctgggcggcccctccatcaaggacaagtatgtgacggcgctctacttcaccttcagcagcctcaccagtgtgggcttcggcaacgtctctcccaacaccaactcagagaagatcttctccatctgcgtcatgctcattggctccctcatgtatgctagcatcttcggcaacgtgtcggccatcatccagcggctgtactcgggcacagcccgctaccacacacagatgctgcgggtgcgggagttcatccgcttccaccagatccccaatcccctgcgccagcgcctcgaggagtacttccagcacgcctggtcctacaccaacggcatcgacatgaacgcggtgctgaagggcttccctgagtgcctgcaggctgacatctgcctgcacctgaaccgctcactgctgcagcactgcaaacccttccgaggggccaccaagggctgccttcgggccctggccatgaagttcaagaccacacatgcaccgccaggggacacactggtgcatgctggggacctgctcaccgccctgtacttcatctcccggggctccatcgagatcctgcggggcgacgtcgtcgtggccatcctggggaagaatgacatctttggggagcctctgaacctgtatgcaaggcctggcaagtcgaacggggatgtgcgggccctcacctactgtgacctacacaagatccatcgggacgacctgctggaggtgctggacatgtaccctgagttctccgaccacttctggtccagcctggagatcaccttcaacctgcgagataccaacatgatcccgggctcccccggcagtacggagttagagggtggcttcagtcggcaacgcaagcgcaagttgtccttccgcaggcgcacggacaaggacacggagcagccaggggaggtgtcggccttggggccgggccgggcgggggcagggccgagtagccggggccggccgggggggccgtggggggagagcccgtccagtggcccctccagccctgagagcagtgaggatgagggcccaggccgcagctccagccccctccgcctggtgcccttctccagccccaggccccccggagagccgccgggtggggagcccctgatggaggactgcgagaagagcagcgacacttgcaaccccctgtcaggcgccttctcaggagtgtccaacattttcagcttctggggggacagtcggggccgccagtaccaggagctccctcgatgccccgcccccacccccagcctcctcaacatccccctctccagcccgggtcggcggccccggggcgacgtggagagcaggctggatgccctccagcgccagctcaacaggctggagacccggctgagtgcagacatggccactgtcctgcagctgctacagaggcagatgacgctggtcccgcccgcctacagtgctgtgaccaccccggggcctggccccacttccacatccccgctgttgcccgtcagccccctccccaccctcaccttggactcgctttctcaggtttcccagttcatggcgtgtgaggagctgcccccgggggccccagagcttccccaagaaggccccacacgacgcctctccctaccgggccagctgggggccctcacctcccagcccctgcacagacacggctcggacccgggcagttagtggggctgcccagtgtggacacgtggctcacccagggatcaaggcgctgctgggccgctccccttggaggccctgctcaggaggccctgaccgtggaaggggagaggaactcgaaagcacagctcctcccccagcccttgggaccatcttctcctgcagtcccctgggccccagtgagaggggcaggggcagggccggcagtaggtggggcctgtggtccccccactgccctgagggcattagctggtctaactgcccggaggcacccggccctgggccttaggcacctcaaggacttttctgctatttactgctcttattgttaaggataataattaaggatcatatgaataattaatgaagatgctgatgactatgaataataaataattatcctgaggaga

SEQ ID NO: 137 - DNA, 3884 bp, Homo sapiens
  source 1..3884: mol_type = genomic DNA
  misc_feature 1..3884: note = cDNA of KCNH2 gene SNP c.1537T>C (p.Phe513Leu)
atgccggtgcggaggggccacgtcgcgccgcagaacaccttcctggacaccatcatccgcaagtttgagggccagagccgtaagttcatcatcgccaacgctcgggtggagaactgcgccgtcatctactgcaacgacggcttctgcgagctgtgcggctactcgcgggccgaggtgatgcagcgaccctgcacctgcgacttcctgcacgggccgcgcacgcagcgccgcgctgccgcgcagatcgcgcaggcactgctgggcgccgaggagcgcaaagtggaaatcgccttctaccggaaagatgggagctgcttcctatgtctggtggatgtggtgcccgtgaagaacgaggatggggctgtcatcatgttcatcctcaatttcgaggtggtgatggagaaggacatggtggggtccccggctcatgacaccaaccaccggggcccccccaccagctggctggccccaggccgcgccaagaccttccgcctgaagctgcccgcgctgctggcgctgacggcccgggagtcgtcggtgcggtcgggcggcgcgggcggcgcgggcgccccgggggccgtggtggtggacgtggacctgacgcccgcggcacccagcagcgagtcgctggccctggacgaagtgacagccatggacaaccacgtggcagggctcgggcccgcggaggagcggcgtgcgctggtgggtcccggctctccgccccgcagcgcgcccggccagctcccatcgccccgggcgcacagcctcaaccccgacgcctcgggctccagctgcagcctggcccggacgcgctcccgagaaagctgcgccagcgtgcgccgcgcctcgtcggccgacgacatcgaggccatgcgcgccggggtgctgcccccgccaccgcgccacgccagcaccggggccatgcacccactgcgcagcggcttgctcaactccacctcggactccgacctcgtgcgctaccgcaccattagcaagattccccaaatcaccctcaactttgtggacctcaagggcgaccccttcttggcttcgcccaccagtgaccgtgagatcatagcacctaagataaaggagcgaacccacaatgtcactgagaaggtcacccaggtcctgtccctgggcgccgacgtgctgcctgagtacaagctgcaggcaccgcgcatccaccgctggaccatcctgcattacagccccttcaaggccgtgtgggactggctcatcctgctgctggtcatctacacggctgtcttcacaccctactcggctgccttcctgctgaaggagacggaagaaggcccgcctgctaccgagtgtggctacgcctgccagccgctggctgtggtggacctcatcgtggacatcatgttcattgtggacatcctcatcaacttccgcaccacctacgtcaatgccaacgaggaggtggtcagccaccccggccgcatcgccgtccactacttcaagggctggttcctcatcgacatggtggccgccatccccttcgacctgctcatcctcggctctggctctgaggagctgatcgggctgctgaagactgcgcggctgctgcggctggtgcgcgtggcgcggaagctggatcgctactcagagtacggcgcggccgtgctgttcttgctcatgtgcacctttgcgctcatcgcgcactggctagcctgcatctggtacgccatcggcaacatggagcagccacacatggactcacgcatcggctggctgcacaacctgggcgaccagataggcaaaccctacaacagcagcggcctgggcggcccctccatcaaggacaagtatgtgacggcgctctacttcaccttcagcagcctcaccagtgtgggcttcggcaacgtctctcccaacaccaactcagagaagatcttctccatctgcgtcatgctcattggctccctcatgtatgctagcatcttcggcaacgtgtcggccatcatccagcggctgtactcgggcacagcccgctaccacacacagatgctgcgggtgcgggagttcatccgcttccaccagatccccaatcccctgcgccagcgcctcgaggagtacttccagcacgcctggtcctacaccaacggcatcgacatgaacgcggtgctgaagggcttccctgagtgcctgcaggctgacatctgcctgcacctgaaccgctcactgctgcagcactgcaaacccttccgaggggccaccaagggctgccttcgggccctggccatgaagttcaagaccacacatgcaccgccaggggacacactggtgcatgctggggacctgctcaccgccctgtacttcatctcccggggctccatcgagatcctgcggggcgacgtcgtcgtggccatcctggggaagaatgacatctttggggagcctctgaacctgtatgcaaggcctggcaagtcgaacggggatgtgcgggccctcacctactgtgacctacacaagatccatcgggacgacctgctggaggtgctggacatgtaccctgagttctccgaccacttctggtccagcctggagatcaccttcaacctgcgagataccaacatgatcccgggctcccccggcagtacggagttagagggtggcttcagtcggcaacgcaagcgcaagttgtccttccgcaggcgcacggacaaggacacggagcagccaggggaggtgtcggccttggggccgggccgggcgggggcagggccgagtagccggggccggccgggggggccgtggggggagagcccgtccagtggcccctccagccctgagagcagtgaggatgagggcccaggccgcagctccagccccctccgcctggtgcccttctccagccccaggccccccggagagccgccgggtggggagcccctgatggaggactgcgagaagagcagcgacacttgcaaccccctgtcaggcgccttctcaggagtgtccaacattttcagcttctggggggacagtcggggccgccagtaccaggagctccctcgatgccccgcccccacccccagcctcctcaacatccccctctccagcccgggtcggcggccccggggcgacgtggagagcaggctggatgccctccagcgccagctcaacaggctggagacccggctgagtgcagacatggccactgtcctgcagctgctacagaggcagatgacgctggtcccgcccgcctacagtgctgtgaccaccccggggcctggccccacttccacatccccgctgttgcccgtcagccccctccccaccctcaccttggactcgctttctcaggtttcccagttcatggcgtgtgaggagctgcccccgggggccccagagcttccccaagaaggccccacacgacgcctctccctaccgggccagctgggggccctcacctcccagcccctgcacagacacggctcggacccgggcagttagtggggctgcccagtgtggacacgtggctcacccagggatcaaggcgctgctgggccgctccccttggaggccctgctcaggaggccctgaccgtggaaggggagaggaactcgaaagcacagctcctcccccagcccttgggaccatcttctcctgcagtcccctgggccccagtgagaggggcaggggcagggccggcagtaggtggggcctgtggtccccccactgccctgagggcattagctggtctaactgcccggaggcacccggccctgggccttaggcacctcaaggacttttctgctatttactgctcttattgttaaggataataattaaggatcatatgaataattaatgaagatgctgatgactatgaataataaataattatcctgaggaga

SEQ ID NO: 138 - DNA, 3884 bp, Homo sapiens
  source 1..3884: mol_type = genomic DNA
  misc_feature 1..3884: note = cDNA of KCNH2 gene SNP c.1564G>A (p.Gly522Arg)
atgccggtgcggaggggccacgtcgcgccgcagaacaccttcctggacaccatcatccgcaagtttgagggccagagccgtaagttcatcatcgccaacgctcgggtggagaactgcgccgtcatctactgcaacgacggcttctgcgagctgtgcggctactcgcgggccgaggtgatgcagcgaccctgcacctgcgacttcctgcacgggccgcgcacgcagcgccgcgctgccgcgcagatcgcgcaggcactgctgggcgccgaggagcgcaaagtggaaatcgccttctaccggaaagatgggagctgcttcctatgtctggtggatgtggtgcccgtgaagaacgaggatggggctgtcatcatgttcatcctcaatttcgaggtggtgatggagaaggacatggtggggtccccggctcatgacaccaaccaccggggcccccccaccagctggctggccccaggccgcgccaagaccttccgcctgaagctgcccgcgctgctggcgctgacggcccgggagtcgtcggtgcggtcgggcggcgcgggcggcgcgggcgccccgggggccgtggtggtggacgtggacctgacgcccgcggcacccagcagcgagtcgctggccctggacgaagtgacagccatggacaaccacgtggcagggctcgggcccgcggaggagcggcgtgcgctggtgggtcccggctctccgccccgcagcgcgcccggccagctcccatcgccccgggcgcacagcctcaaccccgacgcctcgggctccagctgcagcctggcccggacgcgctcccgagaaagctgcgccagcgtgcgccgcgcctcgtcggccgacgacatcgaggccatgcgcgccggggtgctgcccccgccaccgcgccacgccagcaccggggccatgcacccactgcgcagcggcttgctcaactccacctcggactccgacctcgtgcgctaccgcaccattagcaagattccccaaatcaccctcaactttgtggacctcaagggcgaccccttcttggcttcgcccaccagtgaccgtgagatcatagcacctaagataaaggagcgaacccacaatgtcactgagaaggtcacccaggtcctgtccctgggcgccgacgtgctgcctgagtacaagctgcaggcaccgcgcatccaccgctggaccatcctgcattacagccccttcaaggccgtgtgggactggctcatcctgctgctggtcatctacacggctgtcttcacaccctactcggctgccttcctgctgaaggagacggaagaaggcccgcctgctaccgagtgtggctacgcctgccagccgctggctgtggtggacctcatcgtggacatcatgttcattgtggacatcctcatcaacttccgcaccacctacgtcaatgccaacgaggaggtggtcagccaccccggccgcatcgccgtccactacttcaagggctggttcctcatcgacatggtggccgccatccccttcgacctgctcatcttcggctctggctctgaggagctgatcaggctgctgaagactgcgcggctgctgcggctggtgcgcgtggcgcggaagctggatcgctactcagagtacggcgcggccgtgctgttcttgctcatgtgcacctttgcgctcatcgcgcactggctagcctgcatctggtacgccatcggcaacatggagcagccacacatggactcacgcatcggctggctgcacaacctgggcgaccagataggcaaaccctacaacagcagcggcctgggcggcccctccatcaaggacaagtatgtgacggcgctctacttcaccttcagcagcctcaccagtgtgggcttcggcaacgtctctcccaacaccaactcagagaagatcttctccatctgcgtcatgctcattggctccctcatgtatgctagcatcttcggcaacgtgtcggccatcatccagcggctgtactcgggcacagcccgctaccacacacagatgctgcgggtgcgggagttcatccgcttccaccagatccccaatcccctgcgccagcgcctcgaggagtacttccagcacgcctggtcctacaccaacggcatcgacatgaacgcggtgctgaagggcttccctgagtgcctgcaggctgacatctgcctgcacctgaaccgctcactgctgcagcactgcaaacccttccgaggggccaccaagggctgccttcgggccctggccatgaagttcaagaccacacatgcaccgccaggggacacactggtgcatgctggggacctgctcaccgccctgtacttcatctcccggggctccatcgagatcctgcggggcgacgtcgtcgtggccatcctggggaagaatgacatctttggggagcctctgaacctgtatgcaaggcctggcaagtcgaacggggatgtgcgggccctcacctactgtgacctacacaagatccatcgggacgacctgctggaggtgctggacatgtaccctgagttctccgaccacttctggtccagcctggagatcaccttcaacctgcgagataccaacatgatcccgggctcccccggcagtacggagttagagggtggcttcagtcggcaacgcaagcgcaagttgtccttccgcaggcgcacggacaaggacacggagcagccaggggaggtgtcggccttggggccgggccgggcgggggcagggccgagtagccggggccggccgggggggccgtggggggagagcccgtccagtggcccctccagccctgagagcagtgaggatgagggcccaggccgcagctccagccccctccgcctggtgcccttctccagccccaggccccccggagagccgccgggtggggagcccctgatggaggactgcgagaagagcagcgacacttgcaaccccctgtcaggcgccttctcaggagtgtccaacattttcagcttctggggggacagtcggggccgccagtaccaggagctccctcgatgccccgcccccacccccagcctcctcaacatccccctctccagcccgggtcggcggccccggggcgacgtggagagcaggctggatgccctccagcgccagctcaacaggctggagacccggctgagtgcagacatggccactgtcctgcagctgctacagaggcagatgacgctggtcccgcccgcctacagtgctgtgaccaccccggggcctggccccacttccacatccccgctgttgcccgtcagccccctccccaccctcaccttggactcgctttctcaggtttcccagttcatggcgtgtgaggagctgcccccgggggccccagagcttccccaagaaggccccacacgacgcctctccctaccgggccagctgggggccctcacctcccagcccctgcacagacacggctcggacccgggcagttagtggggctgcccagtgtggacacgtggctcacccagggatcaaggcgctgctgggccgctccccttggaggccctgctcaggaggccctgaccgtggaaggggagaggaactcgaaagcacagctcctcccccagcccttgggaccatcttctcctgcagtcccctgggccccagtgagaggggcaggggcagggccggcagtaggtggggcctgtggtccccccactgccctgagggcattagctggtctaactgcccggaggcacccggccctgggccttaggcacctcaaggacttttctgctatttactgctcttattgttaaggataataattaaggatcatatgaataattaatgaagatgctgatgactatgaataataaataattatcctgaggaga

SEQ ID NO: 139 - DNA, 3884 bp, Homo sapiens
  source 1..3884: mol_type = genomic DNA
  misc_feature 1..3884: note = cDNA of KCNH2 gene SNP c.1567C>A (p.Leu523Met)
atgccggtgcggaggggccacgtcgcgccgcagaacaccttcctggacaccatcatccgcaagtttgagggccagagccgtaagttcatcatcgccaacgctcgggtggagaactgcgccgtcatctactgcaacgacggcttctgcgagctgtgcggctactcgcgggccgaggtgatgcagcgaccctgcacctgcgacttcctgcacgggccgcgcacgcagcgccgcgctgccgcgcagatcgcgcaggcactgctgggcgccgaggagcgcaaagtggaaatcgccttctaccggaaagatgggagctgcttcctatgtctggtggatgtggtgcccgtgaagaacgaggatggggctgtcatcatgttcatcctcaatttcgaggtggtgatggagaaggacatggtggggtccccggctcatgacaccaaccaccggggcccccccaccagctggctggccccaggccgcgccaagaccttccgcctgaagctgcccgcgctgctggcgctgacggcccgggagtcgtcggtgcggtcgggcggcgcgggcggcgcgggcgccccgggggccgtggtggtggacgtggacctgacgcccgcggcacccagcagcgagtcgctggccctggacgaagtgacagccatggacaaccacgtggcagggctcgggcccgcggaggagcggcgtgcgctggtgggtcccggctctccgccccgcagcgcgcccggccagctcccatcgccccgggcgcacagcctcaaccccgacgcctcgggctccagctgcagcctggcccggacgcgctcccgagaaagctgcgccagcgtgcgccgcgcctcgtcggccgacgacatcgaggccatgcgcgccggggtgctgcccccgccaccgcgccacgccagcaccggggccatgcacccactgcgcagcggcttgctcaactccacctcggactccgacctcgtgcgctaccgcaccattagcaagattccccaaatcaccctcaactttgtggacctcaagggcgaccccttcttggcttcgcccaccagtgaccgtgagatcatagcacctaagataaaggagcgaacccacaatgtcactgagaaggtcacccaggtcctgtccctgggcgccgacgtgctgcctgagtacaagctgcaggcaccgcgcatccaccgctggaccatcctgcattacagccccttcaaggccgtgtgggactggctcatcctgctgctggtcatctacacggctgtcttcacaccctactcggctgccttcctgctgaaggagacggaagaaggcccgcctgctaccgagtgtggctacgcctgccagccgctggctgtggtggacctcatcgtggacatcatgttcattgtggacatcctcatcaacttccgcaccacctacgtcaatgccaacgaggaggtggtcagccaccccggccgcatcgccgtccactacttcaagggctggttcctcatcgacatggtggccgccatccccttcgacctgctcatcttcggctctggctctgaggagctgatcgggatgctgaagactgcgcggctgctgcggctggtgcgcgtggcgcggaagctggatcgctactcagagtacggcgcggccgtgctgttcttgctcatgtgcacctttgcgctcatcgcgcactggctagcctgcatctggtacgccatcggcaacatggagcagccacacatggactcacgcatcggctggctgcacaacctgggcgaccagataggcaaaccctacaacagcagcggcctgggcggcccctccatcaaggacaagtatgtgacggcgctctacttcaccttcagcagcctcaccagtgtgggcttcggcaacgtctctcccaacaccaactcagagaagatcttctccatctgcgtcatgctcattggctccctcatgtatgctagcatcttcggcaacgtgtcggccatcatccagcggctgtactcgggcacagcccgctaccacacacagatgctgcgggtgcgggagttcatccgcttccaccagatccccaatcccctgcgccagcgcctcgaggagtacttccagcacgcctggtcctacaccaacggcatcgacatgaacgcggtgctgaagggcttccctgagtgcctgcaggctgacatctgcctgcacctgaaccgctcactgctgcagcactgcaaacccttccgaggggccaccaagggctgccttcgggccctggccatgaagttcaagaccacacatgcaccgccaggggacacactggtgcatgctggggacctgctcaccgccctgtacttcatctcccggggctccatcgagatcctgcggggcgacgtcgtcgtggccatcctggggaagaatgacatctttggggagcctctgaacctgtatgcaaggcctggcaagtcgaacggggatgtgcgggccctcacctactgtgacctacacaagatccatcgggacgacctgctggaggtgctggacatgtaccctgagttctccgaccacttctggtccagcctggagatcaccttcaacctgcgagataccaacatgatcccgggctcccccggcagtacggagttagagggtggcttcagtcggcaacgcaagcgcaagttgtccttccgcaggcgcacggacaaggacacggagcagccaggggaggtgtcggccttggggccgggccgggcgggggcagggccgagtagccggggccggccgggggggccgtggggggagagcccgtccagtggcccctccagccctgagagcagtgaggatgagggcccaggccgcagctccagccccctccgcctggtgcccttctccagccccaggccccccggagagccgccgggtggggagcccctgatggaggactgcgagaagagcagcgacacttgcaaccccctgtcaggcgccttctcaggagtgtccaacattttcagcttctggggggacagtcggggccgccagtaccaggagctccctcgatgccccgcccccacccccagcctcctcaacatccccctctccagcccgggtcggcggccccggggcgacgtggagagcaggctggatgccctccagcgccagctcaacaggctggagacccggctgagtgcagacatggccactgtcctgcagctgctacagaggcagatgacgctggtcccgcccgcctacagtgctgtgaccaccccggggcctggccccacttccacatccccgctgttgcccgtcagccccctccccaccctcaccttggactcgctttctcaggtttcccagttcatggcgtgtgaggagctgcccccgggggccccagagcttccccaagaaggccccacacgacgcctctccctaccgggccagctgggggccctcacctcccagcccctgcacagacacggctcggacccgggcagttagtggggctgcccagtgtggacacgtggctcacccagggatcaaggcgctgctgggccgctccccttggaggccctgctcaggaggccctgaccgtggaaggggagaggaactcgaaagcacagctcctcccccagcccttgggaccatcttctcctgcagtcccctgggccccagtgagaggggcaggggcagggccggcagtaggtggggcctgtggtccccccactgccctgagggcattagctggtctaactgcccggaggcacccggccctgggccttaggcacctcaaggacttttctgctatttactgctcttattgttaaggataataattaaggatcatatgaataattaatgaagatgctgatgactatgaataataaataattatcctgaggaga

SEQ ID NO: 140 - DNA, 3884 bp, Homo sapiens
  source 1..3884: mol_type = genomic DNA
  misc_feature 1..3884: note = cDNA of KCNH2 gene SNP c.156C>A (p.Cys52Ter)
atgccggtgcggaggggccacgtcgcgccgcagaacaccttcctggacaccatcatccgcaagtttgagggccagagccgtaagttcatcatcgccaacgctcgggtggagaactgcgccgtcatctactgcaacgacggcttctgcgagctgtgaggctactcgcgggccgaggtgatgcagcgaccctgcacctgcgacttcctgcacgggccgcgcacgcagcgccgcgctgccgcgcagatcgcgcaggcactgctgggcgccgaggagcgcaaagtggaaatcgccttctaccggaaagatgggagctgcttcctatgtctggtggatgtggtgcccgtgaagaacgaggatggggctgtcatcatgttcatcctcaatttcgaggtggtgatggagaaggacatggtggggtccccggctcatgacaccaaccaccggggcccccccaccagctggctggccccaggccgcgccaagaccttccgcctgaagctgcccgcgctgctggcgctgacggcccgggagtcgtcggtgcggtcgggcggcgcgggcggcgcgggcgccccgggggccgtggtggtggacgtggacctgacgcccgcggcacccagcagcgagtcgctggccctggacgaagtgacagccatggacaaccacgtggcagggctcgggcccgcggaggagcggcgtgcgctggtgggtcccggctctccgccccgcagcgcgcccggccagctcccatcgccccgggcgcacagcctcaaccccgacgcctcgggctccagctgcagcctggcccggacgcgctcccgagaaagctgcgccagcgtgcgccgcgcctcgtcggccgacgacatcgaggccatgcgcgccggggtgctgcccccgccaccgcgccacgccagcaccggggccatgcacccactgcgcagcggcttgctcaactccacctcggactccgacctcgtgcgctaccgcaccattagcaagattccccaaatcaccctcaactttgtggacctcaagggcgaccccttcttggcttcgcccaccagtgaccgtgagatcatagcacctaagataaaggagcgaacccacaatgtcactgagaaggtcacccaggtcctgtccctgggcgccgacgtgctgcctgagtacaagctgcaggcaccgcgcatccaccgctggaccatcctgcattacagccccttcaaggccgtgtgggactggctcatcctgctgctggtcatctacacggctgtcttcacaccctactcggctgccttcctgctgaaggagacggaagaaggcccgcctgctaccgagtgtggctacgcctgccagccgctggctgtggtggacctcatcgtggacatcatgttcattgtggacatcctcatcaacttccgcaccacctacgtcaatgccaacgaggaggtggtcagccaccccggccgcatcgccgtccactacttcaagggctggttcctcatcgacatggtggccgccatccccttcgacctgctcatcttcggctctggctctgaggagctgatcgggctgctgaagactgcgcggctgctgcggctggtgcgcgtggcgcggaagctggatcgctactcagagtacggcgcggccgtgctgttcttgctcatgtgcacctttgcgctcatcgcgcactggctagcctgcatctggtacgccatcggcaacatggagcagccacacatggactcacgcatcggctggctgcacaacctgggcgaccagataggcaaaccctacaacagcagcggcctgggcggcccctccatcaaggacaagtatgtgacggcgctctacttcaccttcagcagcctcaccagtgtgggcttcggcaacgtctctcccaacaccaactcagagaagatcttctccatctgcgtcatgctcattggctccctcatgtatgctagcatcttcggcaacgtgtcggccatcatccagcggctgtactcgggcacagcccgctaccacacacagatgctgcgggtgcgggagttcatccgcttccaccagatccccaatcccctgcgccagcgcctcgaggagtacttccagcacgcctggtcctacaccaacggcatcgacatgaacgcggtgctgaagggcttccctgagtgcctgcaggctgacatctgcctgcacctgaaccgctcactgctgcagcactgcaaacccttccgaggggccaccaagggctgccttcgggccctggccatgaagttcaagaccacacatgcaccgccaggggacacactggtgcatgctggggacctgctcaccgccctgtacttcatctcccggggctccatcgagatcctgcggggcgacgtcgtcgtggccatcctggggaagaatgacatctttggggagcctctgaacctgtatgcaaggcctggcaagtcgaacggggatgtgcgggccctcacctactgtgacctacacaagatccatcgggacgacctgctggaggtgctggacatgtaccctgagttctccgaccacttctggtccagcctggagatcaccttcaacctgcgagataccaacatgatcccgggctcccccggcagtacggagttagagggtggcttcagtcggcaacgcaagcgcaagttgtccttccgcaggcgcacggacaaggacacggagcagccaggggaggtgtcggccttggggccgggccgggcgggggcagggccgagtagccggggccggccgggggggccgtggggggagagcccgtccagtggcccctccagccctgagagcagtgaggatgagggcccaggccgcagctccagccccctccgcctggtgcccttctccagccccaggccccccggagagccgccgggtggggagcccctgatggaggactgcgagaagagcagcgacacttgcaaccccctgtcaggcgccttctcaggagtgtccaacattttcagcttctggggggacagtcggggccgccagtaccaggagctccctcgatgccccgcccccacccccagcctcctcaacatccccctctccagcccgggtcggcggccccggggcgacgtggagagcaggctggatgccctccagcgccagctcaacaggctggagacccggctgagtgcagacatggccactgtcctgcagctgctacagaggcagatgacgctggtcccgcccgcctacagtgctgtgaccaccccggggcctggccccacttccacatccccgctgttgcccgtcagccccctccccaccctcaccttggactcgctttctcaggtttcccagttcatggcgtgtgaggagctgcccccgggggccccagagcttccccaagaaggccccacacgacgcctctccctaccgggccagctgggggccctcacctcccagcccctgcacagacacggctcggacccgggcagttagtggggctgcccagtgtggacacgtggctcacccagggatcaaggcgctgctgggccgctccccttggaggccctgctcaggaggccctgaccgtggaaggggagaggaactcgaaagcacagctcctcccccagcccttgggaccatcttctcctgcagtcccctgggccccagtgagaggggcaggggcagggccggcagtaggtggggcctgtggtccccccactgccctgagggcattagctggtctaactgcccggaggcacccggccctgggccttaggcacctcaaggacttttctgctatttactgctcttattgttaaggataataattaaggatcatatgaataattaatgaagatgctgatgactatgaataataaataattatcctgaggaga

SEQ ID NO: 141 - DNA, 3884 bp, Homo sapiens
  source 1..3884: mol_type = genomic DNA
  misc_feature 1..3884: note = cDNA of KCNH2 gene SNP c.156C>G (p.Cys52Trp)
atgccggtgcggaggggccacgtcgcgccgcagaacaccttcctggacaccatcatccgcaagtttgagggccagagccgtaagttcatcatcgccaacgctcgggtggagaactgcgccgtcatctactgcaacgacggcttctgcgagctgtggggctactcgcgggccgaggtgatgcagcgaccctgcacctgcgacttcctgcacgggccgcgcacgcagcgccgcgctgccgcgcagatcgcgcaggcactgctgggcgccgaggagcgcaaagtggaaatcgccttctaccggaaagatgggagctgcttcctatgtctggtggatgtggtgcccgtgaagaacgaggatggggctgtcatcatgttcatcctcaatttcgaggtggtgatggagaaggacatggtggggtccccggctcatgacaccaaccaccggggcccccccaccagctggctggccccaggccgcgccaagaccttccgcctgaagctgcccgcgctgctggcgctgacggcccgggagtcgtcggtgcggtcgggcggcgcgggcggcgcgggcgccccgggggccgtggtggtggacgtggacctgacgcccgcggcacccagcagcgagtcgctggccctggacgaagtgacagccatggacaaccacgtggcagggctcgggcccgcggaggagcggcgtgcgctggtgggtcccggctctccgccccgcagcgcgcccggccagctcccatcgccccgggcgcacagcctcaaccccgacgcctcgggctccagctgcagcctggcccggacgcgctcccgagaaagctgcgccagcgtgcgccgcgcctcgtcggccgacgacatcgaggccatgcgcgccggggtgctgcccccgccaccgcgccacgccagcaccggggccatgcacccactgcgcagcggcttgctcaactccacctcggactccgacctcgtgcgctaccgcaccattagcaagattccccaaatcaccctcaactttgtggacctcaagggcgaccccttcttggcttcgcccaccagtgaccgtgagatcatagcacctaagataaaggagcgaacccacaatgtcactgagaaggtcacccaggtcctgtccctgggcgccgacgtgctgcctgagtacaagctgcaggcaccgcgcatccaccgctggaccatcctgcattacagccccttcaaggccgtgtgggactggctcatcctgctgctggtcatctacacggctgtcttcacaccctactcggctgccttcctgctgaaggagacggaagaaggcccgcctgctaccgagtgtggctacgcctgccagccgctggctgtggtggacctcatcgtggacatcatgttcattgtggacatcctcatcaacttccgcaccacctacgtcaatgccaacgaggaggtggtcagccaccccggccgcatcgccgtccactacttcaagggctggttcctcatcgacatggtggccgccatccccttcgacctgctcatcttcggctctggctctgaggagctgatcgggctgctgaagactgcgcggctgctgcggctggtgcgcgtggcgcggaagctggatcgctactcagagtacggcgcggccgtgctgttcttgctcatgtgcacctttgcgctcatcgcgcactggctagcctgcatctggtacgccatcggcaacatggagcagccacacatggactcacgcatcggctggctgcacaacctgggcgaccagataggcaaaccctacaacagcagcggcctgggcggcccctccatcaaggacaagtatgtgacggcgctctacttcaccttcagcagcctcaccagtgtgggcttcggcaacgtctctcccaacaccaactcagagaagatcttctccatctgcgtcatgctcattggctccctcatgtatgctagcatcttcggcaacgtgtcggccatcatccagcggctgtactcgggcacagcccgctaccacacacagatgctgcgggtgcgggagttcatccgcttccaccagatccccaatcccctgcgccagcgcctcgaggagtacttccagcacgcctggtcctacaccaacggcatcgacatgaacgcggtgctgaagggcttccctgagtgcctgcaggctgacatctgcctgcacctgaaccgctcactgctgcagcactgcaaacccttccgaggggccaccaagggctgccttcgggccctggccatgaagttcaagaccacacatgcaccgccaggggacacactggtgcatgctggggacctgctcaccgccctgtacttcatctcccggggctccatcgagatcctgcggggcgacgtcgtcgtggccatcctggggaagaatgacatctttggggagcctctgaacctgtatgcaaggcctggcaagtcgaacggggatgtgcgggccctcacctactgtgacctacacaagatccatcgggacgacctgctggaggtgctggacatgtaccctgagttctccgaccacttctggtccagcctggagatcaccttcaacctgcgagataccaacatgatcccgggctcccccggcagtacggagttagagggtggcttcagtcggcaacgcaagcgcaagttgtccttccgcaggcgcacggacaaggacacggagcagccaggggaggtgtcggccttggggccgggccgggcgggggcagggccgagtagccggggccggccgggggggccgtggggggagagcccgtccagtggcccctccagccctgagagcagtgaggatgagggcccaggccgcagctccagccccctccgcctggtgcccttctccagccccaggccccccggagagccgccgggtggggagcccctgatggaggactgcgagaagagcagcgacacttgcaaccccctgtcaggcgccttctcaggagtgtccaacattttcagcttctggggggacagtcggggccgccagtaccaggagctccctcgatgccccgcccccacccccagcctcctcaacatccccctctccagcccgggtcggcggccccggggcgacgtggagagcaggctggatgccctccagcgccagctcaacaggctggagacccggctgagtgcagacatggccactgtcctgcagctgctacagaggcagatgacgctggtcccgcccgcctacagtgctgtgaccaccccggggcctggccccacttccacatccccgctgttgcccgtcagccccctccccaccctcaccttggactcgctttctcaggtttcccagttcatggcgtgtgaggagctgcccccgggggccccagagcttccccaagaaggccccacacgacgcctctccctaccgggccagctgggggccctcacctcccagcccctgcacagacacggctcggacccgggcagttagtggggctgcccagtgtggacacgtggctcacccagggatcaaggcgctgctgggccgctccccttggaggccctgctcaggaggccctgaccgtggaaggggagaggaactcgaaagcacagctcctcccccagcccttgggaccatcttctcctgcagtcccctgggccccagtgagaggggcaggggcagggccggcagtaggtggggcctgtggtccccccactgccctgagggcattagctggtctaactgcccggaggcacccggccctgggccttaggcacctcaaggacttttctgctatttactgctcttattgttaaggataataattaaggatcatatgaataattaatgaagatgctgatgactatgaataataaataattatcctgaggaga

SEQ ID NO: 142 - DNA, 3884 bp, Homo sapiens
  source 1..3884: mol_type = genomic DNA
  misc_feature 1..3884: note = cDNA of KCNH2 gene SNP c.1575G>T (p.Lys525Asn)
atgccggtgcggaggggccacgtcgcgccgcagaacaccttcctggacaccatcatccgcaagtttgagggccagagccgtaagttcatcatcgccaacgctcgggtggagaactgcgccgtcatctactgcaacgacggcttctgcgagctgtgcggctactcgcgggccgaggtgatgcagcgaccctgcacctgcgacttcctgcacgggccgcgcacgcagcgccgcgctgccgcgcagatcgcgcaggcactgctgggcgccgaggagcgcaaagtggaaatcgccttctaccggaaagatgggagctgcttcctatgtctggtggatgtggtgcccgtgaagaacgaggatggggctgtcatcatgttcatcctcaatttcgaggtggtgatggagaaggacatggtggggtccccggctcatgacaccaaccaccggggcccccccaccagctggctggccccaggccgcgccaagaccttccgcctgaagctgcccgcgctgctggcgctgacggcccgggagtcgtcggtgcggtcgggcggcgcgggcggcgcgggcgccccgggggccgtggtggtggacgtggacctgacgcccgcggcacccagcagcgagtcgctggccctggacgaagtgacagccatggacaaccacgtggcagggctcgggcccgcggaggagcggcgtgcgctggtgggtcccggctctccgccccgcagcgcgcccggccagctcccatcgccccgggcgcacagcctcaaccccgacgcctcgggctccagctgcagcctggcccggacgcgctcccgagaaagctgcgccagcgtgcgccgcgcctcgtcggccgacgacatcgaggccatgcgcgccggggtgctgcccccgccaccgcgccacgccagcaccggggccatgcacccactgcgcagcggcttgctcaactccacctcggactccgacctcgtgcgctaccgcaccattagcaagattccccaaatcaccctcaactttgtggacctcaagggcgaccccttcttggcttcgcccaccagtgaccgtgagatcatagcacctaagataaaggagcgaacccacaatgtcactgagaaggtcacccaggtcctgtccctgggcgccgacgtgctgcctgagtacaagctgcaggcaccgcgcatccaccgctggaccatcctgcattacagccccttcaaggccgtgtgggactggctcatcctgctgctggtcatctacacggctgtcttcacaccctactcggctgccttcctgctgaaggagacggaagaaggcccgcctgctaccgagtgtggctacgcctgccagccgctggctgtggtggacctcatcgtggacatcatgttcattgtggacatcctcatcaacttccgcaccacctacgtcaatgccaacgaggaggtggtcagccaccccggccgcatcgccgtccactacttcaagggctggttcctcatcgacatggtggccgccatccccttcgacctgctcatcttcggctctggctctgaggagctgatcgggctgctgaatactgcgcggctgctgcggctggtgcgcgtggcgcggaagctggatcgctactcagagtacggcgcggccgtgctgttcttgctcatgtgcacctttgcgctcatcgcgcactggctagcctgcatctggtacgccatcggcaacatggagcagccacacatggactcacgcatcggctggctgcacaacctgggcgaccagataggcaaaccctacaacagcagcggcctgggcggcccctccatcaaggacaagtatgtgacggcgctctacttcaccttcagcagcctcaccagtgtgggcttcggcaacgtctctcccaacaccaactcagagaagatcttctccatctgcgtcatgctcattggctccctcatgtatgctagcatcttcggcaacgtgtcggccatcatccagcggctgtactcgggcacagcccgctaccacacacagatgctgcgggtgcgggagttcatccgcttccaccagatccccaatcccctgcgccagcgcctcgaggagtacttccagcacgcctggtcctacaccaacggcatcgacatgaacgcggtgctgaagggcttccctgagtgcctgcaggctgacatctgcctgcacctgaaccgctcactgctgcagcactgcaaacccttccgaggggccaccaagggctgccttcgggccctggccatgaagttcaagaccacacatgcaccgccaggggacacactggtgcatgctggggacctgctcaccgccctgtacttcatctcccggggctccatcgagatcctgcggggcgacgtcgtcgtggccatcctggggaagaatgacatctttggggagcctctgaacctgtatgcaaggcctggcaagtcgaacggggatgtgcgggccctcacctactgtgacctacacaagatccatcgggacgacctgctggaggtgctggacatgtaccctgagttctccgaccacttctggtccagcctggagatcaccttcaacctgcgagataccaacatgatcccgggctcccccggcagtacggagttagagggtggcttcagtcggcaacgcaagcgcaagttgtccttccgcaggcgcacggacaaggacacggagcagccaggggaggtgtcggccttggggccgggccgggcgggggcagggccgagtagccggggccggccgggggggccgtggggggagagcccgtccagtggcccctccagccctgagagcagtgaggatgagggcccaggccgcagctccagccccctccgcctggtgcccttctccagccccaggccccccggagagccgccgggtggggagcccctgatggaggactgcgagaagagcagcgacacttgcaaccccctgtcaggcgccttctcaggagtgtccaacattttcagcttctggggggacagtcggggccgccagtaccaggagctccctcgatgccccgcccccacccccagcctcctcaacatccccctctccagcccgggtcggcggccccggggcgacgtggagagcaggctggatgccctccagcgccagctcaacaggctggagacccggctgagtgcagacatggccactgtcctgcagctgctacagaggcagatgacgctggtcccgcccgcctacagtgctgtgaccaccccggggcctggccccacttccacatccccgctgttgcccgtcagccccctccccaccctcaccttggactcgctttctcaggtttcccagttcatggcgtgtgaggagctgcccccgggggccccagagcttccccaagaaggccccacacgacgcctctccctaccgggccagctgggggccctcacctcccagcccctgcacagacacggctcggacccgggcagttagtggggctgcccagtgtggacacgtggctcacccagggatcaaggcgctgctgggccgctccccttggaggccctgctcaggaggccctgaccgtggaaggggagaggaactcgaaagcacagctcctcccccagcccttgggaccatcttctcctgcagtcccctgggccccagtgagaggggcaggggcagggccggcagtaggtggggcctgtggtccccccactgccctgagggcattagctggtctaactgcccggaggcacccggccctgggccttaggcacctcaaggacttttctgctatttactgctcttattgttaaggataataattaaggatcatatgaataattaatgaagatgctgatgactatgaataataaataattatcctgaggaga

SEQ ID NO: 143 - DNA, 3884 bp, Homo sapiens
  source 1..3884: mol_type = genomic DNA
  misc_feature 1..3884: note = cDNA of KCNH2 gene SNP c.1576A>G (p.Thr526Ala)
atgccggtgcggaggggccacgtcgcgccgcagaacaccttcctggacaccatcatccgcaagtttgagggccagagccgtaagttcatcatcgccaacgctcgggtggagaactgcgccgtcatctactgcaacgacggcttctgcgagctgtgcggctactcgcgggccgaggtgatgcagcgaccctgcacctgcgacttcctgcacgggccgcgcacgcagcgccgcgctgccgcgcagatcgcgcaggcactgctgggcgccgaggagcgcaaagtggaaatcgccttctaccggaaagatgggagctgcttcctatgtctggtggatgtggtgcccgtgaagaacgaggatggggctgtcatcatgttcatcctcaatttcgaggtggtgatggagaaggacatggtggggtccccggctcatgacaccaaccaccggggcccccccaccagctggctggccccaggccgcgccaagaccttccgcctgaagctgcccgcgctgctggcgctgacggcccgggagtcgtcggtgcggtcgggcggcgcgggcggcgcgggcgccccgggggccgtggtggtggacgtggacctgacgcccgcggcacccagcagcgagtcgctggccctggacgaagtgacagccatggacaaccacgtggcagggctcgggcccgcggaggagcggcgtgcgctggtgggtcccggctctccgccccgcagcgcgcccggccagctcccatcgccccgggcgcacagcctcaaccccgacgcctcgggctccagctgcagcctggcccggacgcgctcccgagaaagctgcgccagcgtgcgccgcgcctcgtcggccgacgacatcgaggccatgcgcgccggggtgctgcccccgccaccgcgccacgccagcaccggggccatgcacccactgcgcagcggcttgctcaactccacctcggactccgacctcgtgcgctaccgcaccattagcaagattccccaaatcaccctcaactttgtggacctcaagggcgaccccttcttggcttcgcccaccagtgaccgtgagatcatagcacctaagataaaggagcgaacccacaatgtcactgagaaggtcacccaggtcctgtccctgggcgccgacgtgctgcctgagtacaagctgcaggcaccgcgcatccaccgctggaccatcctgcattacagccccttcaaggccgtgtgggactggctcatcctgctgctggtcatctacacggctgtcttcacaccctactcggctgccttcctgctgaaggagacggaagaaggcccgcctgctaccgagtgtggctacgcctgccagccgctggctgtggtggacctcatcgtggacatcatgttcattgtggacatcctcatcaacttccgcaccacctacgtcaatgccaacgaggaggtggtcagccaccccggccgcatcgccgtccactacttcaagggctggttcctcatcgacatggtggccgccatccccttcgacctgctcatcttcggctctggctctgaggagctgatcgggctgctgaaggctgcgcggctgctgcggctggtgcgcgtggcgcggaagctggatcgctactcagagtacggcgcggccgtgctgttcttgctcatgtgcacctttgcgctcatcgcgcactggctagcctgcatctggtacgccatcggcaacatggagcagccacacatggactcacgcatcggctggctgcacaacctgggcgaccagataggcaaaccctacaacagcagcggcctgggcggcccctccatcaaggacaagtatgtgacggcgctctacttcaccttcagcagcctcaccagtgtgggcttcggcaacgtctctcccaacaccaactcagagaagatcttctccatctgcgtcatgctcattggctccctcatgtatgctagcatcttcggcaacgtgtcggccatcatccagcggctgtactcgggcacagcccgctaccacacacagatgctgcgggtgcgggagttcatccgcttccaccagatccccaatcccctgcgccagcgcctcgaggagtacttccagcacgcctggtcctacaccaacggcatcgacatgaacgcggtgctgaagggcttccctgagtgcctgcaggctgacatctgcctgcacctgaaccgctcactgctgcagcactgcaaacccttccgaggggccaccaagggctgccttcgggccctggccatgaagttcaagaccacacatgcaccgccaggggacacactggtgcatgctggggacctgctcaccgccctgtacttcatctcccggggctccatcgagatcctgcggggcgacgtcgtcgtggccatcctggggaagaatgacatctttggggagcctctgaacctgtatgcaaggcctggcaagtcgaacggggatgtgcgggccctcacctactgtgacctacacaagatccatcgggacgacctgctggaggtgctggacatgtaccctgagttctccgaccacttctggtccagcctggagatcaccttcaacctgcgagataccaacatgatcccgggctcccccggcagtacggagttagagggtggcttcagtcggcaacgcaagcgcaagttgtccttccgcaggcgcacggacaaggacacggagcagccaggggaggtgtcggccttggggccgggccgggcgggggcagggccgagtagccggggccggccgggggggccgtggggggagagcccgtccagtggcccctccagccctgagagcagtgaggatgagggcccaggccgcagctccagccccctccgcctggtgcccttctccagccccaggccccccggagagccgccgggtggggagcccctgatggaggactgcgagaagagcagcgacacttgcaaccccctgtcaggcgccttctcaggagtgtccaacattttcagcttctggggggacagtcggggccgccagtaccaggagctccctcgatgccccgcccccacccccagcctcctcaacatccccctctccagcccgggtcggcggccccggggcgacgtggagagcaggctggatgccctccagcgccagctcaacaggctggagacccggctgagtgcagacatggccactgtcctgcagctgctacagaggcagatgacgctggtcccgcccgcctacagtgctgtgaccaccccggggcctggccccacttccacatccccgctgttgcccgtcagccccctccccaccctcaccttggactcgctttctcaggtttcccagttcatggcgtgtgaggagctgcccccgggggccccagagcttccccaagaaggccccacacgacgcctctccctaccgggccagctgggggccctcacctcccagcccctgcacagacacggctcggacccgggcagttagtggggctgcccagtgtggacacgtggctcacccagggatcaaggcgctgctgggccgctccccttggaggccctgctcaggaggccctgaccgtggaaggggagaggaactcgaaagcacagctcctcccccagcccttgggaccatcttctcctgcagtcccctgggccccagtgagaggggcaggggcagggccggcagtaggtggggcctgtggtccccccactgccctgagggcattagctggtctaactgcccggaggcacccggccctgggccttaggcacctcaaggacttttctgctatttactgctcttattgttaaggataataattaaggatcatatgaataattaatgaagatgctgatgactatgaataataaataattatcctgaggaga

SEQ ID NO: 144 - DNA, 3884 bp, Homo sapiens
  source 1..3884: mol_type = genomic DNA
  misc_feature 1..3884: note = cDNA of KCNH2 gene SNP c.157G>A (p.Gly53Ser)
atgccggtgcggaggggccacgtcgcgccgcagaacaccttcctggacaccatcatccgcaagtttgagggccagagccgtaagttcatcatcgccaacgctcgggtggagaactgcgccgtcatctactgcaacgacggcttctgcgagctgtgcagctactcgcgggccgaggtgatgcagcgaccctgcacctgcgacttcctgcacgggccgcgcacgcagcgccgcgctgccgcgcagatcgcgcaggcactgctgggcgccgaggagcgcaaagtggaaatcgccttctaccggaaagatgggagctgcttcctatgtctggtggatgtggtgcccgtgaagaacgaggatggggctgtcatcatgttcatcctcaatttcgaggtggtgatggagaaggacatggtggggtccccggctcatgacaccaaccaccggggcccccccaccagctggctggccccaggccgcgccaagaccttccgcctgaagctgcccgcgctgctggcgctgacggcccgggagtcgtcggtgcggtcgggcggcgcgggcggcgcgggcgccccgggggccgtggtggtggacgtggacctgacgcccgcggcacccagcagcgagtcgctggccctggacgaagtgacagccatggacaaccacgtggcagggctcgggcccgcggaggagcggcgtgcgctggtgggtcccggctctccgccccgcagcgcgcccggccagctcccatcgccccgggcgcacagcctcaaccccgacgcctcgggctccagctgcagcctggcccggacgcgctcccgagaaagctgcgccagcgtgcgccgcgcctcgtcggccgacgacatcgaggccatgcgcgccggggtgctgcccccgccaccgcgccacgccagcaccggggccatgcacccactgcgcagcggcttgctcaactccacctcggactccgacctcgtgcgctaccgcaccattagcaagattccccaaatcaccctcaactttgtggacctcaagggcgaccccttcttggcttcgcccaccagtgaccgtgagatcatagcacctaagataaaggagcgaacccacaatgtcactgagaaggtcacccaggtcctgtccctgggcgccgacgtgctgcctgagtacaagctgcaggcaccgcgcatccaccgctggaccatcctgcattacagccccttcaaggccgtgtgggactggctcatcctgctgctggtcatctacacggctgtcttcacaccctactcggctgccttcctgctgaaggagacggaagaaggcccgcctgctaccgagtgtggctacgcctgccagccgctggctgtggtggacctcatcgtggacatcatgttcattgtggacatcctcatcaacttccgcaccacctacgtcaatgccaacgaggaggtggtcagccaccccggccgcatcgccgtccactacttcaagggctggttcctcatcgacatggtggccgccatccccttcgacctgctcatcttcggctctggctctgaggagctgatcgggctgctgaagactgcgcggctgctgcggctggtgcgcgtggcgcggaagctggatcgctactcagagtacggcgcggccgtgctgttcttgctcatgtgcacctttgcgctcatcgcgcactggctagcctgcatctggtacgccatcggcaacatggagcagccacacatggactcacgcatcggctggctgcacaacctgggcgaccagataggcaaaccctacaacagcagcggcctgggcggcccctccatcaaggacaagtatgtgacggcgctctacttcaccttcagcagcctcaccagtgtgggcttcggcaacgtctctcccaacaccaactcagagaagatcttctccatctgcgtcatgctcattggctccctcatgtatgctagcatcttcggcaacgtgtcggccatcatccagcggctgtactcgggcacagcccgctaccacacacagatgctgcgggtgcgggagttcatccgcttccaccagatccccaatcccctgcgccagcgcctcgaggagtacttccagcacgcctggtcctacaccaacggcatcgacatgaacgcggtgctgaagggcttccctgagtgcctgcaggctgacatctgcctgcacctgaaccgctcactgctgcagcactgcaaacccttccgaggggccaccaagggctgccttcgggccctggccatgaagttcaagaccacacatgcaccgccaggggacacactggtgcatgctggggacctgctcaccgccctgtacttcatctcccggggctccatcgagatcctgcggggcgacgtcgtcgtggccatcctggggaagaatgacatctttggggagcctctgaacctgtatgcaaggcctggcaagtcgaacggggatgtgcgggccctcacctactgtgacctacacaagatccatcgggacgacctgctggaggtgctggacatgtaccctgagttctccgaccacttctggtccagcctggagatcaccttcaacctgcgagataccaacatgatcccgggctcccccggcagtacggagttagagggtggcttcagtcggcaacgcaagcgcaagttgtccttccgcaggcgcacggacaaggacacggagcagccaggggaggtgtcggccttggggccgggccgggcgggggcagggccgagtagccggggccggccgggggggccgtggggggagagcccgtccagtggcccctccagccctgagagcagtgaggatgagggcccaggccgcagctccagccccctccgcctggtgcccttctccagccccaggccccccggagagccgccgggtggggagcccctgatggaggactgcgagaagagcagcgacacttgcaaccccctgtcaggcgccttctcaggagtgtccaacattttcagcttctggggggacagtcggggccgccagtaccaggagctccctcgatgccccgcccccacccccagcctcctcaacatccccctctccagcccgggtcggcggccccggggcgacgtggagagcaggctggatgccctccagcgccagctcaacaggctggagacccggctgagtgcagacatggccactgtcctgcagctgctacagaggcagatgacgctggtcccgcccgcctacagtgctgtgaccaccccggggcctggccccacttccacatccccgctgttgcccgtcagccccctccccaccctcaccttggactcgctttctcaggtttcccagttcatggcgtgtgaggagctgcccccgggggccccagagcttccccaagaaggccccacacgacgcctctccctaccgggccagctgggggccctcacctcccagcccctgcacagacacggctcggacccgggcagttagtggggctgcccagtgtggacacgtggctcacccagggatcaaggcgctgctgggccgctccccttggaggccctgctcaggaggccctgaccgtggaaggggagaggaactcgaaagcacagctcctcccccagcccttgggaccatcttctcctgcagtcccctgggccccagtgagaggggcaggggcagggccggcagtaggtggggcctgtggtccccccactgccctgagggcattagctggtctaactgcccggaggcacccggccctgggccttaggcacctcaaggacttttctgctatttactgctcttattgttaaggataataattaaggatcatatgaataattaatgaagatgctgatgactatgaataataaataattatcctgaggaga

SEQ ID NO: 145 - DNA, 3884 bp, Homo sapiens
  source 1..3884: mol_type = genomic DNA
  misc_feature 1..3884: note = cDNA of KCNH2 gene SNP c.157G>C (p.Gly53Arg)
atgccggtgcggaggggccacgtcgcgccgcagaacaccttcctggacaccatcatccgcaagtttgagggccagagccgtaagttcatcatcgccaacgctcgggtggagaactgcgccgtcatctactgcaacgacggcttctgcgagctgtgccgctactcgcgggccgaggtgatgcagcgaccctgcacctgcgacttcctgcacgggccgcgcacgcagcgccgcgctgccgcgcagatcgcgcaggcactgctgggcgccgaggagcgcaaagtggaaatcgccttctaccggaaagatgggagctgcttcctatgtctggtggatgtggtgcccgtgaagaacgaggatggggctgtcatcatgttcatcctcaatttcgaggtggtgatggagaaggacatggtggggtccccggctcatgacaccaaccaccggggcccccccaccagctggctggccccaggccgcgccaagaccttccgcctgaagctgcccgcgctgctggcgctgacggcccgggagtcgtcggtgcggtcgggcggcgcgggcggcgcgggcgccccgggggccgtggtggtggacgtggacctgacgcccgcggcacccagcagcgagtcgctggccctggacgaagtgacagccatggacaaccacgtggcagggctcgggcccgcggaggagcggcgtgcgctggtgggtcccggctctccgccccgcagcgcgcccggccagctcccatcgccccgggcgcacagcctcaaccccgacgcctcgggctccagctgcagcctggcccggacgcgctcccgagaaagctgcgccagcgtgcgccgcgcctcgtcggccgacgacatcgaggccatgcgcgccggggtgctgcccccgccaccgcgccacgccagcaccggggccatgcacccactgcgcagcggcttgctcaactccacctcggactccgacctcgtgcgctaccgcaccattagcaagattccccaaatcaccctcaactttgtggacctcaagggcgaccccttcttggcttcgcccaccagtgaccgtgagatcatagcacctaagataaaggagcgaacccacaatgtcactgagaaggtcacccaggtcctgtccctgggcgccgacgtgctgcctgagtacaagctgcaggcaccgcgcatccaccgctggaccatcctgcattacagccccttcaaggccgtgtgggactggctcatcctgctgctggtcatctacacggctgtcttcacaccctactcggctgccttcctgctgaaggagacggaagaaggcccgcctgctaccgagtgtggctacgcctgccagccgctggctgtggtggacctcatcgtggacatcatgttcattgtggacatcctcatcaacttccgcaccacctacgtcaatgccaacgaggaggtggtcagccaccccggccgcatcgccgtccactacttcaagggctggttcctcatcgacatggtggccgccatccccttcgacctgctcatcttcggctctggctctgaggagctgatcgggctgctgaagactgcgcggctgctgcggctggtgcgcgtggcgcggaagctggatcgctactcagagtacggcgcggccgtgctgttcttgctcatgtgcacctttgcgctcatcgcgcactggctagcctgcatctggtacgccatcggcaacatggagcagccacacatggactcacgcatcggctggctgcacaacctgggcgaccagataggcaaaccctacaacagcagcggcctgggcggcccctccatcaaggacaagtatgtgacggcgctctacttcaccttcagcagcctcaccagtgtgggcttcggcaacgtctctcccaacaccaactcagagaagatcttctccatctgcgtcatgctcattggctccctcatgtatgctagcatcttcggcaacgtgtcggccatcatccagcggctgtactcgggcacagcccgctaccacacacagatgctgcgggtgcgggagttcatccgcttccaccagatccccaatcccctgcgccagcgcctcgaggagtacttccagcacgcctggtcctacaccaacggcatcgacatgaacgcggtgctgaagggcttccctgagtgcctgcaggctgacatctgcctgcacctgaaccgctcactgctgcagcactgcaaacccttccgaggggccaccaagggctgccttcgggccctggccatgaagttcaagaccacacatgcaccgccaggggacacactggtgcatgctggggacctgctcaccgccctgtacttcatctcccggggctccatcgagatcctgcggggcgacgtcgtcgtggccatcctggggaagaatgacatctttggggagcctctgaacctgtatgcaaggcctggcaagtcgaacggggatgtgcgggccctcacctactgtgacctacacaagatccatcgggacgacctgctggaggtgctggacatgtaccctgagttctccgaccacttctggtccagcctggagatcaccttcaacctgcgagataccaacatgatcccgggctcccccggcagtacggagttagagggtggcttcagtcggcaacgcaagcgcaagttgtccttccgcaggcgcacggacaaggacacggagcagccaggggaggtgtcggccttggggccgggccgggcgggggcagggccgagtagccggggccggccgggggggccgtggggggagagcccgtccagtggcccctccagccctgagagcagtgaggatgagggcccaggccgcagctccagccccctccgcctggtgcccttctccagccccaggccccccggagagccgccgggtggggagcccctgatggaggactgcgagaagagcagcgacacttgcaaccccctgtcaggcgccttctcaggagtgtccaacattttcagcttctggggggacagtcggggccgccagtaccaggagctccctcgatgccccgcccccacccccagcctcctcaacatccccctctccagcccgggtcggcggccccggggcgacgtggagagcaggctggatgccctccagcgccagctcaacaggctggagacccggctgagtgcagacatggccactgtcctgcagctgctacagaggcagatgacgctggtcccgcccgcctacagtgctgtgaccaccccggggcctggccccacttccacatccccgctgttgcccgtcagccccctccccaccctcaccttggactcgctttctcaggtttcccagttcatggcgtgtgaggagctgcccccgggggccccagagcttccccaagaaggccccacacgacgcctctccctaccgggccagctgggggccctcacctcccagcccctgcacagacacggctcggacccgggcagttagtggggctgcccagtgtggacacgtggctcacccagggatcaaggcgctgctgggccgctccccttggaggccctgctcaggaggccctgaccgtggaaggggagaggaactcgaaagcacagctcctcccccagcccttgggaccatcttctcctgcagtcccctgggccccagtgagaggggcaggggcagggccggcagtaggtggggcctgtggtccccccactgccctgagggcattagctggtctaactgcccggaggcacccggccctgggccttaggcacctcaaggacttttctgctatttactgctcttattgttaaggataataattaaggatcatatgaataattaatgaagatgctgatgactatgaataataaataattatcctgaggaga

SEQ ID NO: 146 - DNA, 3884 bp, Homo sapiens
  source 1..3884: mol_type = genomic DNA
  misc_feature 1..3884: note = cDNA of KCNH2 gene SNP c.1582C>T (p.Arg528Trp)
atgccggtgcggaggggccacgtcgcgccgcagaacaccttcctggacaccatcatccgcaagtttgagggccagagccgtaagttcatcatcgccaacgctcgggtggagaactgcgccgtcatctactgcaacgacggcttctgcgagctgtgcggctactcgcgggccgaggtgatgcagcgaccctgcacctgcgacttcctgcacgggccgcgcacgcagcgccgcgctgccgcgcagatcgcgcaggcactgctgggcgccgaggagcgcaaagtggaaatcgccttctaccggaaagatgggagctgcttcctatgtctggtggatgtggtgcccgtgaagaacgaggatggggctgtcatcatgttcatcctcaatttcgaggtggtgatggagaaggacatggtggggtccccggctcatgacaccaaccaccggggcccccccaccagctggctggccccaggccgcgccaagaccttccgcctgaagctgcccgcgctgctggcgctgacggcccgggagtcgtcggtgcggtcgggcggcgcgggcggcgcgggcgccccgggggccgtggtggtggacgtggacctgacgcccgcggcacccagcagcgagtcgctggccctggacgaagtgacagccatggacaaccacgtggcagggctcgggcccgcggaggagcggcgtgcgctggtgggtcccggctctccgccccgcagcgcgcccggccagctcccatcgccccgggcgcacagcctcaaccccgacgcctcgggctccagctgcagcctggcccggacgcgctcccgagaaagctgcgccagcgtgcgccgcgcctcgtcggccgacgacatcgaggccatgcgcgccggggtgctgcccccgccaccgcgccacgccagcaccggggccatgcacccactgcgcagcggcttgctcaactccacctcggactccgacctcgtgcgctaccgcaccattagcaagattccccaaatcaccctcaactttgtggacctcaagggcgaccccttcttggcttcgcccaccagtgaccgtgagatcatagcacctaagataaaggagcgaacccacaatgtcactgagaaggtcacccaggtcctgtccctgggcgccgacgtgctgcctgagtacaagctgcaggcaccgcgcatccaccgctggaccatcctgcattacagccccttcaaggccgtgtgggactggctcatcctgctgctggtcatctacacggctgtcttcacaccctactcggctgccttcctgctgaaggagacggaagaaggcccgcctgctaccgagtgtggctacgcctgccagccgctggctgtggtggacctcatcgtggacatcatgttcattgtggacatcctcatcaacttccgcaccacctacgtcaatgccaacgaggaggtggtcagccaccccggccgcatcgccgtccactacttcaagggctggttcctcatcgacatggtggccgccatccccttcgacctgctcatcttcggctctggctctgaggagctgatcgggctgctgaagactgcgtggctgctgcggctggtgcgcgtggcgcggaagctggatcgctactcagagtacggcgcggccgtgctgttcttgctcatgtgcacctttgcgctcatcgcgcactggctagcctgcatctggtacgccatcggcaacatggagcagccacacatggactcacgcatcggctggctgcacaacctgggcgaccagataggcaaaccctacaacagcagcggcctgggcggcccctccatcaaggacaagtatgtgacggcgctctacttcaccttcagcagcctcaccagtgtgggcttcggcaacgtctctcccaacaccaactcagagaagatcttctccatctgcgtcatgctcattggctccctcatgtatgctagcatcttcggcaacgtgtcggccatcatccagcggctgtactcgggcacagcccgctaccacacacagatgctgcgggtgcgggagttcatccgcttccaccagatccccaatcccctgcgccagcgcctcgaggagtacttccagcacgcctggtcctacaccaacggcatcgacatgaacgcggtgctgaagggcttccctgagtgcctgcaggctgacatctgcctgcacctgaaccgctcactgctgcagcactgcaaacccttccgaggggccaccaagggctgccttcgggccctggccatgaagttcaagaccacacatgcaccgccaggggacacactggtgcatgctggggacctgctcaccgccctgtacttcatctcccggggctccatcgagatcctgcggggcgacgtcgtcgtggccatcctggggaagaatgacatctttggggagcctctgaacctgtatgcaaggcctggcaagtcgaacggggatgtgcgggccctcacctactgtgacctacacaagatccatcgggacgacctgctggaggtgctggacatgtaccctgagttctccgaccacttctggtccagcctggagatcaccttcaacctgcgagataccaacatgatcccgggctcccccggcagtacggagttagagggtggcttcagtcggcaacgcaagcgcaagttgtccttccgcaggcgcacggacaaggacacggagcagccaggggaggtgtcggccttggggccgggccgggcgggggcagggccgagtagccggggccggccgggggggccgtggggggagagcccgtccagtggcccctccagccctgagagcagtgaggatgagggcccaggccgcagctccagccccctccgcctggtgcccttctccagccccaggccccccggagagccgccgggtggggagcccctgatggaggactgcgagaagagcagcgacacttgcaaccccctgtcaggcgccttctcaggagtgtccaacattttcagcttctggggggacagtcggggccgccagtaccaggagctccctcgatgccccgcccccacccccagcctcctcaacatccccctctccagcccgggtcggcggccccggggcgacgtggagagcaggctggatgccctccagcgccagctcaacaggctggagacccggctgagtgcagacatggccactgtcctgcagctgctacagaggcagatgacgctggtcccgcccgcctacagtgctgtgaccaccccggggcctggccccacttccacatccccgctgttgcccgtcagccccctccccaccctcaccttggactcgctttctcaggtttcccagttcatggcgtgtgaggagctgcccccgggggccccagagcttccccaagaaggccccacacgacgcctctccctaccgggccagctgggggccctcacctcccagcccctgcacagacacggctcggacccgggcagttagtggggctgcccagtgtggacacgtggctcacccagggatcaaggcgctgctgggccgctccccttggaggccctgctcaggaggccctgaccgtggaaggggagaggaactcgaaagcacagctcctcccccagcccttgggaccatcttctcctgcagtcccctgggccccagtgagaggggcaggggcagggccggcagtaggtggggcctgtggtccccccactgccctgagggcattagctggtctaactgcccggaggcacccggccctgggccttaggcacctcaaggacttttctgctatttactgctcttattgttaaggataataattaaggatcatatgaataattaatgaagatgctgatgactatgaataataaataattatcctgaggaga

SEQ ID NO: 147 - DNA, 3884 bp, Homo sapiens
  source 1..3884: mol_type = genomic DNA
  misc_feature 1..3884: note = cDNA of KCNH2 gene SNP c.1583G>C (p.Arg528Pro)
atgccggtgcggaggggccacgtcgcgccgcagaacaccttcctggacaccatcatccgcaagtttgagggccagagccgtaagttcatcatcgccaacgctcgggtggagaactgcgccgtcatctactgcaacgacggcttctgcgagctgtgcggctactcgcgggccgaggtgatgcagcgaccctgcacctgcgacttcctgcacgggccgcgcacgcagcgccgcgctgccgcgcagatcgcgcaggcactgctgggcgccgaggagcgcaaagtggaaatcgccttctaccggaaagatgggagctgcttcctatgtctggtggatgtggtgcccgtgaagaacgaggatggggctgtcatcatgttcatcctcaatttcgaggtggtgatggagaaggacatggtggggtccccggctcatgacaccaaccaccggggcccccccaccagctggctggccccaggccgcgccaagaccttccgcctgaagctgcccgcgctgctggcgctgacggcccgggagtcgtcggtgcggtcgggcggcgcgggcggcgcgggcgccccgggggccgtggtggtggacgtggacctgacgcccgcggcacccagcagcgagtcgctggccctggacgaagtgacagccatggacaaccacgtggcagggctcgggcccgcggaggagcggcgtgcgctggtgggtcccggctctccgccccgcagcgcgcccggccagctcccatcgccccgggcgcacagcctcaaccccgacgcctcgggctccagctgcagcctggcccggacgcgctcccgagaaagctgcgccagcgtgcgccgcgcctcgtcggccgacgacatcgaggccatgcgcgccggggtgctgcccccgccaccgcgccacgccagcaccggggccatgcacccactgcgcagcggcttgctcaactccacctcggactccgacctcgtgcgctaccgcaccattagcaagattccccaaatcaccctcaactttgtggacctcaagggcgaccccttcttggcttcgcccaccagtgaccgtgagatcatagcacctaagataaaggagcgaacccacaatgtcactgagaaggtcacccaggtcctgtccctgggcgccgacgtgctgcctgagtacaagctgcaggcaccgcgcatccaccgctggaccatcctgcattacagccccttcaaggccgtgtgggactggctcatcctgctgctggtcatctacacggctgtcttcacaccctactcggctgccttcctgctgaaggagacggaagaaggcccgcctgctaccgagtgtggctacgcctgccagccgctggctgtggtggacctcatcgtggacatcatgttcattgtggacatcctcatcaacttccgcaccacctacgtcaatgccaacgaggaggtggtcagccaccccggccgcatcgccgtccactacttcaagggctggttcctcatcgacatggtggccgccatccccttcgacctgctcatcttcggctctggctctgaggagctgatcgggctgctgaagactgcgccgctgctgcggctggtgcgcgtggcgcggaagctggatcgctactcagagtacggcgcggccgtgctgttcttgctcatgtgcacctttgcgctcatcgcgcactggctagcctgcatctggtacgccatcggcaacatggagcagccacacatggactcacgcatcggctggctgcacaacctgggcgaccagataggcaaaccctacaacagcagcggcctgggcggcccctccatcaaggacaagtatgtgacggcgctctacttcaccttcagcagcctcaccagtgtgggcttcggcaacgtctctcccaacaccaactcagagaagatcttctccatctgcgtcatgctcattggctccctcatgtatgctagcatcttcggcaacgtgtcggccatcatccagcggctgtactcgggcacagcccgctaccacacacagatgctgcgggtgcgggagttcatccgcttccaccagatccccaatcccctgcgccagcgcctcgaggagtacttccagcacgcctggtcctacaccaacggcatcgacatgaacgcggtgctgaagggcttccctgagtgcctgcaggctgacatctgcctgcacctgaaccgctcactgctgcagcactgcaaacccttccgaggggccaccaagggctgccttcgggccctggccatgaagttcaagaccacacatgcaccgccaggggacacactggtgcatgctggggacctgctcaccgccctgtacttcatctcccggggctccatcgagatcctgcggggcgacgtcgtcgtggccatcctggggaagaatgacatctttggggagcctctgaacctgtatgcaaggcctggcaagtcgaacggggatgtgcgggccctcacctactgtgacctacacaagatccatcgggacgacctgctggaggtgctggacatgtaccctgagttctccgaccacttctggtccagcctggagatcaccttcaacctgcgagataccaacatgatcccgggctcccccggcagtacggagttagagggtggcttcagtcggcaacgcaagcgcaagttgtccttccgcaggcgcacggacaaggacacggagcagccaggggaggtgtcggccttggggccgggccgggcgggggcagggccgagtagccggggccggccgggggggccgtggggggagagcccgtccagtggcccctccagccctgagagcagtgaggatgagggcccaggccgcagctccagccccctccgcctggtgcccttctccagccccaggccccccggagagccgccgggtggggagcccctgatggaggactgcgagaagagcagcgacacttgcaaccccctgtcaggcgccttctcaggagtgtccaacattttcagcttctggggggacagtcggggccgccagtaccaggagctccctcgatgccccgcccccacccccagcctcctcaacatccccctctccagcccgggtcggcggccccggggcgacgtggagagcaggctggatgccctccagcgccagctcaacaggctggagacccggctgagtgcagacatggccactgtcctgcagctgctacagaggcagatgacgctggtcccgcccgcctacagtgctgtgaccaccccggggcctggccccacttccacatccccgctgttgcccgtcagccccctccccaccctcaccttggactcgctttctcaggtttcccagttcatggcgtgtgaggagctgcccccgggggccccagagcttccccaagaaggccccacacgacgcctctccctaccgggccagctgggggccctcacctcccagcccctgcacagacacggctcggacccgggcagttagtggggctgcccagtgtggacacgtggctcacccagggatcaaggcgctgctgggccgctccccttggaggccctgctcaggaggccctgaccgtggaaggggagaggaactcgaaagcacagctcctcccccagcccttgggaccatcttctcctgcagtcccctgggccccagtgagaggggcaggggcagggccggcagtaggtggggcctgtggtccccccactgccctgagggcattagctggtctaactgcccggaggcacccggccctgggccttaggcacctcaaggacttttctgctatttactgctcttattgttaaggataataattaaggatcatatgaataattaatgaagatgctgatgactatgaataataaataattatcctgaggaga

SEQ ID NO: 148 - DNA, 3884 bp, Homo sapiens
  source 1..3884: mol_type = genomic DNA
  misc_feature 1..3884: note = cDNA of KCNH2 gene SNP c.158G>A (p.Gly53Asp)
atgccggtgcggaggggccacgtcgcgccgcagaacaccttcctggacaccatcatccgcaagtttgagggccagagccgtaagttcatcatcgccaacgctcgggtggagaactgcgccgtcatctactgcaacgacggcttctgcgagctgtgcgactactcgcgggccgaggtgatgcagcgaccctgcacctgcgacttcctgcacgggccgcgcacgcagcgccgcgctgccgcgcagatcgcgcaggcactgctgggcgccgaggagcgcaaagtggaaatcgccttctaccggaaagatgggagctgcttcctatgtctggtggatgtggtgcccgtgaagaacgaggatggggctgtcatcatgttcatcctcaatttcgaggtggtgatggagaaggacatggtggggtccccggctcatgacaccaaccaccggggcccccccaccagctggctggccccaggccgcgccaagaccttccgcctgaagctgcccgcgctgctggcgctgacggcccgggagtcgtcggtgcggtcgggcggcgcgggcggcgcgggcgccccgggggccgtggtggtggacgtggacctgacgcccgcggcacccagcagcgagtcgctggccctggacgaagtgacagccatggacaaccacgtggcagggctcgggcccgcggaggagcggcgtgcgctggtgggtcccggctctccgccccgcagcgcgcccggccagctcccatcgccccgggcgcacagcctcaaccccgacgcctcgggctccagctgcagcctggcccggacgcgctcccgagaaagctgcgccagcgtgcgccgcgcctcgtcggccgacgacatcgaggccatgcgcgccggggtgctgcccccgccaccgcgccacgccagcaccggggccatgcacccactgcgcagcggcttgctcaactccacctcggactccgacctcgtgcgctaccgcaccattagcaagattccccaaatcaccctcaactttgtggacctcaagggcgaccccttcttggcttcgcccaccagtgaccgtgagatcatagcacctaagataaaggagcgaacccacaatgtcactgagaaggtcacccaggtcctgtccctgggcgccgacgtgctgcctgagtacaagctgcaggcaccgcgcatccaccgctggaccatcctgcattacagccccttcaaggccgtgtgggactggctcatcctgctgctggtcatctacacggctgtcttcacaccctactcggctgccttcctgctgaaggagacggaagaaggcccgcctgctaccgagtgtggctacgcctgccagccgctggctgtggtggacctcatcgtggacatcatgttcattgtggacatcctcatcaacttccgcaccacctacgtcaatgccaacgaggaggtggtcagccaccccggccgcatcgccgtccactacttcaagggctggttcctcatcgacatggtggccgccatccccttcgacctgctcatcttcggctctggctctgaggagctgatcgggctgctgaagactgcgcggctgctgcggctggtgcgcgtggcgcggaagctggatcgctactcagagtacggcgcggccgtgctgttcttgctcatgtgcacctttgcgctcatcgcgcactggctagcctgcatctggtacgccatcggcaacatggagcagccacacatggactcacgcatcggctggctgcacaacctgggcgaccagataggcaaaccctacaacagcagcggcctgggcggcccctccatcaaggacaagtatgtgacggcgctctacttcaccttcagcagcctcaccagtgtgggcttcggcaacgtctctcccaacaccaactcagagaagatcttctccatctgcgtcatgctcattggctccctcatgtatgctagcatcttcggcaacgtgtcggccatcatccagcggctgtactcgggcacagcccgctaccacacacagatgctgcgggtgcgggagttcatccgcttccaccagatccccaatcccctgcgccagcgcctcgaggagtacttccagcacgcctggtcctacaccaacggcatcgacatgaacgcggtgctgaagggcttccctgagtgcctgcaggctgacatctgcctgcacctgaaccgctcactgctgcagcactgcaaacccttccgaggggccaccaagggctgccttcgggccctggccatgaagttcaagaccacacatgcaccgccaggggacacactggtgcatgctggggacctgctcaccgccctgtacttcatctcccggggctccatcgagatcctgcggggcgacgtcgtcgtggccatcctggggaagaatgacatctttggggagcctctgaacctgtatgcaaggcctggcaagtcgaacggggatgtgcgggccctcacctactgtgacctacacaagatccatcgggacgacctgctggaggtgctggacatgtaccctgagttctccgaccacttctggtccagcctggagatcaccttcaacctgcgagataccaacatgatcccgggctcccccggcagtacggagttagagggtggcttcagtcggcaacgcaagcgcaagttgtccttccgcaggcgcacggacaaggacacggagcagccaggggaggtgtcggccttggggccgggccgggcgggggcagggccgagtagccggggccggccgggggggccgtggggggagagcccgtccagtggcccctccagccctgagagcagtgaggatgagggcccaggccgcagctccagccccctccgcctggtgcccttctccagccccaggccccccggagagccgccgggtggggagcccctgatggaggactgcgagaagagcagcgacacttgcaaccccctgtcaggcgccttctcaggagtgtccaacattttcagcttctggggggacagtcggggccgccagtaccaggagctccctcgatgccccgcccccacccccagcctcctcaacatccccctctccagcccgggtcggcggccccggggcgacgtggagagcaggctggatgccctccagcgccagctcaacaggctggagacccggctgagtgcagacatggccactgtcctgcagctgctacagaggcagatgacgctggtcccgcccgcctacagtgctgtgaccaccccggggcctggccccacttccacatccccgctgttgcccgtcagccccctccccaccctcaccttggactcgctttctcaggtttcccagttcatggcgtgtgaggagctgcccccgggggccccagagcttccccaagaaggccccacacgacgcctctccctaccgggccagctgggggccctcacctcccagcccctgcacagacacggctcggacccgggcagttagtggggctgcccagtgtggacacgtggctcacccagggatcaaggcgctgctgggccgctccccttggaggccctgctcaggaggccctgaccgtggaaggggagaggaactcgaaagcacagctcctcccccagcccttgggaccatcttctcctgcagtcccctgggccccagtgagaggggcaggggcagggccggcagtaggtggggcctgtggtccccccactgccctgagggcattagctggtctaactgcccggaggcacccggccctgggccttaggcacctcaaggacttttctgctatttactgctcttattgttaaggataataattaaggatcatatgaataattaatgaagatgctgatgactatgaataataaataattatcctgaggaga

SEQ ID NO: 149 - DNA, 3884 bp, Homo sapiens
  source 1..3884: mol_type = genomic DNA
  misc_feature 1..3884: note = cDNA of KCNH2 gene SNP c.1591C>T (p.Arg531Trp)
atgccggtgcggaggggccacgtcgcgccgcagaacaccttcctggacaccatcatccgcaagtttgagggccagagccgtaagttcatcatcgccaacgctcgggtggagaactgcgccgtcatctactgcaacgacggcttctgcgagctgtgcggctactcgcgggccgaggtgatgcagcgaccctgcacctgcgacttcctgcacgggccgcgcacgcagcgccgcgctgccgcgcagatcgcgcaggcactgctgggcgccgaggagcgcaaagtggaaatcgccttctaccggaaagatgggagctgcttcctatgtctggtggatgtggtgcccgtgaagaacgaggatggggctgtcatcatgttcatcctcaatttcgaggtggtgatggagaaggacatggtggggtccccggctcatgacaccaaccaccggggcccccccaccagctggctggccccaggccgcgccaagaccttccgcctgaagctgcccgcgctgctggcgctgacggcccgggagtcgtcggtgcggtcgggcggcgcgggcggcgcgggcgccccgggggccgtggtggtggacgtggacctgacgcccgcggcacccagcagcgagtcgctggccctggacgaagtgacagccatggacaaccacgtggcagggctcgggcccgcggaggagcggcgtgcgctggtgggtcccggctctccgccccgcagcgcgcccggccagctcccatcgccccgggcgcacagcctcaaccccgacgcctcgggctccagctgcagcctggcccggacgcgctcccgagaaagctgcgccagcgtgcgccgcgcctcgtcggccgacgacatcgaggccatgcgcgccggggtgctgcccccgccaccgcgccacgccagcaccggggccatgcacccactgcgcagcggcttgctcaactccacctcggactccgacctcgtgcgctaccgcaccattagcaagattccccaaatcaccctcaactttgtggacctcaagggcgaccccttcttggcttcgcccaccagtgaccgtgagatcatagcacctaagataaaggagcgaacccacaatgtcactgagaaggtcacccaggtcctgtccctgggcgccgacgtgctgcctgagtacaagctgcaggcaccgcgcatccaccgctggaccatcctgcattacagccccttcaaggccgtgtgggactggctcatcctgctgctggtcatctacacggctgtcttcacaccctactcggctgccttcctgctgaaggagacggaagaaggcccgcctgctaccgagtgtggctacgcctgccagccgctggctgtggtggacctcatcgtggacatcatgttcattgtggacatcctcatcaacttccgcaccacctacgtcaatgccaacgaggaggtggtcagccaccccggccgcatcgccgtccactacttcaagggctggttcctcatcgacatggtggccgccatccccttcgacctgctcatcttcggctctggctctgaggagctgatcgggctgctgaagactgcgcggctgctgtggctggtgcgcgtggcgcggaagctggatcgctactcagagtacggcgcggccgtgctgttcttgctcatgtgcacctttgcgctcatcgcgcactggctagcctgcatctggtacgccatcggcaacatggagcagccacacatggactcacgcatcggctggctgcacaacctgggcgaccagataggcaaaccctacaacagcagcggcctgggcggcccctccatcaaggacaagtatgtgacggcgctctacttcaccttcagcagcctcaccagtgtgggcttcggcaacgtctctcccaacaccaactcagagaagatcttctccatctgcgtcatgctcattggctccctcatgtatgctagcatcttcggcaacgtgtcggccatcatccagcggctgtactcgggcacagcccgctaccacacacagatgctgcgggtgcgggagttcatccgcttccaccagatccccaatcccctgcgccagcgcctcgaggagtacttccagcacgcctggtcctacaccaacggcatcgacatgaacgcggtgctgaagggcttccctgagtgcctgcaggctgacatctgcctgcacctgaaccgctcactgctgcagcactgcaaacccttccgaggggccaccaagggctgccttcgggccctggccatgaagttcaagaccacacatgcaccgccaggggacacactggtgcatgctggggacctgctcaccgccctgtacttcatctcccggggctccatcgagatcctgcggggcgacgtcgtcgtggccatcctggggaagaatgacatctttggggagcctctgaacctgtatgcaaggcctggcaagtcgaacggggatgtgcgggccctcacctactgtgacctacacaagatccatcgggacgacctgctggaggtgctggacatgtaccctgagttctccgaccacttctggtccagcctggagatcaccttcaacctgcgagataccaacatgatcccgggctcccccggcagtacggagttagagggtggcttcagtcggcaacgcaagcgcaagttgtccttccgcaggcgcacggacaaggacacggagcagccaggggaggtgtcggccttggggccgggccgggcgggggcagggccgagtagccggggccggccgggggggccgtggggggagagcccgtccagtggcccctccagccctgagagcagtgaggatgagggcccaggccgcagctccagccccctccgcctggtgcccttctccagccccaggccccccggagagccgccgggtggggagcccctgatggaggactgcgagaagagcagcgacacttgcaaccccctgtcaggcgccttctcaggagtgtccaacattttcagcttctggggggacagtcggggccgccagtaccaggagctccctcgatgccccgcccccacccccagcctcctcaacatccccctctccagcccgggtcggcggccccggggcgacgtggagagcaggctggatgccctccagcgccagctcaacaggctggagacccggctgagtgcagacatggccactgtcctgcagctgctacagaggcagatgacgctggtcccgcccgcctacagtgctgtgaccaccccggggcctggccccacttccacatccccgctgttgcccgtcagccccctccccaccctcaccttggactcgctttctcaggtttcccagttcatggcgtgtgaggagctgcccccgggggccccagagcttccccaagaaggccccacacgacgcctctccctaccgggccagctgggggccctcacctcccagcccctgcacagacacggctcggacccgggcagttagtggggctgcccagtgtggacacgtggctcacccagggatcaaggcgctgctgggccgctccccttggaggccctgctcaggaggccctgaccgtggaaggggagaggaactcgaaagcacagctcctcccccagcccttgggaccatcttctcctgcagtcccctgggccccagtgagaggggcaggggcagggccggcagtaggtggggcctgtggtccccccactgccctgagggcattagctggtctaactgcccggaggcacccggccctgggccttaggcacctcaaggacttttctgctatttactgctcttattgttaaggataataattaaggatcatatgaataattaatgaagatgctgatgactatgaataataaataattatcctgaggaga

SEQ ID NO: 150 - DNA, 3884 bp, Homo sapiens
  source 1..3884: mol_type = genomic DNA
  misc_feature 1..3884: note = cDNA of KCNH2 gene SNP c.1592G>A (p.Arg531Gln)
atgccggtgcggaggggccacgtcgcgccgcagaacaccttcctggacaccatcatccgcaagtttgagggccagagccgtaagttcatcatcgccaacgctcgggtggagaactgcgccgtcatctactgcaacgacggcttctgcgagctgtgcggctactcgcgggccgaggtgatgcagcgaccctgcacctgcgacttcctgcacgggccgcgcacgcagcgccgcgctgccgcgcagatcgcgcaggcactgctgggcgccgaggagcgcaaagtggaaatcgccttctaccggaaagatgggagctgcttcctatgtctggtggatgtggtgcccgtgaagaacgaggatggggctgtcatcatgttcatcctcaatttcgaggtggtgatggagaaggacatggtggggtccccggctcatgacaccaaccaccggggcccccccaccagctggctggccccaggccgcgccaagaccttccgcctgaagctgcccgcgctgctggcgctgacggcccgggagtcgtcggtgcggtcgggcggcgcgggcggcgcgggcgccccgggggccgtggtggtggacgtggacctgacgcccgcggcacccagcagcgagtcgctggccctggacgaagtgacagccatggacaaccacgtggcagggctcgggcccgcggaggagcggcgtgcgctggtgggtcccggctctccgccccgcagcgcgcccggccagctcccatcgccccgggcgcacagcctcaaccccgacgcctcgggctccagctgcagcctggcccggacgcgctcccgagaaagctgcgccagcgtgcgccgcgcctcgtcggccgacgacatcgaggccatgcgcgccggggtgctgcccccgccaccgcgccacgccagcaccggggccatgcacccactgcgcagcggcttgctcaactccacctcggactccgacctcgtgcgctaccgcaccattagcaagattccccaaatcaccctcaactttgtggacctcaagggcgaccccttcttggcttcgcccaccagtgaccgtgagatcatagcacctaagataaaggagcgaacccacaatgtcactgagaaggtcacccaggtcctgtccctgggcgccgacgtgctgcctgagtacaagctgcaggcaccgcgcatccaccgctggaccatcctgcattacagccccttcaaggccgtgtgggactggctcatcctgctgctggtcatctacacggctgtcttcacaccctactcggctgccttcctgctgaaggagacggaagaaggcccgcctgctaccgagtgtggctacgcctgccagccgctggctgtggtggacctcatcgtggacatcatgttcattgtggacatcctcatcaacttccgcaccacctacgtcaatgccaacgaggaggtggtcagccaccccggccgcatcgccgtccactacttcaagggctggttcctcatcgacatggtggccgccatccccttcgacctgctcatcttcggctctggctctgaggagctgatcgggctgctgaagactgcgcggctgctgcagctggtgcgcgtggcgcggaagctggatcgctactcagagtacggcgcggccgtgctgttcttgctcatgtgcacctttgcgctcatcgcgcactggctagcctgcatctggtacgccatcggcaacatggagcagccacacatggactcacgcatcggctggctgcacaacctgggcgaccagataggcaaaccctacaacagcagcggcctgggcggcccctccatcaaggacaagtatgtgacggcgctctacttcaccttcagcagcctcaccagtgtgggcttcggcaacgtctctcccaacaccaactcagagaagatcttctccatctgcgtcatgctcattggctccctcatgtatgctagcatcttcggcaacgtgtcggccatcatccagcggctgtactcgggcacagcccgctaccacacacagatgctgcgggtgcgggagttcatccgcttccaccagatccccaatcccctgcgccagcgcctcgaggagtacttccagcacgcctggtcctacaccaacggcatcgacatgaacgcggtgctgaagggcttccctgagtgcctgcaggctgacatctgcctgcacctgaaccgctcactgctgcagcactgcaaacccttccgaggggccaccaagggctgccttcgggccctggccatgaagttcaagaccacacatgcaccgccaggggacacactggtgcatgctggggacctgctcaccgccctgtacttcatctcccggggctccatcgagatcctgcggggcgacgtcgtcgtggccatcctggggaagaatgacatctttggggagcctctgaacctgtatgcaaggcctggcaagtcgaacggggatgtgcgggccctcacctactgtgacctacacaagatccatcgggacgacctgctggaggtgctggacatgtaccctgagttctccgaccacttctggtccagcctggagatcaccttcaacctgcgagataccaacatgatcccgggctcccccggcagtacggagttagagggtggcttcagtcggcaacgcaagcgcaagttgtccttccgcaggcgcacggacaaggacacggagcagccaggggaggtgtcggccttggggccgggccgggcgggggcagggccgagtagccggggccggccgggggggccgtggggggagagcccgtccagtggcccctccagccctgagagcagtgaggatgagggcccaggccgcagctccagccccctccgcctggtgcccttctccagccccaggccccccggagagccgccgggtggggagcccctgatggaggactgcgagaagagcagcgacacttgcaaccccctgtcaggcgccttctcaggagtgtccaacattttcagcttctggggggacagtcggggccgccagtaccaggagctccctcgatgccccgcccccacccccagcctcctcaacatccccctctccagcccgggtcggcggccccggggcgacgtggagagcaggctggatgccctccagcgccagctcaacaggctggagacccggctgagtgcagacatggccactgtcctgcagctgctacagaggcagatgacgctggtcccgcccgcctacagtgctgtgaccaccccggggcctggccccacttccacatccccgctgttgcccgtcagccccctccccaccctcaccttggactcgctttctcaggtttcccagttcatggcgtgtgaggagctgcccccgggggccccagagcttccccaagaaggccccacacgacgcctctccctaccgggccagctgggggccctcacctcccagcccctgcacagacacggctcggacccgggcagttagtggggctgcccagtgtggacacgtggctcacccagggatcaaggcgctgctgggccgctccccttggaggccctgctcaggaggccctgaccgtggaaggggagaggaactcgaaagcacagctcctcccccagcccttgggaccatcttctcctgcagtcccctgggccccagtgagaggggcaggggcagggccggcagtaggtggggcctgtggtccccccactgccctgagggcattagctggtctaactgcccggaggcacccggccctgggccttaggcacctcaaggacttttctgctatttactgctcttattgttaaggataataattaaggatcatatgaataattaatgaagatgctgatgactatgaataataaataattatcctgaggaga

SEQ ID NO: 151 - DNA, 3884 bp, Homo sapiens
  source 1..3884: mol_type = genomic DNA
  misc_feature 1..3884: note = cDNA of KCNH2 gene SNP c.1595T>C (p.Leu532Pro)
atgccggtgcggaggggccacgtcgcgccgcagaacaccttcctggacaccatcatccgcaagtttgagggccagagccgtaagttcatcatcgccaacgctcgggtggagaactgcgccgtcatctactgcaacgacggcttctgcgagctgtgcggctactcgcgggccgaggtgatgcagcgaccctgcacctgcgacttcctgcacgggccgcgcacgcagcgccgcgctgccgcgcagatcgcgcaggcactgctgggcgccgaggagcgcaaagtggaaatcgccttctaccggaaagatgggagctgcttcctatgtctggtggatgtggtgcccgtgaagaacgaggatggggctgtcatcatgttcatcctcaatttcgaggtggtgatggagaaggacatggtggggtccccggctcatgacaccaaccaccggggcccccccaccagctggctggccccaggccgcgccaagaccttccgcctgaagctgcccgcgctgctggcgctgacggcccgggagtcgtcggtgcggtcgggcggcgcgggcggcgcgggcgccccgggggccgtggtggtggacgtggacctgacgcccgcggcacccagcagcgagtcgctggccctggacgaagtgacagccatggacaaccacgtggcagggctcgggcccgcggaggagcggcgtgcgctggtgggtcccggctctccgccccgcagcgcgcccggccagctcccatcgccccgggcgcacagcctcaaccccgacgcctcgggctccagctgcagcctggcccggacgcgctcccgagaaagctgcgccagcgtgcgccgcgcctcgtcggccgacgacatcgaggccatgcgcgccggggtgctgcccccgccaccgcgccacgccagcaccggggccatgcacccactgcgcagcggcttgctcaactccacctcggactccgacctcgtgcgctaccgcaccattagcaagattccccaaatcaccctcaactttgtggacctcaagggcgaccccttcttggcttcgcccaccagtgaccgtgagatcatagcacctaagataaaggagcgaacccacaatgtcactgagaaggtcacccaggtcctgtccctgggcgccgacgtgctgcctgagtacaagctgcaggcaccgcgcatccaccgctggaccatcctgcattacagccccttcaaggccgtgtgggactggctcatcctgctgctggtcatctacacggctgtcttcacaccctactcggctgccttcctgctgaaggagacggaagaaggcccgcctgctaccgagtgtggctacgcctgccagccgctggctgtggtggacctcatcgtggacatcatgttcattgtggacatcctcatcaacttccgcaccacctacgtcaatgccaacgaggaggtggtcagccaccccggccgcatcgccgtccactacttcaagggctggttcctcatcgacatggtggccgccatccccttcgacctgctcatcttcggctctggctctgaggagctgatcgggctgctgaagactgcgcggctgctgcggccggtgcgcgtggcgcggaagctggatcgctactcagagtacggcgcggccgtgctgttcttgctcatgtgcacctttgcgctcatcgcgcactggctagcctgcatctggtacgccatcggcaacatggagcagccacacatggactcacgcatcggctggctgcacaacctgggcgaccagataggcaaaccctacaacagcagcggcctgggcggcccctccatcaaggacaagtatgtgacggcgctctacttcaccttcagcagcctcaccagtgtgggcttcggcaacgtctctcccaacaccaactcagagaagatcttctccatctgcgtcatgctcattggctccctcatgtatgctagcatcttcggcaacgtgtcggccatcatccagcggctgtactcgggcacagcccgctaccacacacagatgctgcgggtgcgggagttcatccgcttccaccagatccccaatcccctgcgccagcgcctcgaggagtacttccagcacgcctggtcctacaccaacggcatcgacatgaacgcggtgctgaagggcttccctgagtgcctgcaggctgacatctgcctgcacctgaaccgctcactgctgcagcactgcaaacccttccgaggggccaccaagggctgccttcgggccctggccatgaagttcaagaccacacatgcaccgccaggggacacactggtgcatgctggggacctgctcaccgccctgtacttcatctcccggggctccatcgagatcctgcggggcgacgtcgtcgtggccatcctggggaagaatgacatctttggggagcctctgaacctgtatgcaaggcctggcaagtcgaacggggatgtgcgggccctcacctactgtgacctacacaagatccatcgggacgacctgctggaggtgctggacatgtaccctgagttctccgaccacttctggtccagcctggagatcaccttcaacctgcgagataccaacatgatcccgggctcccccggcagtacggagttagagggtggcttcagtcggcaacgcaagcgcaagttgtccttccgcaggcgcacggacaaggacacggagcagccaggggaggtgtcggccttggggccgggccgggcgggggcagggccgagtagccggggccggccgggggggccgtggggggagagcccgtccagtggcccctccagccctgagagcagtgaggatgagggcccaggccgcagctccagccccctccgcctggtgcccttctccagccccaggccccccggagagccgccgggtggggagcccctgatggaggactgcgagaagagcagcgacacttgcaaccccctgtcaggcgccttctcaggagtgtccaacattttcagcttctggggggacagtcggggccgccagtaccaggagctccctcgatgccccgcccccacccccagcctcctcaacatccccctctccagcccgggtcggcggccccggggcgacgtggagagcaggctggatgccctccagcgccagctcaacaggctggagacccggctgagtgcagacatggccactgtcctgcagctgctacagaggcagatgacgctggtcccgcccgcctacagtgctgtgaccaccccggggcctggccccacttccacatccccgctgttgcccgtcagccccctccccaccctcaccttggactcgctttctcaggtttcccagttcatggcgtgtgaggagctgcccccgggggccccagagcttccccaagaaggccccacacgacgcctctccctaccgggccagctgggggccctcacctcccagcccctgcacagacacggctcggacccgggcagttagtggggctgcccagtgtggacacgtggctcacccagggatcaaggcgctgctgggccgctccccttggaggccctgctcaggaggccctgaccgtggaaggggagaggaactcgaaagcacagctcctcccccagcccttgggaccatcttctcctgcagtcccctgggccccagtgagaggggcaggggcagggccggcagtaggtggggcctgtggtccccccactgccctgagggcattagctggtctaactgcccggaggcacccggccctgggccttaggcacctcaaggacttttctgctatttactgctcttattgttaaggataataattaaggatcatatgaataattaatgaagatgctgatgactatgaataataaataattatcctgaggaga

SEQ ID NO: 152 - DNA, 3884 bp, Homo sapiens
  source 1..3884: mol_type = genomic DNA
  misc_feature 1..3884: note = cDNA of KCNH2 gene SNP c.1598T>G (p.Val533Gly)
atgccggtgcggaggggccacgtcgcgccgcagaacaccttcctggacaccatcatccgcaagtttgagggccagagccgtaagttcatcatcgccaacgctcgggtggagaactgcgccgtcatctactgcaacgacggcttctgcgagctgtgcggctactcgcgggccgaggtgatgcagcgaccctgcacctgcgacttcctgcacgggccgcgcacgcagcgccgcgctgccgcgcagatcgcgcaggcactgctgggcgccgaggagcgcaaagtggaaatcgccttctaccggaaagatgggagctgcttcctatgtctggtggatgtggtgcccgtgaagaacgaggatggggctgtcatcatgttcatcctcaatttcgaggtggtgatggagaaggacatggtggggtccccggctcatgacaccaaccaccggggcccccccaccagctggctggccccaggccgcgccaagaccttccgcctgaagctgcccgcgctgctggcgctgacggcccgggagtcgtcggtgcggtcgggcggcgcgggcggcgcgggcgccccgggggccgtggtggtggacgtggacctgacgcccgcggcacccagcagcgagtcgctggccctggacgaagtgacagccatggacaaccacgtggcagggctcgggcccgcggaggagcggcgtgcgctggtgggtcccggctctccgccccgcagcgcgcccggccagctcccatcgccccgggcgcacagcctcaaccccgacgcctcgggctccagctgcagcctggcccggacgcgctcccgagaaagctgcgccagcgtgcgccgcgcctcgtcggccgacgacatcgaggccatgcgcgccggggtgctgcccccgccaccgcgccacgccagcaccggggccatgcacccactgcgcagcggcttgctcaactccacctcggactccgacctcgtgcgctaccgcaccattagcaagattccccaaatcaccctcaactttgtggacctcaagggcgaccccttcttggcttcgcccaccagtgaccgtgagatcatagcacctaagataaaggagcgaacccacaatgtcactgagaaggtcacccaggtcctgtccctgggcgccgacgtgctgcctgagtacaagctgcaggcaccgcgcatccaccgctggaccatcctgcattacagccccttcaaggccgtgtgggactggctcatcctgctgctggtcatctacacggctgtcttcacaccctactcggctgccttcctgctgaaggagacggaagaaggcccgcctgctaccgagtgtggctacgcctgccagccgctggctgtggtggacctcatcgtggacatcatgttcattgtggacatcctcatcaacttccgcaccacctacgtcaatgccaacgaggaggtggtcagccaccccggccgcatcgccgtccactacttcaagggctggttcctcatcgacatggtggccgccatccccttcgacctgctcatcttcggctctggctctgaggagctgatcgggctgctgaagactgcgcggctgctgcggctggggcgcgtggcgcggaagctggatcgctactcagagtacggcgcggccgtgctgttcttgctcatgtgcacctttgcgctcatcgcgcactggctagcctgcatctggtacgccatcggcaacatggagcagccacacatggactcacgcatcggctggctgcacaacctgggcgaccagataggcaaaccctacaacagcagcggcctgggcggcccctccatcaaggacaagtatgtgacggcgctctacttcaccttcagcagcctcaccagtgtgggcttcggcaacgtctctcccaacaccaactcagagaagatcttctccatctgcgtcatgctcattggctccctcatgtatgctagcatcttcggcaacgtgtcggccatcatccagcggctgtactcgggcacagcccgctaccacacacagatgctgcgggtgcgggagttcatccgcttccaccagatccccaatcccctgcgccagcgcctcgaggagtacttccagcacgcctggtcctacaccaacggcatcgacatgaacgcggtgctgaagggcttccctgagtgcctgcaggctgacatctgcctgcacctgaaccgctcactgctgcagcactgcaaacccttccgaggggccaccaagggctgccttcgggccctggccatgaagttcaagaccacacatgcaccgccaggggacacactggtgcatgctggggacctgctcaccgccctgtacttcatctcccggggctccatcgagatcctgcggggcgacgtcgtcgtggccatcctggggaagaatgacatctttggggagcctctgaacctgtatgcaaggcctggcaagtcgaacggggatgtgcgggccctcacctactgtgacctacacaagatccatcgggacgacctgctggaggtgctggacatgtaccctgagttctccgaccacttctggtccagcctggagatcaccttcaacctgcgagataccaacatgatcccgggctcccccggcagtacggagttagagggtggcttcagtcggcaacgcaagcgcaagttgtccttccgcaggcgcacggacaaggacacggagcagccaggggaggtgtcggccttggggccgggccgggcgggggcagggccgagtagccggggccggccgggggggccgtggggggagagcccgtccagtggcccctccagccctgagagcagtgaggatgagggcccaggccgcagctccagccccctccgcctggtgcccttctccagccccaggccccccggagagccgccgggtggggagcccctgatggaggactgcgagaagagcagcgacacttgcaaccccctgtcaggcgccttctcaggagtgtccaacattttcagcttctggggggacagtcggggccgccagtaccaggagctccctcgatgccccgcccccacccccagcctcctcaacatccccctctccagcccgggtcggcggccccggggcgacgtggagagcaggctggatgccctccagcgccagctcaacaggctggagacccggctgagtgcagacatggccactgtcctgcagctgctacagaggcagatgacgctggtcccgcccgcctacagtgctgtgaccaccccggggcctggccccacttccacatccccgctgttgcccgtcagccccctccccaccctcaccttggactcgctttctcaggtttcccagttcatggcgtgtgaggagctgcccccgggggccccagagcttccccaagaaggccccacacgacgcctctccctaccgggccagctgggggccctcacctcccagcccctgcacagacacggctcggacccgggcagttagtggggctgcccagtgtggacacgtggctcacccagggatcaaggcgctgctgggccgctccccttggaggccctgctcaggaggccctgaccgtggaaggggagaggaactcgaaagcacagctcctcccccagcccttgggaccatcttctcctgcagtcccctgggccccagtgagaggggcaggggcagggccggcagtaggtggggcctgtggtccccccactgccctgagggcattagctggtctaactgcccggaggcacccggccctgggccttaggcacctcaaggacttttctgctatttactgctcttattgttaaggataataattaaggatcatatgaataattaatgaagatgctgatgactatgaataataaataattatcctgaggaga

SEQ ID NO: 153 - DNA, 3884 bp, Homo sapiens
  source 1..3884: mol_type = genomic DNA
  misc_feature 1..3884: note = cDNA of KCNH2 gene SNP c.1600C>A (p.Arg534Ser)
atgccggtgcggaggggccacgtcgcgccgcagaacaccttcctggacaccatcatccgcaagtttgagggccagagccgtaagttcatcatcgccaacgctcgggtggagaactgcgccgtcatctactgcaacgacggcttctgcgagctgtgcggctactcgcgggccgaggtgatgcagcgaccctgcacctgcgacttcctgcacgggccgcgcacgcagcgccgcgctgccgcgcagatcgcgcaggcactgctgggcgccgaggagcgcaaagtggaaatcgccttctaccggaaagatgggagctgcttcctatgtctggtggatgtggtgcccgtgaagaacgaggatggggctgtcatcatgttcatcctcaatttcgaggtggtgatggagaaggacatggtggggtccccggctcatgacaccaaccaccggggcccccccaccagctggctggccccaggccgcgccaagaccttccgcctgaagctgcccgcgctgctggcgctgacggcccgggagtcgtcggtgcggtcgggcggcgcgggcggcgcgggcgccccgggggccgtggtggtggacgtggacctgacgcccgcggcacccagcagcgagtcgctggccctggacgaagtgacagccatggacaaccacgtggcagggctcgggcccgcggaggagcggcgtgcgctggtgggtcccggctctccgccccgcagcgcgcccggccagctcccatcgccccgggcgcacagcctcaaccccgacgcctcgggctccagctgcagcctggcccggacgcgctcccgagaaagctgcgccagcgtgcgccgcgcctcgtcggccgacgacatcgaggccatgcgcgccggggtgctgcccccgccaccgcgccacgccagcaccggggccatgcacccactgcgcagcggcttgctcaactccacctcggactccgacctcgtgcgctaccgcaccattagcaagattccccaaatcaccctcaactttgtggacctcaagggcgaccccttcttggcttcgcccaccagtgaccgtgagatcatagcacctaagataaaggagcgaacccacaatgtcactgagaaggtcacccaggtcctgtccctgggcgccgacgtgctgcctgagtacaagctgcaggcaccgcgcatccaccgctggaccatcctgcattacagccccttcaaggccgtgtgggactggctcatcctgctgctggtcatctacacggctgtcttcacaccctactcggctgccttcctgctgaaggagacggaagaaggcccgcctgctaccgagtgtggctacgcctgccagccgctggctgtggtggacctcatcgtggacatcatgttcattgtggacatcctcatcaacttccgcaccacctacgtcaatgccaacgaggaggtggtcagccaccccggccgcatcgccgtccactacttcaagggctggttcctcatcgacatggtggccgccatccccttcgacctgctcatcttcggctctggctctgaggagctgatcgggctgctgaagactgcgcggctgctgcggctggtgagcgtggcgcggaagctggatcgctactcagagtacggcgcggccgtgctgttcttgctcatgtgcacctttgcgctcatcgcgcactggctagcctgcatctggtacgccatcggcaacatggagcagccacacatggactcacgcatcggctggctgcacaacctgggcgaccagataggcaaaccctacaacagcagcggcctgggcggcccctccatcaaggacaagtatgtgacggcgctctacttcaccttcagcagcctcaccagtgtgggcttcggcaacgtctctcccaacaccaactcagagaagatcttctccatctgcgtcatgctcattggctccctcatgtatgctagcatcttcggcaacgtgtcggccatcatccagcggctgtactcgggcacagcccgctaccacacacagatgctgcgggtgcgggagttcatccgcttccaccagatccccaatcccctgcgccagcgcctcgaggagtacttccagcacgcctggtcctacaccaacggcatcgacatgaacgcggtgctgaagggcttccctgagtgcctgcaggctgacatctgcctgcacctgaaccgctcactgctgcagcactgcaaacccttccgaggggccaccaagggctgccttcgggccctggccatgaagttcaagaccacacatgcaccgccaggggacacactggtgcatgctggggacctgctcaccgccctgtacttcatctcccggggctccatcgagatcctgcggggcgacgtcgtcgtggccatcctggggaagaatgacatctttggggagcctctgaacctgtatgcaaggcctggcaagtcgaacggggatgtgcgggccctcacctactgtgacctacacaagatccatcgggacgacctgctggaggtgctggacatgtaccctgagttctccgaccacttctggtccagcctggagatcaccttcaacctgcgagataccaacatgatcccgggctcccccggcagtacggagttagagggtggcttcagtcggcaacgcaagcgcaagttgtccttccgcaggcgcacggacaaggacacggagcagccaggggaggtgtcggccttggggccgggccgggcgggggcagggccgagtagccggggccggccgggggggccgtggggggagagcccgtccagtggcccctccagccctgagagcagtgaggatgagggcccaggccgcagctccagccccctccgcctggtgcccttctccagccccaggccccccggagagccgccgggtggggagcccctgatggaggactgcgagaagagcagcgacacttgcaaccccctgtcaggcgccttctcaggagtgtccaacattttcagcttctggggggacagtcggggccgccagtaccaggagctccctcgatgccccgcccccacccccagcctcctcaacatccccctctccagcccgggtcggcggccccggggcgacgtggagagcaggctggatgccctccagcgccagctcaacaggctggagacccggctgagtgcagacatggccactgtcctgcagctgctacagaggcagatgacgctggtcccgcccgcctacagtgctgtgaccaccccggggcctggccccacttccacatccccgctgttgcccgtcagccccctccccaccctcaccttggactcgctttctcaggtttcccagttcatggcgtgtgaggagctgcccccgggggccccagagcttccccaagaaggccccacacgacgcctctccctaccgggccagctgggggccctcacctcccagcccctgcacagacacggctcggacccgggcagttagtggggctgcccagtgtggacacgtggctcacccagggatcaaggcgctgctgggccgctccccttggaggccctgctcaggaggccctgaccgtggaaggggagaggaactcgaaagcacagctcctcccccagcccttgggaccatcttctcctgcagtcccctgggccccagtgagaggggcaggggcagggccggcagtaggtggggcctgtggtccccccactgccctgagggcattagctggtctaactgcccggaggcacccggccctgggccttaggcacctcaaggacttttctgctatttactgctcttattgttaaggataataattaaggatcatatgaataattaatgaagatgctgatgactatgaataataaataattatcctgaggaga

SEQ ID NO: 154 - DNA, 3884 bp, Homo sapiens
  source 1..3884: mol_type = genomic DNA
  misc_feature 1..3884: note = cDNA of KCNH2 gene SNP c.1600C>G (p.Arg534Gly)
atgccggtgcggaggggccacgtcgcgccgcagaacaccttcctggacaccatcatccgcaagtttgagggccagagccgtaagttcatcatcgccaacgctcgggtggagaactgcgccgtcatctactgcaacgacggcttctgcgagctgtgcggctactcgcgggccgaggtgatgcagcgaccctgcacctgcgacttcctgcacgggccgcgcacgcagcgccgcgctgccgcgcagatcgcgcaggcactgctgggcgccgaggagcgcaaagtggaaatcgccttctaccggaaagatgggagctgcttcctatgtctggtggatgtggtgcccgtgaagaacgaggatggggctgtcatcatgttcatcctcaatttcgaggtggtgatggagaaggacatggtggggtccccggctcatgacaccaaccaccggggcccccccaccagctggctggccccaggccgcgccaagaccttccgcctgaagctgcccgcgctgctggcgctgacggcccgggagtcgtcggtgcggtcgggcggcgcgggcggcgcgggcgccccgggggccgtggtggtggacgtggacctgacgcccgcggcacccagcagcgagtcgctggccctggacgaagtgacagccatggacaaccacgtggcagggctcgggcccgcggaggagcggcgtgcgctggtgggtcccggctctccgccccgcagcgcgcccggccagctcccatcgccccgggcgcacagcctcaaccccgacgcctcgggctccagctgcagcctggcccggacgcgctcccgagaaagctgcgccagcgtgcgccgcgcctcgtcggccgacgacatcgaggccatgcgcgccggggtgctgcccccgccaccgcgccacgccagcaccggggccatgcacccactgcgcagcggcttgctcaactccacctcggactccgacctcgtgcgctaccgcaccattagcaagattccccaaatcaccctcaactttgtggacctcaagggcgaccccttcttggcttcgcccaccagtgaccgtgagatcatagcacctaagataaaggagcgaacccacaatgtcactgagaaggtcacccaggtcctgtccctgggcgccgacgtgctgcctgagtacaagctgcaggcaccgcgcatccaccgctggaccatcctgcattacagccccttcaaggccgtgtgggactggctcatcctgctgctggtcatctacacggctgtcttcacaccctactcggctgccttcctgctgaaggagacggaagaaggcccgcctgctaccgagtgtggctacgcctgccagccgctggctgtggtggacctcatcgtggacatcatgttcattgtggacatcctcatcaacttccgcaccacctacgtcaatgccaacgaggaggtggtcagccaccccggccgcatcgccgtccactacttcaagggctggttcctcatcgacatggtggccgccatccccttcgacctgctcatcttcggctctggctctgaggagctgatcgggctgctgaagactgcgcggctgctgcggctggtgggcgtggcgcggaagctggatcgctactcagagtacggcgcggccgtgctgttcttgctcatgtgcacctttgcgctcatcgcgcactggctagcctgcatctggtacgccatcggcaacatggagcagccacacatggactcacgcatcggctggctgcacaacctgggcgaccagataggcaaaccctacaacagcagcggcctgggcggcccctccatcaaggacaagtatgtgacggcgctctacttcaccttcagcagcctcaccagtgtgggcttcggcaacgtctctcccaacaccaactcagagaagatcttctccatctgcgtcatgctcattggctccctcatgtatgctagcatcttcggcaacgtgtcggccatcatccagcggctgtactcgggcacagcccgctaccacacacagatgctgcgggtgcgggagttcatccgcttccaccagatccccaatcccctgcgccagcgcctcgaggagtacttccagcacgcctggtcctacaccaacggcatcgacatgaacgcggtgctgaagggcttccctgagtgcctgcaggctgacatctgcctgcacctgaaccgctcactgctgcagcactgcaaacccttccgaggggccaccaagggctgccttcgggccctggccatgaagttcaagaccacacatgcaccgccaggggacacactggtgcatgctggggacctgctcaccgccctgtacttcatctcccggggctccatcgagatcctgcggggcgacgtcgtcgtggccatcctggggaagaatgacatctttggggagcctctgaacctgtatgcaaggcctggcaagtcgaacggggatgtgcgggccctcacctactgtgacctacacaagatccatcgggacgacctgctggaggtgctggacatgtaccctgagttctccgaccacttctggtccagcctggagatcaccttcaacctgcgagataccaacatgatcccgggctcccccggcagtacggagttagagggtggcttcagtcggcaacgcaagcgcaagttgtccttccgcaggcgcacggacaaggacacggagcagccaggggaggtgtcggccttggggccgggccgggcgggggcagggccgagtagccggggccggccgggggggccgtggggggagagcccgtccagtggcccctccagccctgagagcagtgaggatgagggcccaggccgcagctccagccccctccgcctggtgcccttctccagccccaggccccccggagagccgccgggtggggagcccctgatggaggactgcgagaagagcagcgacacttgcaaccccctgtcaggcgccttctcaggagtgtccaacattttcagcttctggggggacagtcggggccgccagtaccaggagctccctcgatgccccgcccccacccccagcctcctcaacatccccctctccagcccgggtcggcggccccggggcgacgtggagagcaggctggatgccctccagcgccagctcaacaggctggagacccggctgagtgcagacatggccactgtcctgcagctgctacagaggcagatgacgctggtcccgcccgcctacagtgctgtgaccaccccggggcctggccccacttccacatccccgctgttgcccgtcagccccctccccaccctcaccttggactcgctttctcaggtttcccagttcatggcgtgtgaggagctgcccccgggggccccagagcttccccaagaaggccccacacgacgcctctccctaccgggccagctgggggccctcacctcccagcccctgcacagacacggctcggacccgggcagttagtggggctgcccagtgtggacacgtggctcacccagggatcaaggcgctgctgggccgctccccttggaggccctgctcaggaggccctgaccgtggaaggggagaggaactcgaaagcacagctcctcccccagcccttgggaccatcttctcctgcagtcccctgggccccagtgagaggggcaggggcagggccggcagtaggtggggcctgtggtccccccactgccctgagggcattagctggtctaactgcccggaggcacccggccctgggccttaggcacctcaaggacttttctgctatttactgctcttattgttaaggataataattaaggatcatatgaataattaatgaagatgctgatgactatgaataataaataattatcctgaggaga

SEQ ID NO: 155 - DNA, 3884 bp, Homo sapiens
  source 1..3884: mol_type = genomic DNA
  misc_feature 1..3884: note = cDNA of KCNH2 gene SNP c.1600C>T (p.Arg534Cys)
atgccggtgcggaggggccacgtcgcgccgcagaacaccttcctggacaccatcatccgcaagtttgagggccagagccgtaagttcatcatcgccaacgctcgggtggagaactgcgccgtcatctactgcaacgacggcttctgcgagctgtgcggctactcgcgggccgaggtgatgcagcgaccctgcacctgcgacttcctgcacgggccgcgcacgcagcgccgcgctgccgcgcagatcgcgcaggcactgctgggcgccgaggagcgcaaagtggaaatcgccttctaccggaaagatgggagctgcttcctatgtctggtggatgtggtgcccgtgaagaacgaggatggggctgtcatcatgttcatcctcaatttcgaggtggtgatggagaaggacatggtggggtccccggctcatgacaccaaccaccggggcccccccaccagctggctggccccaggccgcgccaagaccttccgcctgaagctgcccgcgctgctggcgctgacggcccgggagtcgtcggtgcggtcgggcggcgcgggcggcgcgggcgccccgggggccgtggtggtggacgtggacctgacgcccgcggcacccagcagcgagtcgctggccctggacgaagtgacagccatggacaaccacgtggcagggctcgggcccgcggaggagcggcgtgcgctggtgggtcccggctctccgccccgcagcgcgcccggccagctcccatcgccccgggcgcacagcctcaaccccgacgcctcgggctccagctgcagcctggcccggacgcgctcccgagaaagctgcgccagcgtgcgccgcgcctcgtcggccgacgacatcgaggccatgcgcgccggggtgctgcccccgccaccgcgccacgccagcaccggggccatgcacccactgcgcagcggcttgctcaactccacctcggactccgacctcgtgcgctaccgcaccattagcaagattccccaaatcaccctcaactttgtggacctcaagggcgaccccttcttggcttcgcccaccagtgaccgtgagatcatagcacctaagataaaggagcgaacccacaatgtcactgagaaggtcacccaggtcctgtccctgggcgccgacgtgctgcctgagtacaagctgcaggcaccgcgcatccaccgctggaccatcctgcattacagccccttcaaggccgtgtgggactggctcatcctgctgctggtcatctacacggctgtcttcacaccctactcggctgccttcctgctgaaggagacggaagaaggcccgcctgctaccgagtgtggctacgcctgccagccgctggctgtggtggacctcatcgtggacatcatgttcattgtggacatcctcatcaacttccgcaccacctacgtcaatgccaacgaggaggtggtcagccaccccggccgcatcgccgtccactacttcaagggctggttcctcatcgacatggtggccgccatccccttcgacctgctcatcttcggctctggctctgaggagctgatcgggctgctgaagactgcgcggctgctgcggctggtgtgcgtggcgcggaagctggatcgctactcagagtacggcgcggccgtgctgttcttgctcatgtgcacctttgcgctcatcgcgcactggctagcctgcatctggtacgccatcggcaacatggagcagccacacatggactcacgcatcggctggctgcacaacctgggcgaccagataggcaaaccctacaacagcagcggcctgggcggcccctccatcaaggacaagtatgtgacggcgctctacttcaccttcagcagcctcaccagtgtgggcttcggcaacgtctctcccaacaccaactcagagaagatcttctccatctgcgtcatgctcattggctccctcatgtatgctagcatcttcggcaacgtgtcggccatcatccagcggctgtactcgggcacagcccgctaccacacacagatgctgcgggtgcgggagttcatccgcttccaccagatccccaatcccctgcgccagcgcctcgaggagtacttccagcacgcctggtcctacaccaacggcatcgacatgaacgcggtgctgaagggcttccctgagtgcctgcaggctgacatctgcctgcacctgaaccgctcactgctgcagcactgcaaacccttccgaggggccaccaagggctgccttcgggccctggccatgaagttcaagaccacacatgcaccgccaggggacacactggtgcatgctggggacctgctcaccgccctgtacttcatctcccggggctccatcgagatcctgcggggcgacgtcgtcgtggccatcctggggaagaatgacatctttggggagcctctgaacctgtatgcaaggcctggcaagtcgaacggggatgtgcgggccctcacctactgtgacctacacaagatccatcgggacgacctgctggaggtgctggacatgtaccctgagttctccgaccacttctggtccagcctggagatcaccttcaacctgcgagataccaacatgatcccgggctcccccggcagtacggagttagagggtggcttcagtcggcaacgcaagcgcaagttgtccttccgcaggcgcacggacaaggacacggagcagccaggggaggtgtcggccttggggccgggccgggcgggggcagggccgagtagccggggccggccgggggggccgtggggggagagcccgtccagtggcccctccagccctgagagcagtgaggatgagggcccaggccgcagctccagccccctccgcctggtgcccttctccagccccaggccccccggagagccgccgggtggggagcccctgatggaggactgcgagaagagcagcgacacttgcaaccccctgtcaggcgccttctcaggagtgtccaacattttcagcttctggggggacagtcggggccgccagtaccaggagctccctcgatgccccgcccccacccccagcctcctcaacatccccctctccagcccgggtcggcggccccggggcgacgtggagagcaggctggatgccctccagcgccagctcaacaggctggagacccggctgagtgcagacatggccactgtcctgcagctgctacagaggcagatgacgctggtcccgcccgcctacagtgctgtgaccaccccggggcctggccccacttccacatccccgctgttgcccgtcagccccctccccaccctcaccttggactcgctttctcaggtttcccagttcatggcgtgtgaggagctgcccccgggggccccagagcttccccaagaaggccccacacgacgcctctccctaccgggccagctgggggccctcacctcccagcccctgcacagacacggctcggacccgggcagttagtggggctgcccagtgtggacacgtggctcacccagggatcaaggcgctgctgggccgctccccttggaggccctgctcaggaggccctgaccgtggaaggggagaggaactcgaaagcacagctcctcccccagcccttgggaccatcttctcctgcagtcccctgggccccagtgagaggggcaggggcagggccggcagtaggtggggcctgtggtccccccactgccctgagggcattagctggtctaactgcccggaggcacccggccctgggccttaggcacctcaaggacttttctgctatttactgctcttattgttaaggataataattaaggatcatatgaataattaatgaagatgctgatgactatgaataataaataattatcctgaggaga

SEQ ID NO: 156 - DNA, 3884 bp, Homo sapiens
  source 1..3884: mol_type = genomic DNA
  misc_feature 1..3884: note = cDNA of KCNH2 gene SNP c.1601G>T (p.Arg534Leu)
atgccggtgcggaggggccacgtcgcgccgcagaacaccttcctggacaccatcatccgcaagtttgagggccagagccgtaagttcatcatcgccaacgctcgggtggagaactgcgccgtcatctactgcaacgacggcttctgcgagctgtgcggctactcgcgggccgaggtgatgcagcgaccctgcacctgcgacttcctgcacgggccgcgcacgcagcgccgcgctgccgcgcagatcgcgcaggcactgctgggcgccgaggagcgcaaagtggaaatcgccttctaccggaaagatgggagctgcttcctatgtctggtggatgtggtgcccgtgaagaacgaggatggggctgtcatcatgttcatcctcaatttcgaggtggtgatggagaaggacatggtggggtccccggctcatgacaccaaccaccggggcccccccaccagctggctggccccaggccgcgccaagaccttccgcctgaagctgcccgcgctgctggcgctgacggcccgggagtcgtcggtgcggtcgggcggcgcgggcggcgcgggcgccccgggggccgtggtggtggacgtggacctgacgcccgcggcacccagcagcgagtcgctggccctggacgaagtgacagccatggacaaccacgtggcagggctcgggcccgcggaggagcggcgtgcgctggtgggtcccggctctccgccccgcagcgcgcccggccagctcccatcgccccgggcgcacagcctcaaccccgacgcctcgggctccagctgcagcctggcccggacgcgctcccgagaaagctgcgccagcgtgcgccgcgcctcgtcggccgacgacatcgaggccatgcgcgccggggtgctgcccccgccaccgcgccacgccagcaccggggccatgcacccactgcgcagcggcttgctcaactccacctcggactccgacctcgtgcgctaccgcaccattagcaagattccccaaatcaccctcaactttgtggacctcaagggcgaccccttcttggcttcgcccaccagtgaccgtgagatcatagcacctaagataaaggagcgaacccacaatgtcactgagaaggtcacccaggtcctgtccctgggcgccgacgtgctgcctgagtacaagctgcaggcaccgcgcatccaccgctggaccatcctgcattacagccccttcaaggccgtgtgggactggctcatcctgctgctggtcatctacacggctgtcttcacaccctactcggctgccttcctgctgaaggagacggaagaaggcccgcctgctaccgagtgtggctacgcctgccagccgctggctgtggtggacctcatcgtggacatcatgttcattgtggacatcctcatcaacttccgcaccacctacgtcaatgccaacgaggaggtggtcagccaccccggccgcatcgccgtccactacttcaagggctggttcctcatcgacatggtggccgccatccccttcgacctgctcatcttcggctctggctctgaggagctgatcgggctgctgaagactgcgcggctgctgcggctggtgctcgtggcgcggaagctggatcgctactcagagtacggcgcggccgtgctgttcttgctcatgtgcacctttgcgctcatcgcgcactggctagcctgcatctggtacgccatcggcaacatggagcagccacacatggactcacgcatcggctggctgcacaacctgggcgaccagataggcaaaccctacaacagcagcggcctgggcggcccctccatcaaggacaagtatgtgacggcgctctacttcaccttcagcagcctcaccagtgtgggcttcggcaacgtctctcccaacaccaactcagagaagatcttctccatctgcgtcatgctcattggctccctcatgtatgctagcatcttcggcaacgtgtcggccatcatccagcggctgtactcgggcacagcccgctaccacacacagatgctgcgggtgcgggagttcatccgcttccaccagatccccaatcccctgcgccagcgcctcgaggagtacttccagcacgcctggtcctacaccaacggcatcgacatgaacgcggtgctgaagggcttccctgagtgcctgcaggctgacatctgcctgcacctgaaccgctcactgctgcagcactgcaaacccttccgaggggccaccaagggctgccttcgggccctggccatgaagttcaagaccacacatgcaccgccaggggacacactggtgcatgctggggacctgctcaccgccctgtacttcatctcccggggctccatcgagatcctgcggggcgacgtcgtcgtggccatcctggggaagaatgacatctttggggagcctctgaacctgtatgcaaggcctggcaagtcgaacggggatgtgcgggccctcacctactgtgacctacacaagatccatcgggacgacctgctggaggtgctggacatgtaccctgagttctccgaccacttctggtccagcctggagatcaccttcaacctgcgagataccaacatgatcccgggctcccccggcagtacggagttagagggtggcttcagtcggcaacgcaagcgcaagttgtccttccgcaggcgcacggacaaggacacggagcagccaggggaggtgtcggccttggggccgggccgggcgggggcagggccgagtagccggggccggccgggggggccgtggggggagagcccgtccagtggcccctccagccctgagagcagtgaggatgagggcccaggccgcagctccagccccctccgcctggtgcccttctccagccccaggccccccggagagccgccgggtggggagcccctgatggaggactgcgagaagagcagcgacacttgcaaccccctgtcaggcgccttctcaggagtgtccaacattttcagcttctggggggacagtcggggccgccagtaccaggagctccctcgatgccccgcccccacccccagcctcctcaacatccccctctccagcccgggtcggcggccccggggcgacgtggagagcaggctggatgccctccagcgccagctcaacaggctggagacccggctgagtgcagacatggccactgtcctgcagctgctacagaggcagatgacgctggtcccgcccgcctacagtgctgtgaccaccccggggcctggccccacttccacatccccgctgttgcccgtcagccccctccccaccctcaccttggactcgctttctcaggtttcccagttcatggcgtgtgaggagctgcccccgggggccccagagcttccccaagaaggccccacacgacgcctctccctaccgggccagctgggggccctcacctcccagcccctgcacagacacggctcggacccgggcagttagtggggctgcccagtgtggacacgtggctcacccagggatcaaggcgctgctgggccgctccccttggaggccctgctcaggaggccctgaccgtggaaggggagaggaactcgaaagcacagctcctcccccagcccttgggaccatcttctcctgcagtcccctgggccccagtgagaggggcaggggcagggccggcagtaggtggggcctgtggtccccccactgccctgagggcattagctggtctaactgcccggaggcacccggccctgggccttaggcacctcaaggacttttctgctatttactgctcttattgttaaggataataattaaggatcatatgaataattaatgaagatgctgatgactatgaataataaataattatcctgaggaga

SEQ ID NO: 157 - DNA, 3884 bp, Homo sapiens
  source 1..3884: mol_type = genomic DNA
  misc_feature 1..3884: note = cDNA of KCNH2 gene SNP c.1603G>A (p.Val535Met)
atgccggtgcggaggggccacgtcgcgccgcagaacaccttcctggacaccatcatccgcaagtttgagggccagagccgtaagttcatcatcgccaacgctcgggtggagaactgcgccgtcatctactgcaacgacggcttctgcgagctgtgcggctactcgcgggccgaggtgatgcagcgaccctgcacctgcgacttcctgcacgggccgcgcacgcagcgccgcgctgccgcgcagatcgcgcaggcactgctgggcgccgaggagcgcaaagtggaaatcgccttctaccggaaagatgggagctgcttcctatgtctggtggatgtggtgcccgtgaagaacgaggatggggctgtcatcatgttcatcctcaatttcgaggtggtgatggagaaggacatggtggggtccccggctcatgacaccaaccaccggggcccccccaccagctggctggccccaggccgcgccaagaccttccgcctgaagctgcccgcgctgctggcgctgacggcccgggagtcgtcggtgcggtcgggcggcgcgggcggcgcgggcgccccgggggccgtggtggtggacgtggacctgacgcccgcggcacccagcagcgagtcgctggccctggacgaagtgacagccatggacaaccacgtggcagggctcgggcccgcggaggagcggcgtgcgctggtgggtcccggctctccgccccgcagcgcgcccggccagctcccatcgccccgggcgcacagcctcaaccccgacgcctcgggctccagctgcagcctggcccggacgcgctcccgagaaagctgcgccagcgtgcgccgcgcctcgtcggccgacgacatcgaggccatgcgcgccggggtgctgcccccgccaccgcgccacgccagcaccggggccatgcacccactgcgcagcggcttgctcaactccacctcggactccgacctcgtgcgctaccgcaccattagcaagattccccaaatcaccctcaactttgtggacctcaagggcgaccccttcttggcttcgcccaccagtgaccgtgagatcatagcacctaagataaaggagcgaacccacaatgtcactgagaaggtcacccaggtcctgtccctgggcgccgacgtgctgcctgagtacaagctgcaggcaccgcgcatccaccgctggaccatcctgcattacagccccttcaaggccgtgtgggactggctcatcctgctgctggtcatctacacggctgtcttcacaccctactcggctgccttcctgctgaaggagacggaagaaggcccgcctgctaccgagtgtggctacgcctgccagccgctggctgtggtggacctcatcgtggacatcatgttcattgtggacatcctcatcaacttccgcaccacctacgtcaatgccaacgaggaggtggtcagccaccccggccgcatcgccgtccactacttcaagggctggttcctcatcgacatggtggccgccatccccttcgacctgctcatcttcggctctggctctgaggagctgatcgggctgctgaagactgcgcggctgctgcggctggtgcgcatggcgcggaagctggatcgctactcagagtacggcgcggccgtgctgttcttgctcatgtgcacctttgcgctcatcgcgcactggctagcctgcatctggtacgccatcggcaacatggagcagccacacatggactcacgcatcggctggctgcacaacctgggcgaccagataggcaaaccctacaacagcagcggcctgggcggcccctccatcaaggacaagtatgtgacggcgctctacttcaccttcagcagcctcaccagtgtgggcttcggcaacgtctctcccaacaccaactcagagaagatcttctccatctgcgtcatgctcattggctccctcatgtatgctagcatcttcggcaacgtgtcggccatcatccagcggctgtactcgggcacagcccgctaccacacacagatgctgcgggtgcgggagttcatccgcttccaccagatccccaatcccctgcgccagcgcctcgaggagtacttccagcacgcctggtcctacaccaacggcatcgacatgaacgcggtgctgaagggcttccctgagtgcctgcaggctgacatctgcctgcacctgaaccgctcactgctgcagcactgcaaacccttccgaggggccaccaagggctgccttcgggccctggccatgaagttcaagaccacacatgcaccgccaggggacacactggtgcatgctggggacctgctcaccgccctgtacttcatctcccggggctccatcgagatcctgcggggcgacgtcgtcgtggccatcctggggaagaatgacatctttggggagcctctgaacctgtatgcaaggcctggcaagtcgaacggggatgtgcgggccctcacctactgtgacctacacaagatccatcgggacgacctgctggaggtgctggacatgtaccctgagttctccgaccacttctggtccagcctggagatcaccttcaacctgcgagataccaacatgatcccgggctcccccggcagtacggagttagagggtggcttcagtcggcaacgcaagcgcaagttgtccttccgcaggcgcacggacaaggacacggagcagccaggggaggtgtcggccttggggccgggccgggcgggggcagggccgagtagccggggccggccgggggggccgtggggggagagcccgtccagtggcccctccagccctgagagcagtgaggatgagggcccaggccgcagctccagccccctccgcctggtgcccttctccagccccaggccccccggagagccgccgggtggggagcccctgatggaggactgcgagaagagcagcgacacttgcaaccccctgtcaggcgccttctcaggagtgtccaacattttcagcttctggggggacagtcggggccgccagtaccaggagctccctcgatgccccgcccccacccccagcctcctcaacatccccctctccagcccgggtcggcggccccggggcgacgtggagagcaggctggatgccctccagcgccagctcaacaggctggagacccggctgagtgcagacatggccactgtcctgcagctgctacagaggcagatgacgctggtcccgcccgcctacagtgctgtgaccaccccggggcctggccccacttccacatccccgctgttgcccgtcagccccctccccaccctcaccttggactcgctttctcaggtttcccagttcatggcgtgtgaggagctgcccccgggggccccagagcttccccaagaaggccccacacgacgcctctccctaccgggccagctgggggccctcacctcccagcccctgcacagacacggctcggacccgggcagttagtggggctgcccagtgtggacacgtggctcacccagggatcaaggcgctgctgggccgctccccttggaggccctgctcaggaggccctgaccgtggaaggggagaggaactcgaaagcacagctcctcccccagcccttgggaccatcttctcctgcagtcccctgggccccagtgagaggggcaggggcagggccggcagtaggtggggcctgtggtccccccactgccctgagggcattagctggtctaactgcccggaggcacccggccctgggccttaggcacctcaaggacttttctgctatttactgctcttattgttaaggataataattaaggatcatatgaataattaatgaagatgctgatgactatgaataataaataattatcctgaggaga

SEQ ID NO: 158 - DNA, 3884 bp, Homo sapiens
  source 1..3884: mol_type = genomic DNA
  misc_feature 1..3884: note = cDNA of KCNH2 gene SNP c.1603G>T (p.Val535Leu)
atgccggtgcggaggggccacgtcgcgccgcagaacaccttcctggacaccatcatccgcaagtttgagggccagagccgtaagttcatcatcgccaacgctcgggtggagaactgcgccgtcatctactgcaacgacggcttctgcgagctgtgcggctactcgcgggccgaggtgatgcagcgaccctgcacctgcgacttcctgcacgggccgcgcacgcagcgccgcgctgccgcgcagatcgcgcaggcactgctgggcgccgaggagcgcaaagtggaaatcgccttctaccggaaagatgggagctgcttcctatgtctggtggatgtggtgcccgtgaagaacgaggatggggctgtcatcatgttcatcctcaatttcgaggtggtgatggagaaggacatggtggggtccccggctcatgacaccaaccaccggggcccccccaccagctggctggccccaggccgcgccaagaccttccgcctgaagctgcccgcgctgctggcgctgacggcccgggagtcgtcggtgcggtcgggcggcgcgggcggcgcgggcgccccgggggccgtggtggtggacgtggacctgacgcccgcggcacccagcagcgagtcgctggccctggacgaagtgacagccatggacaaccacgtggcagggctcgggcccgcggaggagcggcgtgcgctggtgggtcccggctctccgccccgcagcgcgcccggccagctcccatcgccccgggcgcacagcctcaaccccgacgcctcgggctccagctgcagcctggcccggacgcgctcccgagaaagctgcgccagcgtgcgccgcgcctcgtcggccgacgacatcgaggccatgcgcgccggggtgctgcccccgccaccgcgccacgccagcaccggggccatgcacccactgcgcagcggcttgctcaactccacctcggactccgacctcgtgcgctaccgcaccattagcaagattccccaaatcaccctcaactttgtggacctcaagggcgaccccttcttggcttcgcccaccagtgaccgtgagatcatagcacctaagataaaggagcgaacccacaatgtcactgagaaggtcacccaggtcctgtccctgggcgccgacgtgctgcctgagtacaagctgcaggcaccgcgcatccaccgctggaccatcctgcattacagccccttcaaggccgtgtgggactggctcatcctgctgctggtcatctacacggctgtcttcacaccctactcggctgccttcctgctgaaggagacggaagaaggcccgcctgctaccgagtgtggctacgcctgccagccgctggctgtggtggacctcatcgtggacatcatgttcattgtggacatcctcatcaacttccgcaccacctacgtcaatgccaacgaggaggtggtcagccaccccggccgcatcgccgtccactacttcaagggctggttcctcatcgacatggtggccgccatccccttcgacctgctcatcttcggctctggctctgaggagctgatcgggctgctgaagactgcgcggctgctgcggctggtgcgcttggcgcggaagctggatcgctactcagagtacggcgcggccgtgctgttcttgctcatgtgcacctttgcgctcatcgcgcactggctagcctgcatctggtacgccatcggcaacatggagcagccacacatggactcacgcatcggctggctgcacaacctgggcgaccagataggcaaaccctacaacagcagcggcctgggcggcccctccatcaaggacaagtatgtgacggcgctctacttcaccttcagcagcctcaccagtgtgggcttcggcaacgtctctcccaacaccaactcagagaagatcttctccatctgcgtcatgctcattggctccctcatgtatgctagcatcttcggcaacgtgtcggccatcatccagcggctgtactcgggcacagcccgctaccacacacagatgctgcgggtgcgggagttcatccgcttccaccagatccccaatcccctgcgccagcgcctcgaggagtacttccagcacgcctggtcctacaccaacggcatcgacatgaacgcggtgctgaagggcttccctgagtgcctgcaggctgacatctgcctgcacctgaaccgctcactgctgcagcactgcaaacccttccgaggggccaccaagggctgccttcgggccctggccatgaagttcaagaccacacatgcaccgccaggggacacactggtgcatgctggggacctgctcaccgccctgtacttcatctcccggggctccatcgagatcctgcggggcgacgtcgtcgtggccatcctggggaagaatgacatctttggggagcctctgaacctgtatgcaaggcctggcaagtcgaacggggatgtgcgggccctcacctactgtgacctacacaagatccatcgggacgacctgctggaggtgctggacatgtaccctgagttctccgaccacttctggtccagcctggagatcaccttcaacctgcgagataccaacatgatcccgggctcccccggcagtacggagttagagggtggcttcagtcggcaacgcaagcgcaagttgtccttccgcaggcgcacggacaaggacacggagcagccaggggaggtgtcggccttggggccgggccgggcgggggcagggccgagtagccggggccggccgggggggccgtggggggagagcccgtccagtggcccctccagccctgagagcagtgaggatgagggcccaggccgcagctccagccccctccgcctggtgcccttctccagccccaggccccccggagagccgccgggtggggagcccctgatggaggactgcgagaagagcagcgacacttgcaaccccctgtcaggcgccttctcaggagtgtccaacattttcagcttctggggggacagtcggggccgccagtaccaggagctccctcgatgccccgcccccacccccagcctcctcaacatccccctctccagcccgggtcggcggccccggggcgacgtggagagcaggctggatgccctccagcgccagctcaacaggctggagacccggctgagtgcagacatggccactgtcctgcagctgctacagaggcagatgacgctggtcccgcccgcctacagtgctgtgaccaccccggggcctggccccacttccacatccccgctgttgcccgtcagccccctccccaccctcaccttggactcgctttctcaggtttcccagttcatggcgtgtgaggagctgcccccgggggccccagagcttccccaagaaggccccacacgacgcctctccctaccgggccagctgggggccctcacctcccagcccctgcacagacacggctcggacccgggcagttagtggggctgcccagtgtggacacgtggctcacccagggatcaaggcgctgctgggccgctccccttggaggccctgctcaggaggccctgaccgtggaaggggagaggaactcgaaagcacagctcctcccccagcccttgggaccatcttctcctgcagtcccctgggccccagtgagaggggcaggggcagggccggcagtaggtggggcctgtggtccccccactgccctgagggcattagctggtctaactgcccggaggcacccggccctgggccttaggcacctcaaggacttttctgctatttactgctcttattgttaaggataataattaaggatcatatgaataattaatgaagatgctgatgactatgaataataaataattatcctgaggaga

SEQ ID NO: 159 - DNA, 3884 bp, Homo sapiens
  source 1..3884: mol_type = genomic DNA
  misc_feature 1..3884: note = cDNA of KCNH2 gene SNP c.1609C>T (p.Arg537Trp)
atgccggtgcggaggggccacgtcgcgccgcagaacaccttcctggacaccatcatccgcaagtttgagggccagagccgtaagttcatcatcgccaacgctcgggtggagaactgcgccgtcatctactgcaacgacggcttctgcgagctgtgcggctactcgcgggccgaggtgatgcagcgaccctgcacctgcgacttcctgcacgggccgcgcacgcagcgccgcgctgccgcgcagatcgcgcaggcactgctgggcgccgaggagcgcaaagtggaaatcgccttctaccggaaagatgggagctgcttcctatgtctggtggatgtggtgcccgtgaagaacgaggatggggctgtcatcatgttcatcctcaatttcgaggtggtgatggagaaggacatggtggggtccccggctcatgacaccaaccaccggggcccccccaccagctggctggccccaggccgcgccaagaccttccgcctgaagctgcccgcgctgctggcgctgacggcccgggagtcgtcggtgcggtcgggcggcgcgggcggcgcgggcgccccgggggccgtggtggtggacgtggacctgacgcccgcggcacccagcagcgagtcgctggccctggacgaagtgacagccatggacaaccacgtggcagggctcgggcccgcggaggagcggcgtgcgctggtgggtcccggctctccgccccgcagcgcgcccggccagctcccatcgccccgggcgcacagcctcaaccccgacgcctcgggctccagctgcagcctggcccggacgcgctcccgagaaagctgcgccagcgtgcgccgcgcctcgtcggccgacgacatcgaggccatgcgcgccggggtgctgcccccgccaccgcgccacgccagcaccggggccatgcacccactgcgcagcggcttgctcaactccacctcggactccgacctcgtgcgctaccgcaccattagcaagattccccaaatcaccctcaactttgtggacctcaagggcgaccccttcttggcttcgcccaccagtgaccgtgagatcatagcacctaagataaaggagcgaacccacaatgtcactgagaaggtcacccaggtcctgtccctgggcgccgacgtgctgcctgagtacaagctgcaggcaccgcgcatccaccgctggaccatcctgcattacagccccttcaaggccgtgtgggactggctcatcctgctgctggtcatctacacggctgtcttcacaccctactcggctgccttcctgctgaaggagacggaagaaggcccgcctgctaccgagtgtggctacgcctgccagccgctggctgtggtggacctcatcgtggacatcatgttcattgtggacatcctcatcaacttccgcaccacctacgtcaatgccaacgaggaggtggtcagccaccccggccgcatcgccgtccactacttcaagggctggttcctcatcgacatggtggccgccatccccttcgacctgctcatcttcggctctggctctgaggagctgatcgggctgctgaagactgcgcggctgctgcggctggtgcgcgtggcgtggaagctggatcgctactcagagtacggcgcggccgtgctgttcttgctcatgtgcacctttgcgctcatcgcgcactggctagcctgcatctggtacgccatcggcaacatggagcagccacacatggactcacgcatcggctggctgcacaacctgggcgaccagataggcaaaccctacaacagcagcggcctgggcggcccctccatcaaggacaagtatgtgacggcgctctacttcaccttcagcagcctcaccagtgtgggcttcggcaacgtctctcccaacaccaactcagagaagatcttctccatctgcgtcatgctcattggctccctcatgtatgctagcatcttcggcaacgtgtcggccatcatccagcggctgtactcgggcacagcccgctaccacacacagatgctgcgggtgcgggagttcatccgcttccaccagatccccaatcccctgcgccagcgcctcgaggagtacttccagcacgcctggtcctacaccaacggcatcgacatgaacgcggtgctgaagggcttccctgagtgcctgcaggctgacatctgcctgcacctgaaccgctcactgctgcagcactgcaaacccttccgaggggccaccaagggctgccttcgggccctggccatgaagttcaagaccacacatgcaccgccaggggacacactggtgcatgctggggacctgctcaccgccctgtacttcatctcccggggctccatcgagatcctgcggggcgacgtcgtcgtggccatcctggggaagaatgacatctttggggagcctctgaacctgtatgcaaggcctggcaagtcgaacggggatgtgcgggccctcacctactgtgacctacacaagatccatcgggacgacctgctggaggtgctggacatgtaccctgagttctccgaccacttctggtccagcctggagatcaccttcaacctgcgagataccaacatgatcccgggctcccccggcagtacggagttagagggtggcttcagtcggcaacgcaagcgcaagttgtccttccgcaggcgcacggacaaggacacggagcagccaggggaggtgtcggccttggggccgggccgggcgggggcagggccgagtagccggggccggccgggggggccgtggggggagagcccgtccagtggcccctccagccctgagagcagtgaggatgagggcccaggccgcagctccagccccctccgcctggtgcccttctccagccccaggccccccggagagccgccgggtggggagcccctgatggaggactgcgagaagagcagcgacacttgcaaccccctgtcaggcgccttctcaggagtgtccaacattttcagcttctggggggacagtcggggccgccagtaccaggagctccctcgatgccccgcccccacccccagcctcctcaacatccccctctccagcccgggtcggcggccccggggcgacgtggagagcaggctggatgccctccagcgccagctcaacaggctggagacccggctgagtgcagacatggccactgtcctgcagctgctacagaggcagatgacgctggtcccgcccgcctacagtgctgtgaccaccccggggcctggccccacttccacatccccgctgttgcccgtcagccccctccccaccctcaccttggactcgctttctcaggtttcccagttcatggcgtgtgaggagctgcccccgggggccccagagcttccccaagaaggccccacacgacgcctctccctaccgggccagctgggggccctcacctcccagcccctgcacagacacggctcggacccgggcagttagtggggctgcccagtgtggacacgtggctcacccagggatcaaggcgctgctgggccgctccccttggaggccctgctcaggaggccctgaccgtggaaggggagaggaactcgaaagcacagctcctcccccagcccttgggaccatcttctcctgcagtcccctgggccccagtgagaggggcaggggcagggccggcagtaggtggggcctgtggtccccccactgccctgagggcattagctggtctaactgcccggaggcacccggccctgggccttaggcacctcaaggacttttctgctatttactgctcttattgttaaggataataattaaggatcatatgaataattaatgaagatgctgatgactatgaataataaataattatcctgaggaga

SEQ ID NO: 160 - DNA, 3884 bp, Homo sapiens
  source 1..3884: mol_type = genomic DNA
  misc_feature 1..3884: note = cDNA of KCNH2 gene SNP c.160T>C (p.Tyr54His)
atgccggtgcggaggggccacgtcgcgccgcagaacaccttcctggacaccatcatccgcaagtttgagggccagagccgtaagttcatcatcgccaacgctcgggtggagaactgcgccgtcatctactgcaacgacggcttctgcgagctgtgcggccactcgcgggccgaggtgatgcagcgaccctgcacctgcgacttcctgcacgggccgcgcacgcagcgccgcgctgccgcgcagatcgcgcaggcactgctgggcgccgaggagcgcaaagtggaaatcgccttctaccggaaagatgggagctgcttcctatgtctggtggatgtggtgcccgtgaagaacgaggatggggctgtcatcatgttcatcctcaatttcgaggtggtgatggagaaggacatggtggggtccccggctcatgacaccaaccaccggggcccccccaccagctggctggccccaggccgcgccaagaccttccgcctgaagctgcccgcgctgctggcgctgacggcccgggagtcgtcggtgcggtcgggcggcgcgggcggcgcgggcgccccgggggccgtggtggtggacgtggacctgacgcccgcggcacccagcagcgagtcgctggccctggacgaagtgacagccatggacaaccacgtggcagggctcgggcccgcggaggagcggcgtgcgctggtgggtcccggctctccgccccgcagcgcgcccggccagctcccatcgccccgggcgcacagcctcaaccccgacgcctcgggctccagctgcagcctggcccggacgcgctcccgagaaagctgcgccagcgtgcgccgcgcctcgtcggccgacgacatcgaggccatgcgcgccggggtgctgcccccgccaccgcgccacgccagcaccggggccatgcacccactgcgcagcggcttgctcaactccacctcggactccgacctcgtgcgctaccgcaccattagcaagattccccaaatcaccctcaactttgtggacctcaagggcgaccccttcttggcttcgcccaccagtgaccgtgagatcatagcacctaagataaaggagcgaacccacaatgtcactgagaaggtcacccaggtcctgtccctgggcgccgacgtgctgcctgagtacaagctgcaggcaccgcgcatccaccgctggaccatcctgcattacagccccttcaaggccgtgtgggactggctcatcctgctgctggtcatctacacggctgtcttcacaccctactcggctgccttcctgctgaaggagacggaagaaggcccgcctgctaccgagtgtggctacgcctgccagccgctggctgtggtggacctcatcgtggacatcatgttcattgtggacatcctcatcaacttccgcaccacctacgtcaatgccaacgaggaggtggtcagccaccccggccgcatcgccgtccactacttcaagggctggttcctcatcgacatggtggccgccatccccttcgacctgctcatcttcggctctggctctgaggagctgatcgggctgctgaagactgcgcggctgctgcggctggtgcgcgtggcgcggaagctggatcgctactcagagtacggcgcggccgtgctgttcttgctcatgtgcacctttgcgctcatcgcgcactggctagcctgcatctggtacgccatcggcaacatggagcagccacacatggactcacgcatcggctggctgcacaacctgggcgaccagataggcaaaccctacaacagcagcggcctgggcggcccctccatcaaggacaagtatgtgacggcgctctacttcaccttcagcagcctcaccagtgtgggcttcggcaacgtctctcccaacaccaactcagagaagatcttctccatctgcgtcatgctcattggctccctcatgtatgctagcatcttcggcaacgtgtcggccatcatccagcggctgtactcgggcacagcccgctaccacacacagatgctgcgggtgcgggagttcatccgcttccaccagatccccaatcccctgcgccagcgcctcgaggagtacttccagcacgcctggtcctacaccaacggcatcgacatgaacgcggtgctgaagggcttccctgagtgcctgcaggctgacatctgcctgcacctgaaccgctcactgctgcagcactgcaaacccttccgaggggccaccaagggctgccttcgggccctggccatgaagttcaagaccacacatgcaccgccaggggacacactggtgcatgctggggacctgctcaccgccctgtacttcatctcccggggctccatcgagatcctgcggggcgacgtcgtcgtggccatcctggggaagaatgacatctttggggagcctctgaacctgtatgcaaggcctggcaagtcgaacggggatgtgcgggccctcacctactgtgacctacacaagatccatcgggacgacctgctggaggtgctggacatgtaccctgagttctccgaccacttctggtccagcctggagatcaccttcaacctgcgagataccaacatgatcccgggctcccccggcagtacggagttagagggtggcttcagtcggcaacgcaagcgcaagttgtccttccgcaggcgcacggacaaggacacggagcagccaggggaggtgtcggccttggggccgggccgggcgggggcagggccgagtagccggggccggccgggggggccgtggggggagagcccgtccagtggcccctccagccctgagagcagtgaggatgagggcccaggccgcagctccagccccctccgcctggtgcccttctccagccccaggccccccggagagccgccgggtggggagcccctgatggaggactgcgagaagagcagcgacacttgcaaccccctgtcaggcgccttctcaggagtgtccaacattttcagcttctggggggacagtcggggccgccagtaccaggagctccctcgatgccccgcccccacccccagcctcctcaacatccccctctccagcccgggtcggcggccccggggcgacgtggagagcaggctggatgccctccagcgccagctcaacaggctggagacccggctgagtgcagacatggccactgtcctgcagctgctacagaggcagatgacgctggtcccgcccgcctacagtgctgtgaccaccccggggcctggccccacttccacatccccgctgttgcccgtcagccccctccccaccctcaccttggactcgctttctcaggtttcccagttcatggcgtgtgaggagctgcccccgggggccccagagcttccccaagaaggccccacacgacgcctctccctaccgggccagctgggggccctcacctcccagcccctgcacagacacggctcggacccgggcagttagtggggctgcccagtgtggacacgtggctcacccagggatcaaggcgctgctgggccgctccccttggaggccctgctcaggaggccctgaccgtggaaggggagaggaactcgaaagcacagctcctcccccagcccttgggaccatcttctcctgcagtcccctgggccccagtgagaggggcaggggcagggccggcagtaggtggggcctgtggtccccccactgccctgagggcattagctggtctaactgcccggaggcacccggccctgggccttaggcacctcaaggacttttctgctatttactgctcttattgttaaggataataattaaggatcatatgaataattaatgaagatgctgatgactatgaataataaataattatcctgaggaga

SEQ ID NO: 161 - DNA, 3884 bp, Homo sapiens
  source 1..3884: mol_type = genomic DNA
  misc_feature 1..3884: note = cDNA of KCNH2 gene SNP c.1610G>A (p.Arg537Gln)
atgccggtgcggaggggccacgtcgcgccgcagaacaccttcctggacaccatcatccgcaagtttgagggccagagccgtaagttcatcatcgccaacgctcgggtggagaactgcgccgtcatctactgcaacgacggcttctgcgagctgtgcggctactcgcgggccgaggtgatgcagcgaccctgcacctgcgacttcctgcacgggccgcgcacgcagcgccgcgctgccgcgcagatcgcgcaggcactgctgggcgccgaggagcgcaaagtggaaatcgccttctaccggaaagatgggagctgcttcctatgtctggtggatgtggtgcccgtgaagaacgaggatggggctgtcatcatgttcatcctcaatttcgaggtggtgatggagaaggacatggtggggtccccggctcatgacaccaaccaccggggcccccccaccagctggctggccccaggccgcgccaagaccttccgcctgaagctgcccgcgctgctggcgctgacggcccgggagtcgtcggtgcggtcgggcggcgcgggcggcgcgggcgccccgggggccgtggtggtggacgtggacctgacgcccgcggcacccagcagcgagtcgctggccctggacgaagtgacagccatggacaaccacgtggcagggctcgggcccgcggaggagcggcgtgcgctggtgggtcccggctctccgccccgcagcgcgcccggccagctcccatcgccccgggcgcacagcctcaaccccgacgcctcgggctccagctgcagcctggcccggacgcgctcccgagaaagctgcgccagcgtgcgccgcgcctcgtcggccgacgacatcgaggccatgcgcgccggggtgctgcccccgccaccgcgccacgccagcaccggggccatgcacccactgcgcagcggcttgctcaactccacctcggactccgacctcgtgcgctaccgcaccattagcaagattccccaaatcaccctcaactttgtggacctcaagggcgaccccttcttggcttcgcccaccagtgaccgtgagatcatagcacctaagataaaggagcgaacccacaatgtcactgagaaggtcacccaggtcctgtccctgggcgccgacgtgctgcctgagtacaagctgcaggcaccgcgcatccaccgctggaccatcctgcattacagccccttcaaggccgtgtgggactggctcatcctgctgctggtcatctacacggctgtcttcacaccctactcggctgccttcctgctgaaggagacggaagaaggcccgcctgctaccgagtgtggctacgcctgccagccgctggctgtggtggacctcatcgtggacatcatgttcattgtggacatcctcatcaacttccgcaccacctacgtcaatgccaacgaggaggtggtcagccaccccggccgcatcgccgtccactacttcaagggctggttcctcatcgacatggtggccgccatccccttcgacctgctcatcttcggctctggctctgaggagctgatcgggctgctgaagactgcgcggctgctgcggctggtgcgcgtggcgcagaagctggatcgctactcagagtacggcgcggccgtgctgttcttgctcatgtgcacctttgcgctcatcgcgcactggctagcctgcatctggtacgccatcggcaacatggagcagccacacatggactcacgcatcggctggctgcacaacctgggcgaccagataggcaaaccctacaacagcagcggcctgggcggcccctccatcaaggacaagtatgtgacggcgctctacttcaccttcagcagcctcaccagtgtgggcttcggcaacgtctctcccaacaccaactcagagaagatcttctccatctgcgtcatgctcattggctccctcatgtatgctagcatcttcggcaacgtgtcggccatcatccagcggctgtactcgggcacagcccgctaccacacacagatgctgcgggtgcgggagttcatccgcttccaccagatccccaatcccctgcgccagcgcctcgaggagtacttccagcacgcctggtcctacaccaacggcatcgacatgaacgcggtgctgaagggcttccctgagtgcctgcaggctgacatctgcctgcacctgaaccgctcactgctgcagcactgcaaacccttccgaggggccaccaagggctgccttcgggccctggccatgaagttcaagaccacacatgcaccgccaggggacacactggtgcatgctggggacctgctcaccgccctgtacttcatctcccggggctccatcgagatcctgcggggcgacgtcgtcgtggccatcctggggaagaatgacatctttggggagcctctgaacctgtatgcaaggcctggcaagtcgaacggggatgtgcgggccctcacctactgtgacctacacaagatccatcgggacgacctgctggaggtgctggacatgtaccctgagttctccgaccacttctggtccagcctggagatcaccttcaacctgcgagataccaacatgatcccgggctcccccggcagtacggagttagagggtggcttcagtcggcaacgcaagcgcaagttgtccttccgcaggcgcacggacaaggacacggagcagccaggggaggtgtcggccttggggccgggccgggcgggggcagggccgagtagccggggccggccgggggggccgtggggggagagcccgtccagtggcccctccagccctgagagcagtgaggatgagggcccaggccgcagctccagccccctccgcctggtgcccttctccagccccaggccccccggagagccgccgggtggggagcccctgatggaggactgcgagaagagcagcgacacttgcaaccccctgtcaggcgccttctcaggagtgtccaacattttcagcttctggggggacagtcggggccgccagtaccaggagctccctcgatgccccgcccccacccccagcctcctcaacatccccctctccagcccgggtcggcggccccggggcgacgtggagagcaggctggatgccctccagcgccagctcaacaggctggagacccggctgagtgcagacatggccactgtcctgcagctgctacagaggcagatgacgctggtcccgcccgcctacagtgctgtgaccaccccggggcctggccccacttccacatccccgctgttgcccgtcagccccctccccaccctcaccttggactcgctttctcaggtttcccagttcatggcgtgtgaggagctgcccccgggggccccagagcttccccaagaaggccccacacgacgcctctccctaccgggccagctgggggccctcacctcccagcccctgcacagacacggctcggacccgggcagttagtggggctgcccagtgtggacacgtggctcacccagggatcaaggcgctgctgggccgctccccttggaggccctgctcaggaggccctgaccgtggaaggggagaggaactcgaaagcacagctcctcccccagcccttgggaccatcttctcctgcagtcccctgggccccagtgagaggggcaggggcagggccggcagtaggtggggcctgtggtccccccactgccctgagggcattagctggtctaactgcccggaggcacccggccctgggccttaggcacctcaaggacttttctgctatttactgctcttattgttaaggataataattaaggatcatatgaataattaatgaagatgctgatgactatgaataataaataattatcctgaggaga

SEQ ID NO: 162 - DNA, 3884 bp, Homo sapiens
  source 1..3884: mol_type = genomic DNA
  misc_feature 1..3884: note = cDNA of KCNH2 gene SNP c.1612A>G (p.Lys538Glu)
atgccggtgcggaggggccacgtcgcgccgcagaacaccttcctggacaccatcatccgcaagtttgagggccagagccgtaagttcatcatcgccaacgctcgggtggagaactgcgccgtcatctactgcaacgacggcttctgcgagctgtgcggctactcgcgggccgaggtgatgcagcgaccctgcacctgcgacttcctgcacgggccgcgcacgcagcgccgcgctgccgcgcagatcgcgcaggcactgctgggcgccgaggagcgcaaagtggaaatcgccttctaccggaaagatgggagctgcttcctatgtctggtggatgtggtgcccgtgaagaacgaggatggggctgtcatcatgttcatcctcaatttcgaggtggtgatggagaaggacatggtggggtccccggctcatgacaccaaccaccggggcccccccaccagctggctggccccaggccgcgccaagaccttccgcctgaagctgcccgcgctgctggcgctgacggcccgggagtcgtcggtgcggtcgggcggcgcgggcggcgcgggcgccccgggggccgtggtggtggacgtggacctgacgcccgcggcacccagcagcgagtcgctggccctggacgaagtgacagccatggacaaccacgtggcagggctcgggcccgcggaggagcggcgtgcgctggtgggtcccggctctccgccccgcagcgcgcccggccagctcccatcgccccgggcgcacagcctcaaccccgacgcctcgggctccagctgcagcctggcccggacgcgctcccgagaaagctgcgccagcgtgcgccgcgcctcgtcggccgacgacatcgaggccatgcgcgccggggtgctgcccccgccaccgcgccacgccagcaccggggccatgcacccactgcgcagcggcttgctcaactccacctcggactccgacctcgtgcgctaccgcaccattagcaagattccccaaatcaccctcaactttgtggacctcaagggcgaccccttcttggcttcgcccaccagtgaccgtgagatcatagcacctaagataaaggagcgaacccacaatgtcactgagaaggtcacccaggtcctgtccctgggcgccgacgtgctgcctgagtacaagctgcaggcaccgcgcatccaccgctggaccatcctgcattacagccccttcaaggccgtgtgggactggctcatcctgctgctggtcatctacacggctgtcttcacaccctactcggctgccttcctgctgaaggagacggaagaaggcccgcctgctaccgagtgtggctacgcctgccagccgctggctgtggtggacctcatcgtggacatcatgttcattgtggacatcctcatcaacttccgcaccacctacgtcaatgccaacgaggaggtggtcagccaccccggccgcatcgccgtccactacttcaagggctggttcctcatcgacatggtggccgccatccccttcgacctgctcatcttcggctctggctctgaggagctgatcgggctgctgaagactgcgcggctgctgcggctggtgcgcgtggcgcgggagctggatcgctactcagagtacggcgcggccgtgctgttcttgctcatgtgcacctttgcgctcatcgcgcactggctagcctgcatctggtacgccatcggcaacatggagcagccacacatggactcacgcatcggctggctgcacaacctgggcgaccagataggcaaaccctacaacagcagcggcctgggcggcccctccatcaaggacaagtatgtgacggcgctctacttcaccttcagcagcctcaccagtgtgggcttcggcaacgtctctcccaacaccaactcagagaagatcttctccatctgcgtcatgctcattggctccctcatgtatgctagcatcttcggcaacgtgtcggccatcatccagcggctgtactcgggcacagcccgctaccacacacagatgctgcgggtgcgggagttcatccgcttccaccagatccccaatcccctgcgccagcgcctcgaggagtacttccagcacgcctggtcctacaccaacggcatcgacatgaacgcggtgctgaagggcttccctgagtgcctgcaggctgacatctgcctgcacctgaaccgctcactgctgcagcactgcaaacccttccgaggggccaccaagggctgccttcgggccctggccatgaagttcaagaccacacatgcaccgccaggggacacactggtgcatgctggggacctgctcaccgccctgtacttcatctcccggggctccatcgagatcctgcggggcgacgtcgtcgtggccatcctggggaagaatgacatctttggggagcctctgaacctgtatgcaaggcctggcaagtcgaacggggatgtgcgggccctcacctactgtgacctacacaagatccatcgggacgacctgctggaggtgctggacatgtaccctgagttctccgaccacttctggtccagcctggagatcaccttcaacctgcgagataccaacatgatcccgggctcccccggcagtacggagttagagggtggcttcagtcggcaacgcaagcgcaagttgtccttccgcaggcgcacggacaaggacacggagcagccaggggaggtgtcggccttggggccgggccgggcgggggcagggccgagtagccggggccggccgggggggccgtggggggagagcccgtccagtggcccctccagccctgagagcagtgaggatgagggcccaggccgcagctccagccccctccgcctggtgcccttctccagccccaggccccccggagagccgccgggtggggagcccctgatggaggactgcgagaagagcagcgacacttgcaaccccctgtcaggcgccttctcaggagtgtccaacattttcagcttctggggggacagtcggggccgccagtaccaggagctccctcgatgccccgcccccacccccagcctcctcaacatccccctctccagcccgggtcggcggccccggggcgacgtggagagcaggctggatgccctccagcgccagctcaacaggctggagacccggctgagtgcagacatggccactgtcctgcagctgctacagaggcagatgacgctggtcccgcccgcctacagtgctgtgaccaccccggggcctggccccacttccacatccccgctgttgcccgtcagccccctccccaccctcaccttggactcgctttctcaggtttcccagttcatggcgtgtgaggagctgcccccgggggccccagagcttccccaagaaggccccacacgacgcctctccctaccgggccagctgggggccctcacctcccagcccctgcacagacacggctcggacccgggcagttagtggggctgcccagtgtggacacgtggctcacccagggatcaaggcgctgctgggccgctccccttggaggccctgctcaggaggccctgaccgtggaaggggagaggaactcgaaagcacagctcctcccccagcccttgggaccatcttctcctgcagtcccctgggccccagtgagaggggcaggggcagggccggcagtaggtggggcctgtggtccccccactgccctgagggcattagctggtctaactgcccggaggcacccggccctgggccttaggcacctcaaggacttttctgctatttactgctcttattgttaaggataataattaaggatcatatgaataattaatgaagatgctgatgactatgaataataaataattatcctgaggaga

SEQ ID NO: 163 - DNA, 3884 bp, Homo sapiens
  source 1..3884: mol_type = genomic DNA
  misc_feature 1..3884: note = cDNA of KCNH2 gene SNP c.1621C>T (p.Arg541Cys)
atgccggtgcggaggggccacgtcgcgccgcagaacaccttcctggacaccatcatccgcaagtttgagggccagagccgtaagttcatcatcgccaacgctcgggtggagaactgcgccgtcatctactgcaacgacggcttctgcgagctgtgcggctactcgcgggccgaggtgatgcagcgaccctgcacctgcgacttcctgcacgggccgcgcacgcagcgccgcgctgccgcgcagatcgcgcaggcactgctgggcgccgaggagcgcaaagtggaaatcgccttctaccggaaagatgggagctgcttcctatgtctggtggatgtggtgcccgtgaagaacgaggatggggctgtcatcatgttcatcctcaatttcgaggtggtgatggagaaggacatggtggggtccccggctcatgacaccaaccaccggggcccccccaccagctggctggccccaggccgcgccaagaccttccgcctgaagctgcccgcgctgctggcgctgacggcccgggagtcgtcggtgcggtcgggcggcgcgggcggcgcgggcgccccgggggccgtggtggtggacgtggacctgacgcccgcggcacccagcagcgagtcgctggccctggacgaagtgacagccatggacaaccacgtggcagggctcgggcccgcggaggagcggcgtgcgctggtgggtcccggctctccgccccgcagcgcgcccggccagctcccatcgccccgggcgcacagcctcaaccccgacgcctcgggctccagctgcagcctggcccggacgcgctcccgagaaagctgcgccagcgtgcgccgcgcctcgtcggccgacgacatcgaggccatgcgcgccggggtgctgcccccgccaccgcgccacgccagcaccggggccatgcacccactgcgcagcggcttgctcaactccacctcggactccgacctcgtgcgctaccgcaccattagcaagattccccaaatcaccctcaactttgtggacctcaagggcgaccccttcttggcttcgcccaccagtgaccgtgagatcatagcacctaagataaaggagcgaacccacaatgtcactgagaaggtcacccaggtcctgtccctgggcgccgacgtgctgcctgagtacaagctgcaggcaccgcgcatccaccgctggaccatcctgcattacagccccttcaaggccgtgtgggactggctcatcctgctgctggtcatctacacggctgtcttcacaccctactcggctgccttcctgctgaaggagacggaagaaggcccgcctgctaccgagtgtggctacgcctgccagccgctggctgtggtggacctcatcgtggacatcatgttcattgtggacatcctcatcaacttccgcaccacctacgtcaatgccaacgaggaggtggtcagccaccccggccgcatcgccgtccactacttcaagggctggttcctcatcgacatggtggccgccatccccttcgacctgctcatcttcggctctggctctgaggagctgatcgggctgctgaagactgcgcggctgctgcggctggtgcgcgtggcgcggaagctggattgctactcagagtacggcgcggccgtgctgttcttgctcatgtgcacctttgcgctcatcgcgcactggctagcctgcatctggtacgccatcggcaacatggagcagccacacatggactcacgcatcggctggctgcacaacctgggcgaccagataggcaaaccctacaacagcagcggcctgggcggcccctccatcaaggacaagtatgtgacggcgctctacttcaccttcagcagcctcaccagtgtgggcttcggcaacgtctctcccaacaccaactcagagaagatcttctccatctgcgtcatgctcattggctccctcatgtatgctagcatcttcggcaacgtgtcggccatcatccagcggctgtactcgggcacagcccgctaccacacacagatgctgcgggtgcgggagttcatccgcttccaccagatccccaatcccctgcgccagcgcctcgaggagtacttccagcacgcctggtcctacaccaacggcatcgacatgaacgcggtgctgaagggcttccctgagtgcctgcaggctgacatctgcctgcacctgaaccgctcactgctgcagcactgcaaacccttccgaggggccaccaagggctgccttcgggccctggccatgaagttcaagaccacacatgcaccgccaggggacacactggtgcatgctggggacctgctcaccgccctgtacttcatctcccggggctccatcgagatcctgcggggcgacgtcgtcgtggccatcctggggaagaatgacatctttggggagcctctgaacctgtatgcaaggcctggcaagtcgaacggggatgtgcgggccctcacctactgtgacctacacaagatccatcgggacgacctgctggaggtgctggacatgtaccctgagttctccgaccacttctggtccagcctggagatcaccttcaacctgcgagataccaacatgatcccgggctcccccggcagtacggagttagagggtggcttcagtcggcaacgcaagcgcaagttgtccttccgcaggcgcacggacaaggacacggagcagccaggggaggtgtcggccttggggccgggccgggcgggggcagggccgagtagccggggccggccgggggggccgtggggggagagcccgtccagtggcccctccagccctgagagcagtgaggatgagggcccaggccgcagctccagccccctccgcctggtgcccttctccagccccaggccccccggagagccgccgggtggggagcccctgatggaggactgcgagaagagcagcgacacttgcaaccccctgtcaggcgccttctcaggagtgtccaacattttcagcttctggggggacagtcggggccgccagtaccaggagctccctcgatgccccgcccccacccccagcctcctcaacatccccctctccagcccgggtcggcggccccggggcgacgtggagagcaggctggatgccctccagcgccagctcaacaggctggagacccggctgagtgcagacatggccactgtcctgcagctgctacagaggcagatgacgctggtcccgcccgcctacagtgctgtgaccaccccggggcctggccccacttccacatccccgctgttgcccgtcagccccctccccaccctcaccttggactcgctttctcaggtttcccagttcatggcgtgtgaggagctgcccccgggggccccagagcttccccaagaaggccccacacgacgcctctccctaccgggccagctgggggccctcacctcccagcccctgcacagacacggctcggacccgggcagttagtggggctgcccagtgtggacacgtggctcacccagggatcaaggcgctgctgggccgctccccttggaggccctgctcaggaggccctgaccgtggaaggggagaggaactcgaaagcacagctcctcccccagcccttgggaccatcttctcctgcagtcccctgggccccagtgagaggggcaggggcagggccggcagtaggtggggcctgtggtccccccactgccctgagggcattagctggtctaactgcccggaggcacccggccctgggccttaggcacctcaaggacttttctgctatttactgctcttattgttaaggataataattaaggatcatatgaataattaatgaagatgctgatgactatgaataataaataattatcctgaggaga

SEQ ID NO: 164 - DNA, 3884 bp, Homo sapiens
  source 1..3884: mol_type = genomic DNA
  misc_feature 1..3884: note = cDNA of KCNH2 gene SNP c.1622G>A (p.Arg541His)
atgccggtgcggaggggccacgtcgcgccgcagaacaccttcctggacaccatcatccgcaagtttgagggccagagccgtaagttcatcatcgccaacgctcgggtggagaactgcgccgtcatctactgcaacgacggcttctgcgagctgtgcggctactcgcgggccgaggtgatgcagcgaccctgcacctgcgacttcctgcacgggccgcgcacgcagcgccgcgctgccgcgcagatcgcgcaggcactgctgggcgccgaggagcgcaaagtggaaatcgccttctaccggaaagatgggagctgcttcctatgtctggtggatgtggtgcccgtgaagaacgaggatggggctgtcatcatgttcatcctcaatttcgaggtggtgatggagaaggacatggtggggtccccggctcatgacaccaaccaccggggcccccccaccagctggctggccccaggccgcgccaagaccttccgcctgaagctgcccgcgctgctggcgctgacggcccgggagtcgtcggtgcggtcgggcggcgcgggcggcgcgggcgccccgggggccgtggtggtggacgtggacctgacgcccgcggcacccagcagcgagtcgctggccctggacgaagtgacagccatggacaaccacgtggcagggctcgggcccgcggaggagcggcgtgcgctggtgggtcccggctctccgccccgcagcgcgcccggccagctcccatcgccccgggcgcacagcctcaaccccgacgcctcgggctccagctgcagcctggcccggacgcgctcccgagaaagctgcgccagcgtgcgccgcgcctcgtcggccgacgacatcgaggccatgcgcgccggggtgctgcccccgccaccgcgccacgccagcaccggggccatgcacccactgcgcagcggcttgctcaactccacctcggactccgacctcgtgcgctaccgcaccattagcaagattccccaaatcaccctcaactttgtggacctcaagggcgaccccttcttggcttcgcccaccagtgaccgtgagatcatagcacctaagataaaggagcgaacccacaatgtcactgagaaggtcacccaggtcctgtccctgggcgccgacgtgctgcctgagtacaagctgcaggcaccgcgcatccaccgctggaccatcctgcattacagccccttcaaggccgtgtgggactggctcatcctgctgctggtcatctacacggctgtcttcacaccctactcggctgccttcctgctgaaggagacggaagaaggcccgcctgctaccgagtgtggctacgcctgccagccgctggctgtggtggacctcatcgtggacatcatgttcattgtggacatcctcatcaacttccgcaccacctacgtcaatgccaacgaggaggtggtcagccaccccggccgcatcgccgtccactacttcaagggctggttcctcatcgacatggtggccgccatccccttcgacctgctcatcttcggctctggctctgaggagctgatcgggctgctgaagactgcgcggctgctgcggctggtgcgcgtggcgcggaagctggatcactactcagagtacggcgcggccgtgctgttcttgctcatgtgcacctttgcgctcatcgcgcactggctagcctgcatctggtacgccatcggcaacatggagcagccacacatggactcacgcatcggctggctgcacaacctgggcgaccagataggcaaaccctacaacagcagcggcctgggcggcccctccatcaaggacaagtatgtgacggcgctctacttcaccttcagcagcctcaccagtgtgggcttcggcaacgtctctcccaacaccaactcagagaagatcttctccatctgcgtcatgctcattggctccctcatgtatgctagcatcttcggcaacgtgtcggccatcatccagcggctgtactcgggcacagcccgctaccacacacagatgctgcgggtgcgggagttcatccgcttccaccagatccccaatcccctgcgccagcgcctcgaggagtacttccagcacgcctggtcctacaccaacggcatcgacatgaacgcggtgctgaagggcttccctgagtgcctgcaggctgacatctgcctgcacctgaaccgctcactgctgcagcactgcaaacccttccgaggggccaccaagggctgccttcgggccctggccatgaagttcaagaccacacatgcaccgccaggggacacactggtgcatgctggggacctgctcaccgccctgtacttcatctcccggggctccatcgagatcctgcggggcgacgtcgtcgtggccatcctggggaagaatgacatctttggggagcctctgaacctgtatgcaaggcctggcaagtcgaacggggatgtgcgggccctcacctactgtgacctacacaagatccatcgggacgacctgctggaggtgctggacatgtaccctgagttctccgaccacttctggtccagcctggagatcaccttcaacctgcgagataccaacatgatcccgggctcccccggcagtacggagttagagggtggcttcagtcggcaacgcaagcgcaagttgtccttccgcaggcgcacggacaaggacacggagcagccaggggaggtgtcggccttggggccgggccgggcgggggcagggccgagtagccggggccggccgggggggccgtggggggagagcccgtccagtggcccctccagccctgagagcagtgaggatgagggcccaggccgcagctccagccccctccgcctggtgcccttctccagccccaggccccccggagagccgccgggtggggagcccctgatggaggactgcgagaagagcagcgacacttgcaaccccctgtcaggcgccttctcaggagtgtccaacattttcagcttctggggggacagtcggggccgccagtaccaggagctccctcgatgccccgcccccacccccagcctcctcaacatccccctctccagcccgggtcggcggccccggggcgacgtggagagcaggctggatgccctccagcgccagctcaacaggctggagacccggctgagtgcagacatggccactgtcctgcagctgctacagaggcagatgacgctggtcccgcccgcctacagtgctgtgaccaccccggggcctggccccacttccacatccccgctgttgcccgtcagccccctccccaccctcaccttggactcgctttctcaggtttcccagttcatggcgtgtgaggagctgcccccgggggccccagagcttccccaagaaggccccacacgacgcctctccctaccgggccagctgggggccctcacctcccagcccctgcacagacacggctcggacccgggcagttagtggggctgcccagtgtggacacgtggctcacccagggatcaaggcgctgctgggccgctccccttggaggccctgctcaggaggccctgaccgtggaaggggagaggaactcgaaagcacagctcctcccccagcccttgggaccatcttctcctgcagtcccctgggccccagtgagaggggcaggggcagggccggcagtaggtggggcctgtggtccccccactgccctgagggcattagctggtctaactgcccggaggcacccggccctgggccttaggcacctcaaggacttttctgctatttactgctcttattgttaaggataataattaaggatcatatgaataattaatgaagatgctgatgactatgaataataaataattatcctgaggaga

SEQ ID NO: 165 - DNA, 3884 bp, Homo sapiens
  source 1..3884: mol_type = genomic DNA
  misc_feature 1..3884: note = cDNA of KCNH2 gene SNP c.162C>A (p.Tyr54Ter)
atgccggtgcggaggggccacgtcgcgccgcagaacaccttcctggacaccatcatccgcaagtttgagggccagagccgtaagttcatcatcgccaacgctcgggtggagaactgcgccgtcatctactgcaacgacggcttctgcgagctgtgcggctaatcgcgggccgaggtgatgcagcgaccctgcacctgcgacttcctgcacgggccgcgcacgcagcgccgcgctgccgcgcagatcgcgcaggcactgctgggcgccgaggagcgcaaagtggaaatcgccttctaccggaaagatgggagctgcttcctatgtctggtggatgtggtgcccgtgaagaacgaggatggggctgtcatcatgttcatcctcaatttcgaggtggtgatggagaaggacatggtggggtccccggctcatgacaccaaccaccggggcccccccaccagctggctggccccaggccgcgccaagaccttccgcctgaagctgcccgcgctgctggcgctgacggcccgggagtcgtcggtgcggtcgggcggcgcgggcggcgcgggcgccccgggggccgtggtggtggacgtggacctgacgcccgcggcacccagcagcgagtcgctggccctggacgaagtgacagccatggacaaccacgtggcagggctcgggcccgcggaggagcggcgtgcgctggtgggtcccggctctccgccccgcagcgcgcccggccagctcccatcgccccgggcgcacagcctcaaccccgacgcctcgggctccagctgcagcctggcccggacgcgctcccgagaaagctgcgccagcgtgcgccgcgcctcgtcggccgacgacatcgaggccatgcgcgccggggtgctgcccccgccaccgcgccacgccagcaccggggccatgcacccactgcgcagcggcttgctcaactccacctcggactccgacctcgtgcgctaccgcaccattagcaagattccccaaatcaccctcaactttgtggacctcaagggcgaccccttcttggcttcgcccaccagtgaccgtgagatcatagcacctaagataaaggagcgaacccacaatgtcactgagaaggtcacccaggtcctgtccctgggcgccgacgtgctgcctgagtacaagctgcaggcaccgcgcatccaccgctggaccatcctgcattacagccccttcaaggccgtgtgggactggctcatcctgctgctggtcatctacacggctgtcttcacaccctactcggctgccttcctgctgaaggagacggaagaaggcccgcctgctaccgagtgtggctacgcctgccagccgctggctgtggtggacctcatcgtggacatcatgttcattgtggacatcctcatcaacttccgcaccacctacgtcaatgccaacgaggaggtggtcagccaccccggccgcatcgccgtccactacttcaagggctggttcctcatcgacatggtggccgccatccccttcgacctgctcatcttcggctctggctctgaggagctgatcgggctgctgaagactgcgcggctgctgcggctggtgcgcgtggcgcggaagctggatcgctactcagagtacggcgcggccgtgctgttcttgctcatgtgcacctttgcgctcatcgcgcactggctagcctgcatctggtacgccatcggcaacatggagcagccacacatggactcacgcatcggctggctgcacaacctgggcgaccagataggcaaaccctacaacagcagcggcctgggcggcccctccatcaaggacaagtatgtgacggcgctctacttcaccttcagcagcctcaccagtgtgggcttcggcaacgtctctcccaacaccaactcagagaagatcttctccatctgcgtcatgctcattggctccctcatgtatgctagcatcttcggcaacgtgtcggccatcatccagcggctgtactcgggcacagcccgctaccacacacagatgctgcgggtgcgggagttcatccgcttccaccagatccccaatcccctgcgccagcgcctcgaggagtacttccagcacgcctggtcctacaccaacggcatcgacatgaacgcggtgctgaagggcttccctgagtgcctgcaggctgacatctgcctgcacctgaaccgctcactgctgcagcactgcaaacccttccgaggggccaccaagggctgccttcgggccctggccatgaagttcaagaccacacatgcaccgccaggggacacactggtgcatgctggggacctgctcaccgccctgtacttcatctcccggggctccatcgagatcctgcggggcgacgtcgtcgtggccatcctggggaagaatgacatctttggggagcctctgaacctgtatgcaaggcctggcaagtcgaacggggatgtgcgggccctcacctactgtgacctacacaagatccatcgggacgacctgctggaggtgctggacatgtaccctgagttctccgaccacttctggtccagcctggagatcaccttcaacctgcgagataccaacatgatcccgggctcccccggcagtacggagttagagggtggcttcagtcggcaacgcaagcgcaagttgtccttccgcaggcgcacggacaaggacacggagcagccaggggaggtgtcggccttggggccgggccgggcgggggcagggccgagtagccggggccggccgggggggccgtggggggagagcccgtccagtggcccctccagccctgagagcagtgaggatgagggcccaggccgcagctccagccccctccgcctggtgcccttctccagccccaggccccccggagagccgccgggtggggagcccctgatggaggactgcgagaagagcagcgacacttgcaaccccctgtcaggcgccttctcaggagtgtccaacattttcagcttctggggggacagtcggggccgccagtaccaggagctccctcgatgccccgcccccacccccagcctcctcaacatccccctctccagcccgggtcggcggccccggggcgacgtggagagcaggctggatgccctccagcgccagctcaacaggctggagacccggctgagtgcagacatggccactgtcctgcagctgctacagaggcagatgacgctggtcccgcccgcctacagtgctgtgaccaccccggggcctggccccacttccacatccccgctgttgcccgtcagccccctccccaccctcaccttggactcgctttctcaggtttcccagttcatggcgtgtgaggagctgcccccgggggccccagagcttccccaagaaggccccacacgacgcctctccctaccgggccagctgggggccctcacctcccagcccctgcacagacacggctcggacccgggcagttagtggggctgcccagtgtggacacgtggctcacccagggatcaaggcgctgctgggccgctccccttggaggccctgctcaggaggccctgaccgtggaaggggagaggaactcgaaagcacagctcctcccccagcccttgggaccatcttctcctgcagtcccctgggccccagtgagaggggcaggggcagggccggcagtaggtggggcctgtggtccccccactgccctgagggcattagctggtctaactgcccggaggcacccggccctgggccttaggcacctcaaggacttttctgctatttactgctcttattgttaaggataataattaaggatcatatgaataattaatgaagatgctgatgactatgaataataaataattatcctgaggaga

SEQ ID NO: 166 - DNA, 3884 bp, Homo sapiens
  source 1..3884: mol_type = genomic DNA
  misc_feature 1..3884: note = cDNA of KCNH2 gene SNP c.162C>G (p.Tyr54Ter)
atgccggtgcggaggggccacgtcgcgccgcagaacaccttcctggacaccatcatccgcaagtttgagggccagagccgtaagttcatcatcgccaacgctcgggtggagaactgcgccgtcatctactgcaacgacggcttctgcgagctgtgcggctagtcgcgggccgaggtgatgcagcgaccctgcacctgcgacttcctgcacgggccgcgcacgcagcgccgcgctgccgcgcagatcgcgcaggcactgctgggcgccgaggagcgcaaagtggaaatcgccttctaccggaaagatgggagctgcttcctatgtctggtggatgtggtgcccgtgaagaacgaggatggggctgtcatcatgttcatcctcaatttcgaggtggtgatggagaaggacatggtggggtccccggctcatgacaccaaccaccggggcccccccaccagctggctggccccaggccgcgccaagaccttccgcctgaagctgcccgcgctgctggcgctgacggcccgggagtcgtcggtgcggtcgggcggcgcgggcggcgcgggcgccccgggggccgtggtggtggacgtggacctgacgcccgcggcacccagcagcgagtcgctggccctggacgaagtgacagccatggacaaccacgtggcagggctcgggcccgcggaggagcggcgtgcgctggtgggtcccggctctccgccccgcagcgcgcccggccagctcccatcgccccgggcgcacagcctcaaccccgacgcctcgggctccagctgcagcctggcccggacgcgctcccgagaaagctgcgccagcgtgcgccgcgcctcgtcggccgacgacatcgaggccatgcgcgccggggtgctgcccccgccaccgcgccacgccagcaccggggccatgcacccactgcgcagcggcttgctcaactccacctcggactccgacctcgtgcgctaccgcaccattagcaagattccccaaatcaccctcaactttgtggacctcaagggcgaccccttcttggcttcgcccaccagtgaccgtgagatcatagcacctaagataaaggagcgaacccacaatgtcactgagaaggtcacccaggtcctgtccctgggcgccgacgtgctgcctgagtacaagctgcaggcaccgcgcatccaccgctggaccatcctgcattacagccccttcaaggccgtgtgggactggctcatcctgctgctggtcatctacacggctgtcttcacaccctactcggctgccttcctgctgaaggagacggaagaaggcccgcctgctaccgagtgtggctacgcctgccagccgctggctgtggtggacctcatcgtggacatcatgttcattgtggacatcctcatcaacttccgcaccacctacgtcaatgccaacgaggaggtggtcagccaccccggccgcatcgccgtccactacttcaagggctggttcctcatcgacatggtggccgccatccccttcgacctgctcatcttcggctctggctctgaggagctgatcgggctgctgaagactgcgcggctgctgcggctggtgcgcgtggcgcggaagctggatcgctactcagagtacggcgcggccgtgctgttcttgctcatgtgcacctttgcgctcatcgcgcactggctagcctgcatctggtacgccatcggcaacatggagcagccacacatggactcacgcatcggctggctgcacaacctgggcgaccagataggcaaaccctacaacagcagcggcctgggcggcccctccatcaaggacaagtatgtgacggcgctctacttcaccttcagcagcctcaccagtgtgggcttcggcaacgtctctcccaacaccaactcagagaagatcttctccatctgcgtcatgctcattggctccctcatgtatgctagcatcttcggcaacgtgtcggccatcatccagcggctgtactcgggcacagcccgctaccacacacagatgctgcgggtgcgggagttcatccgcttccaccagatccccaatcccctgcgccagcgcctcgaggagtacttccagcacgcctggtcctacaccaacggcatcgacatgaacgcggtgctgaagggcttccctgagtgcctgcaggctgacatctgcctgcacctgaaccgctcactgctgcagcactgcaaacccttccgaggggccaccaagggctgccttcgggccctggccatgaagttcaagaccacacatgcaccgccaggggacacactggtgcatgctggggacctgctcaccgccctgtacttcatctcccggggctccatcgagatcctgcggggcgacgtcgtcgtggccatcctggggaagaatgacatctttggggagcctctgaacctgtatgcaaggcctggcaagtcgaacggggatgtgcgggccctcacctactgtgacctacacaagatccatcgggacgacctgctggaggtgctggacatgtaccctgagttctccgaccacttctggtccagcctggagatcaccttcaacctgcgagataccaacatgatcccgggctcccccggcagtacggagttagagggtggcttcagtcggcaacgcaagcgcaagttgtccttccgcaggcgcacggacaaggacacggagcagccaggggaggtgtcggccttggggccgggccgggcgggggcagggccgagtagccggggccggccgggggggccgtggggggagagcccgtccagtggcccctccagccctgagagcagtgaggatgagggcccaggccgcagctccagccccctccgcctggtgcccttctccagccccaggccccccggagagccgccgggtggggagcccctgatggaggactgcgagaagagcagcgacacttgcaaccccctgtcaggcgccttctcaggagtgtccaacattttcagcttctggggggacagtcggggccgccagtaccaggagctccctcgatgccccgcccccacccccagcctcctcaacatccccctctccagcccgggtcggcggccccggggcgacgtggagagcaggctggatgccctccagcgccagctcaacaggctggagacccggctgagtgcagacatggccactgtcctgcagctgctacagaggcagatgacgctggtcccgcccgcctacagtgctgtgaccaccccggggcctggccccacttccacatccccgctgttgcccgtcagccccctccccaccctcaccttggactcgctttctcaggtttcccagttcatggcgtgtgaggagctgcccccgggggccccagagcttccccaagaaggccccacacgacgcctctccctaccgggccagctgggggccctcacctcccagcccctgcacagacacggctcggacccgggcagttagtggggctgcccagtgtggacacgtggctcacccagggatcaaggcgctgctgggccgctccccttggaggccctgctcaggaggccctgaccgtggaaggggagaggaactcgaaagcacagctcctcccccagcccttgggaccatcttctcctgcagtcccctgggccccagtgagaggggcaggggcagggccggcagtaggtggggcctgtggtccccccactgccctgagggcattagctggtctaactgcccggaggcacccggccctgggccttaggcacctcaaggacttttctgctatttactgctcttattgttaaggataataattaaggatcatatgaataattaatgaagatgctgatgactatgaataataaataattatcctgaggaga

SEQ ID NO: 167 - DNA, 3884 bp, Homo sapiens
  source 1..3884: mol_type = genomic DNA
  misc_feature 1..3884: note = cDNA of KCNH2 gene SNP c.1639G>A (p.Ala547Thr)
atgccggtgcggaggggccacgtcgcgccgcagaacaccttcctggacaccatcatccgcaagtttgagggccagagccgtaagttcatcatcgccaacgctcgggtggagaactgcgccgtcatctactgcaacgacggcttctgcgagctgtgcggctactcgcgggccgaggtgatgcagcgaccctgcacctgcgacttcctgcacgggccgcgcacgcagcgccgcgctgccgcgcagatcgcgcaggcactgctgggcgccgaggagcgcaaagtggaaatcgccttctaccggaaagatgggagctgcttcctatgtctggtggatgtggtgcccgtgaagaacgaggatggggctgtcatcatgttcatcctcaatttcgaggtggtgatggagaaggacatggtggggtccccggctcatgacaccaaccaccggggcccccccaccagctggctggccccaggccgcgccaagaccttccgcctgaagctgcccgcgctgctggcgctgacggcccgggagtcgtcggtgcggtcgggcggcgcgggcggcgcgggcgccccgggggccgtggtggtggacgtggacctgacgcccgcggcacccagcagcgagtcgctggccctggacgaagtgacagccatggacaaccacgtggcagggctcgggcccgcggaggagcggcgtgcgctggtgggtcccggctctccgccccgcagcgcgcccggccagctcccatcgccccgggcgcacagcctcaaccccgacgcctcgggctccagctgcagcctggcccggacgcgctcccgagaaagctgcgccagcgtgcgccgcgcctcgtcggccgacgacatcgaggccatgcgcgccggggtgctgcccccgccaccgcgccacgccagcaccggggccatgcacccactgcgcagcggcttgctcaactccacctcggactccgacctcgtgcgctaccgcaccattagcaagattccccaaatcaccctcaactttgtggacctcaagggcgaccccttcttggcttcgcccaccagtgaccgtgagatcatagcacctaagataaaggagcgaacccacaatgtcactgagaaggtcacccaggtcctgtccctgggcgccgacgtgctgcctgagtacaagctgcaggcaccgcgcatccaccgctggaccatcctgcattacagccccttcaaggccgtgtgggactggctcatcctgctgctggtcatctacacggctgtcttcacaccctactcggctgccttcctgctgaaggagacggaagaaggcccgcctgctaccgagtgtggctacgcctgccagccgctggctgtggtggacctcatcgtggacatcatgttcattgtggacatcctcatcaacttccgcaccacctacgtcaatgccaacgaggaggtggtcagccaccccggccgcatcgccgtccactacttcaagggctggttcctcatcgacatggtggccgccatccccttcgacctgctcatcttcggctctggctctgaggagctgatcgggctgctgaagactgcgcggctgctgcggctggtgcgcgtggcgcggaagctggatcgctactcagagtacggcacggccgtgctgttcttgctcatgtgcacctttgcgctcatcgcgcactggctagcctgcatctggtacgccatcggcaacatggagcagccacacatggactcacgcatcggctggctgcacaacctgggcgaccagataggcaaaccctacaacagcagcggcctgggcggcccctccatcaaggacaagtatgtgacggcgctctacttcaccttcagcagcctcaccagtgtgggcttcggcaacgtctctcccaacaccaactcagagaagatcttctccatctgcgtcatgctcattggctccctcatgtatgctagcatcttcggcaacgtgtcggccatcatccagcggctgtactcgggcacagcccgctaccacacacagatgctgcgggtgcgggagttcatccgcttccaccagatccccaatcccctgcgccagcgcctcgaggagtacttccagcacgcctggtcctacaccaacggcatcgacatgaacgcggtgctgaagggcttccctgagtgcctgcaggctgacatctgcctgcacctgaaccgctcactgctgcagcactgcaaacccttccgaggggccaccaagggctgccttcgggccctggccatgaagttcaagaccacacatgcaccgccaggggacacactggtgcatgctggggacctgctcaccgccctgtacttcatctcccggggctccatcgagatcctgcggggcgacgtcgtcgtggccatcctggggaagaatgacatctttggggagcctctgaacctgtatgcaaggcctggcaagtcgaacggggatgtgcgggccctcacctactgtgacctacacaagatccatcgggacgacctgctggaggtgctggacatgtaccctgagttctccgaccacttctggtccagcctggagatcaccttcaacctgcgagataccaacatgatcccgggctcccccggcagtacggagttagagggtggcttcagtcggcaacgcaagcgcaagttgtccttccgcaggcgcacggacaaggacacggagcagccaggggaggtgtcggccttggggccgggccgggcgggggcagggccgagtagccggggccggccgggggggccgtggggggagagcccgtccagtggcccctccagccctgagagcagtgaggatgagggcccaggccgcagctccagccccctccgcctggtgcccttctccagccccaggccccccggagagccgccgggtggggagcccctgatggaggactgcgagaagagcagcgacacttgcaaccccctgtcaggcgccttctcaggagtgtccaacattttcagcttctggggggacagtcggggccgccagtaccaggagctccctcgatgccccgcccccacccccagcctcctcaacatccccctctccagcccgggtcggcggccccggggcgacgtggagagcaggctggatgccctccagcgccagctcaacaggctggagacccggctgagtgcagacatggccactgtcctgcagctgctacagaggcagatgacgctggtcccgcccgcctacagtgctgtgaccaccccggggcctggccccacttccacatccccgctgttgcccgtcagccccctccccaccctcaccttggactcgctttctcaggtttcccagttcatggcgtgtgaggagctgcccccgggggccccagagcttccccaagaaggccccacacgacgcctctccctaccgggccagctgggggccctcacctcccagcccctgcacagacacggctcggacccgggcagttagtggggctgcccagtgtggacacgtggctcacccagggatcaaggcgctgctgggccgctccccttggaggccctgctcaggaggccctgaccgtggaaggggagaggaactcgaaagcacagctcctcccccagcccttgggaccatcttctcctgcagtcccctgggccccagtgagaggggcaggggcagggccggcagtaggtggggcctgtggtccccccactgccctgagggcattagctggtctaactgcccggaggcacccggccctgggccttaggcacctcaaggacttttctgctatttactgctcttattgttaaggataataattaaggatcatatgaataattaatgaagatgctgatgactatgaataataaataattatcctgaggaga

SEQ ID NO: 168 - DNA, 3884 bp, Homo sapiens
  source 1..3884: mol_type = genomic DNA
  misc_feature 1..3884: note = cDNA of KCNH2 gene SNP c.1640C>T (p.Ala547Val)
atgccggtgcggaggggccacgtcgcgccgcagaacaccttcctggacaccatcatccgcaagtttgagggccagagccgtaagttcatcatcgccaacgctcgggtggagaactgcgccgtcatctactgcaacgacggcttctgcgagctgtgcggctactcgcgggccgaggtgatgcagcgaccctgcacctgcgacttcctgcacgggccgcgcacgcagcgccgcgctgccgcgcagatcgcgcaggcactgctgggcgccgaggagcgcaaagtggaaatcgccttctaccggaaagatgggagctgcttcctatgtctggtggatgtggtgcccgtgaagaacgaggatggggctgtcatcatgttcatcctcaatttcgaggtggtgatggagaaggacatggtggggtccccggctcatgacaccaaccaccggggcccccccaccagctggctggccccaggccgcgccaagaccttccgcctgaagctgcccgcgctgctggcgctgacggcccgggagtcgtcggtgcggtcgggcggcgcgggcggcgcgggcgccccgggggccgtggtggtggacgtggacctgacgcccgcggcacccagcagcgagtcgctggccctggacgaagtgacagccatggacaaccacgtggcagggctcgggcccgcggaggagcggcgtgcgctggtgggtcccggctctccgccccgcagcgcgcccggccagctcccatcgccccgggcgcacagcctcaaccccgacgcctcgggctccagctgcagcctggcccggacgcgctcccgagaaagctgcgccagcgtgcgccgcgcctcgtcggccgacgacatcgaggccatgcgcgccggggtgctgcccccgccaccgcgccacgccagcaccggggccatgcacccactgcgcagcggcttgctcaactccacctcggactccgacctcgtgcgctaccgcaccattagcaagattccccaaatcaccctcaactttgtggacctcaagggcgaccccttcttggcttcgcccaccagtgaccgtgagatcatagcacctaagataaaggagcgaacccacaatgtcactgagaaggtcacccaggtcctgtccctgggcgccgacgtgctgcctgagtacaagctgcaggcaccgcgcatccaccgctggaccatcctgcattacagccccttcaaggccgtgtgggactggctcatcctgctgctggtcatctacacggctgtcttcacaccctactcggctgccttcctgctgaaggagacggaagaaggcccgcctgctaccgagtgtggctacgcctgccagccgctggctgtggtggacctcatcgtggacatcatgttcattgtggacatcctcatcaacttccgcaccacctacgtcaatgccaacgaggaggtggtcagccaccccggccgcatcgccgtccactacttcaagggctggttcctcatcgacatggtggccgccatccccttcgacctgctcatcttcggctctggctctgaggagctgatcgggctgctgaagactgcgcggctgctgcggctggtgcgcgtggcgcggaagctggatcgctactcagagtacggcgtggccgtgctgttcttgctcatgtgcacctttgcgctcatcgcgcactggctagcctgcatctggtacgccatcggcaacatggagcagccacacatggactcacgcatcggctggctgcacaacctgggcgaccagataggcaaaccctacaacagcagcggcctgggcggcccctccatcaaggacaagtatgtgacggcgctctacttcaccttcagcagcctcaccagtgtgggcttcggcaacgtctctcccaacaccaactcagagaagatcttctccatctgcgtcatgctcattggctccctcatgtatgctagcatcttcggcaacgtgtcggccatcatccagcggctgtactcgggcacagcccgctaccacacacagatgctgcgggtgcgggagttcatccgcttccaccagatccccaatcccctgcgccagcgcctcgaggagtacttccagcacgcctggtcctacaccaacggcatcgacatgaacgcggtgctgaagggcttccctgagtgcctgcaggctgacatctgcctgcacctgaaccgctcactgctgcagcactgcaaacccttccgaggggccaccaagggctgccttcgggccctggccatgaagttcaagaccacacatgcaccgccaggggacacactggtgcatgctggggacctgctcaccgccctgtacttcatctcccggggctccatcgagatcctgcggggcgacgtcgtcgtggccatcctggggaagaatgacatctttggggagcctctgaacctgtatgcaaggcctggcaagtcgaacggggatgtgcgggccctcacctactgtgacctacacaagatccatcgggacgacctgctggaggtgctggacatgtaccctgagttctccgaccacttctggtccagcctggagatcaccttcaacctgcgagataccaacatgatcccgggctcccccggcagtacggagttagagggtggcttcagtcggcaacgcaagcgcaagttgtccttccgcaggcgcacggacaaggacacggagcagccaggggaggtgtcggccttggggccgggccgggcgggggcagggccgagtagccggggccggccgggggggccgtggggggagagcccgtccagtggcccctccagccctgagagcagtgaggatgagggcccaggccgcagctccagccccctccgcctggtgcccttctccagccccaggccccccggagagccgccgggtggggagcccctgatggaggactgcgagaagagcagcgacacttgcaaccccctgtcaggcgccttctcaggagtgtccaacattttcagcttctggggggacagtcggggccgccagtaccaggagctccctcgatgccccgcccccacccccagcctcctcaacatccccctctccagcccgggtcggcggccccggggcgacgtggagagcaggctggatgccctccagcgccagctcaacaggctggagacccggctgagtgcagacatggccactgtcctgcagctgctacagaggcagatgacgctggtcccgcccgcctacagtgctgtgaccaccccggggcctggccccacttccacatccccgctgttgcccgtcagccccctccccaccctcaccttggactcgctttctcaggtttcccagttcatggcgtgtgaggagctgcccccgggggccccagagcttccccaagaaggccccacacgacgcctctccctaccgggccagctgggggccctcacctcccagcccctgcacagacacggctcggacccgggcagttagtggggctgcccagtgtggacacgtggctcacccagggatcaaggcgctgctgggccgctccccttggaggccctgctcaggaggccctgaccgtggaaggggagaggaactcgaaagcacagctcctcccccagcccttgggaccatcttctcctgcagtcccctgggccccagtgagaggggcaggggcagggccggcagtaggtggggcctgtggtccccccactgccctgagggcattagctggtctaactgcccggaggcacccggccctgggccttaggcacctcaaggacttttctgctatttactgctcttattgttaaggataataattaaggatcatatgaataattaatgaagatgctgatgactatgaataataaataattatcctgaggaga

SEQ ID NO: 169 - DNA, 3884 bp, Homo sapiens
  source 1..3884: mol_type = genomic DNA
  misc_feature 1..3884: note = cDNA of KCNH2 gene SNP c.1645G>A (p.Val549Met)
atgccggtgcggaggggccacgtcgcgccgcagaacaccttcctggacaccatcatccgcaagtttgagggccagagccgtaagttcatcatcgccaacgctcgggtggagaactgcgccgtcatctactgcaacgacggcttctgcgagctgtgcggctactcgcgggccgaggtgatgcagcgaccctgcacctgcgacttcctgcacgggccgcgcacgcagcgccgcgctgccgcgcagatcgcgcaggcactgctgggcgccgaggagcgcaaagtggaaatcgccttctaccggaaagatgggagctgcttcctatgtctggtggatgtggtgcccgtgaagaacgaggatggggctgtcatcatgttcatcctcaatttcgaggtggtgatggagaaggacatggtggggtccccggctcatgacaccaaccaccggggcccccccaccagctggctggccccaggccgcgccaagaccttccgcctgaagctgcccgcgctgctggcgctgacggcccgggagtcgtcggtgcggtcgggcggcgcgggcggcgcgggcgccccgggggccgtggtggtggacgtggacctgacgcccgcggcacccagcagcgagtcgctggccctggacgaagtgacagccatggacaaccacgtggcagggctcgggcccgcggaggagcggcgtgcgctggtgggtcccggctctccgccccgcagcgcgcccggccagctcccatcgccccgggcgcacagcctcaaccccgacgcctcgggctccagctgcagcctggcccggacgcgctcccgagaaagctgcgccagcgtgcgccgcgcctcgtcggccgacgacatcgaggccatgcgcgccggggtgctgcccccgccaccgcgccacgccagcaccggggccatgcacccactgcgcagcggcttgctcaactccacctcggactccgacctcgtgcgctaccgcaccattagcaagattccccaaatcaccctcaactttgtggacctcaagggcgaccccttcttggcttcgcccaccagtgaccgtgagatcatagcacctaagataaaggagcgaacccacaatgtcactgagaaggtcacccaggtcctgtccctgggcgccgacgtgctgcctgagtacaagctgcaggcaccgcgcatccaccgctggaccatcctgcattacagccccttcaaggccgtgtgggactggctcatcctgctgctggtcatctacacggctgtcttcacaccctactcggctgccttcctgctgaaggagacggaagaaggcccgcctgctaccgagtgtggctacgcctgccagccgctggctgtggtggacctcatcgtggacatcatgttcattgtggacatcctcatcaacttccgcaccacctacgtcaatgccaacgaggaggtggtcagccaccccggccgcatcgccgtccactacttcaagggctggttcctcatcgacatggtggccgccatccccttcgacctgctcatcttcggctctggctctgaggagctgatcgggctgctgaagactgcgcggctgctgcggctggtgcgcgtggcgcggaagctggatcgctactcagagtacggcgcggccatgctgttcttgctcatgtgcacctttgcgctcatcgcgcactggctagcctgcatctggtacgccatcggcaacatggagcagccacacatggactcacgcatcggctggctgcacaacctgggcgaccagataggcaaaccctacaacagcagcggcctgggcggcccctccatcaaggacaagtatgtgacggcgctctacttcaccttcagcagcctcaccagtgtgggcttcggcaacgtctctcccaacaccaactcagagaagatcttctccatctgcgtcatgctcattggctccctcatgtatgctagcatcttcggcaacgtgtcggccatcatccagcggctgtactcgggcacagcccgctaccacacacagatgctgcgggtgcgggagttcatccgcttccaccagatccccaatcccctgcgccagcgcctcgaggagtacttccagcacgcctggtcctacaccaacggcatcgacatgaacgcggtgctgaagggcttccctgagtgcctgcaggctgacatctgcctgcacctgaaccgctcactgctgcagcactgcaaacccttccgaggggccaccaagggctgccttcgggccctggccatgaagttcaagaccacacatgcaccgccaggggacacactggtgcatgctggggacctgctcaccgccctgtacttcatctcccggggctccatcgagatcctgcggggcgacgtcgtcgtggccatcctggggaagaatgacatctttggggagcctctgaacctgtatgcaaggcctggcaagtcgaacggggatgtgcgggccctcacctactgtgacctacacaagatccatcgggacgacctgctggaggtgctggacatgtaccctgagttctccgaccacttctggtccagcctggagatcaccttcaacctgcgagataccaacatgatcccgggctcccccggcagtacggagttagagggtggcttcagtcggcaacgcaagcgcaagttgtccttccgcaggcgcacggacaaggacacggagcagccaggggaggtgtcggccttggggccgggccgggcgggggcagggccgagtagccggggccggccgggggggccgtggggggagagcccgtccagtggcccctccagccctgagagcagtgaggatgagggcccaggccgcagctccagccccctccgcctggtgcccttctccagccccaggccccccggagagccgccgggtggggagcccctgatggaggactgcgagaagagcagcgacacttgcaaccccctgtcaggcgccttctcaggagtgtccaacattttcagcttctggggggacagtcggggccgccagtaccaggagctccctcgatgccccgcccccacccccagcctcctcaacatccccctctccagcccgggtcggcggccccggggcgacgtggagagcaggctggatgccctccagcgccagctcaacaggctggagacccggctgagtgcagacatggccactgtcctgcagctgctacagaggcagatgacgctggtcccgcccgcctacagtgctgtgaccaccccggggcctggccccacttccacatccccgctgttgcccgtcagccccctccccaccctcaccttggactcgctttctcaggtttcccagttcatggcgtgtgaggagctgcccccgggggccccagagcttccccaagaaggccccacacgacgcctctccctaccgggccagctgggggccctcacctcccagcccctgcacagacacggctcggacccgggcagttagtggggctgcccagtgtggacacgtggctcacccagggatcaaggcgctgctgggccgctccccttggaggccctgctcaggaggccctgaccgtggaaggggagaggaactcgaaagcacagctcctcccccagcccttgggaccatcttctcctgcagtcccctgggccccagtgagaggggcaggggcagggccggcagtaggtggggcctgtggtccccccactgccctgagggcattagctggtctaactgcccggaggcacccggccctgggccttaggcacctcaaggacttttctgctatttactgctcttattgttaaggataataattaaggatcatatgaataattaatgaagatgctgatgactatgaataataaataattatcctgaggaga

SEQ ID NO: 170 - DNA, 3884 bp, Homo sapiens
  source 1..3884: mol_type = genomic DNA
  misc_feature 1..3884: note = cDNA of KCNH2 gene SNP c.164C>A (p.Ser55Ter)
atgccggtgcggaggggccacgtcgcgccgcagaacaccttcctggacaccatcatccgcaagtttgagggccagagccgtaagttcatcatcgccaacgctcgggtggagaactgcgccgtcatctactgcaacgacggcttctgcgagctgtgcggctactagcgggccgaggtgatgcagcgaccctgcacctgcgacttcctgcacgggccgcgcacgcagcgccgcgctgccgcgcagatcgcgcaggcactgctgggcgccgaggagcgcaaagtggaaatcgccttctaccggaaagatgggagctgcttcctatgtctggtggatgtggtgcccgtgaagaacgaggatggggctgtcatcatgttcatcctcaatttcgaggtggtgatggagaaggacatggtggggtccccggctcatgacaccaaccaccggggcccccccaccagctggctggccccaggccgcgccaagaccttccgcctgaagctgcccgcgctgctggcgctgacggcccgggagtcgtcggtgcggtcgggcggcgcgggcggcgcgggcgccccgggggccgtggtggtggacgtggacctgacgcccgcggcacccagcagcgagtcgctggccctggacgaagtgacagccatggacaaccacgtggcagggctcgggcccgcggaggagcggcgtgcgctggtgggtcccggctctccgccccgcagcgcgcccggccagctcccatcgccccgggcgcacagcctcaaccccgacgcctcgggctccagctgcagcctggcccggacgcgctcccgagaaagctgcgccagcgtgcgccgcgcctcgtcggccgacgacatcgaggccatgcgcgccggggtgctgcccccgccaccgcgccacgccagcaccggggccatgcacccactgcgcagcggcttgctcaactccacctcggactccgacctcgtgcgctaccgcaccattagcaagattccccaaatcaccctcaactttgtggacctcaagggcgaccccttcttggcttcgcccaccagtgaccgtgagatcatagcacctaagataaaggagcgaacccacaatgtcactgagaaggtcacccaggtcctgtccctgggcgccgacgtgctgcctgagtacaagctgcaggcaccgcgcatccaccgctggaccatcctgcattacagccccttcaaggccgtgtgggactggctcatcctgctgctggtcatctacacggctgtcttcacaccctactcggctgccttcctgctgaaggagacggaagaaggcccgcctgctaccgagtgtggctacgcctgccagccgctggctgtggtggacctcatcgtggacatcatgttcattgtggacatcctcatcaacttccgcaccacctacgtcaatgccaacgaggaggtggtcagccaccccggccgcatcgccgtccactacttcaagggctggttcctcatcgacatggtggccgccatccccttcgacctgctcatcttcggctctggctctgaggagctgatcgggctgctgaagactgcgcggctgctgcggctggtgcgcgtggcgcggaagctggatcgctactcagagtacggcgcggccgtgctgttcttgctcatgtgcacctttgcgctcatcgcgcactggctagcctgcatctggtacgccatcggcaacatggagcagccacacatggactcacgcatcggctggctgcacaacctgggcgaccagataggcaaaccctacaacagcagcggcctgggcggcccctccatcaaggacaagtatgtgacggcgctctacttcaccttcagcagcctcaccagtgtgggcttcggcaacgtctctcccaacaccaactcagagaagatcttctccatctgcgtcatgctcattggctccctcatgtatgctagcatcttcggcaacgtgtcggccatcatccagcggctgtactcgggcacagcccgctaccacacacagatgctgcgggtgcgggagttcatccgcttccaccagatccccaatcccctgcgccagcgcctcgaggagtacttccagcacgcctggtcctacaccaacggcatcgacatgaacgcggtgctgaagggcttccctgagtgcctgcaggctgacatctgcctgcacctgaaccgctcactgctgcagcactgcaaacccttccgaggggccaccaagggctgccttcgggccctggccatgaagttcaagaccacacatgcaccgccaggggacacactggtgcatgctggggacctgctcaccgccctgtacttcatctcccggggctccatcgagatcctgcggggcgacgtcgtcgtggccatcctggggaagaatgacatctttggggagcctctgaacctgtatgcaaggcctggcaagtcgaacggggatgtgcgggccctcacctactgtgacctacacaagatccatcgggacgacctgctggaggtgctggacatgtaccctgagttctccgaccacttctggtccagcctggagatcaccttcaacctgcgagataccaacatgatcccgggctcccccggcagtacggagttagagggtggcttcagtcggcaacgcaagcgcaagttgtccttccgcaggcgcacggacaaggacacggagcagccaggggaggtgtcggccttggggccgggccgggcgggggcagggccgagtagccggggccggccgggggggccgtggggggagagcccgtccagtggcccctccagccctgagagcagtgaggatgagggcccaggccgcagctccagccccctccgcctggtgcccttctccagccccaggccccccggagagccgccgggtggggagcccctgatggaggactgcgagaagagcagcgacacttgcaaccccctgtcaggcgccttctcaggagtgtccaacattttcagcttctggggggacagtcggggccgccagtaccaggagctccctcgatgccccgcccccacccccagcctcctcaacatccccctctccagcccgggtcggcggccccggggcgacgtggagagcaggctggatgccctccagcgccagctcaacaggctggagacccggctgagtgcagacatggccactgtcctgcagctgctacagaggcagatgacgctggtcccgcccgcctacagtgctgtgaccaccccggggcctggccccacttccacatccccgctgttgcccgtcagccccctccccaccctcaccttggactcgctttctcaggtttcccagttcatggcgtgtgaggagctgcccccgggggccccagagcttccccaagaaggccccacacgacgcctctccctaccgggccagctgggggccctcacctcccagcccctgcacagacacggctcggacccgggcagttagtggggctgcccagtgtggacacgtggctcacccagggatcaaggcgctgctgggccgctccccttggaggccctgctcaggaggccctgaccgtggaaggggagaggaactcgaaagcacagctcctcccccagcccttgggaccatcttctcctgcagtcccctgggccccagtgagaggggcaggggcagggccggcagtaggtggggcctgtggtccccccactgccctgagggcattagctggtctaactgcccggaggcacccggccctgggccttaggcacctcaaggacttttctgctatttactgctcttattgttaaggataataattaaggatcatatgaataattaatgaagatgctgatgactatgaataataaataattatcctgaggaga

SEQ ID NO: 171 - DNA, 3884 bp, Homo sapiens
  source 1..3884: mol_type = genomic DNA
  misc_feature 1..3884: note = cDNA of KCNH2 gene SNP c.164C>T (p.Ser55Leu)
atgccggtgcggaggggccacgtcgcgccgcagaacaccttcctggacaccatcatccgcaagtttgagggccagagccgtaagttcatcatcgccaacgctcgggtggagaactgcgccgtcatctactgcaacgacggcttctgcgagctgtgcggctacttgcgggccgaggtgatgcagcgaccctgcacctgcgacttcctgcacgggccgcgcacgcagcgccgcgctgccgcgcagatcgcgcaggcactgctgggcgccgaggagcgcaaagtggaaatcgccttctaccggaaagatgggagctgcttcctatgtctggtggatgtggtgcccgtgaagaacgaggatggggctgtcatcatgttcatcctcaatttcgaggtggtgatggagaaggacatggtggggtccccggctcatgacaccaaccaccggggcccccccaccagctggctggccccaggccgcgccaagaccttccgcctgaagctgcccgcgctgctggcgctgacggcccgggagtcgtcggtgcggtcgggcggcgcgggcggcgcgggcgccccgggggccgtggtggtggacgtggacctgacgcccgcggcacccagcagcgagtcgctggccctggacgaagtgacagccatggacaaccacgtggcagggctcgggcccgcggaggagcggcgtgcgctggtgggtcccggctctccgccccgcagcgcgcccggccagctcccatcgccccgggcgcacagcctcaaccccgacgcctcgggctccagctgcagcctggcccggacgcgctcccgagaaagctgcgccagcgtgcgccgcgcctcgtcggccgacgacatcgaggccatgcgcgccggggtgctgcccccgccaccgcgccacgccagcaccggggccatgcacccactgcgcagcggcttgctcaactccacctcggactccgacctcgtgcgctaccgcaccattagcaagattccccaaatcaccctcaactttgtggacctcaagggcgaccccttcttggcttcgcccaccagtgaccgtgagatcatagcacctaagataaaggagcgaacccacaatgtcactgagaaggtcacccaggtcctgtccctgggcgccgacgtgctgcctgagtacaagctgcaggcaccgcgcatccaccgctggaccatcctgcattacagccccttcaaggccgtgtgggactggctcatcctgctgctggtcatctacacggctgtcttcacaccctactcggctgccttcctgctgaaggagacggaagaaggcccgcctgctaccgagtgtggctacgcctgccagccgctggctgtggtggacctcatcgtggacatcatgttcattgtggacatcctcatcaacttccgcaccacctacgtcaatgccaacgaggaggtggtcagccaccccggccgcatcgccgtccactacttcaagggctggttcctcatcgacatggtggccgccatccccttcgacctgctcatcttcggctctggctctgaggagctgatcgggctgctgaagactgcgcggctgctgcggctggtgcgcgtggcgcggaagctggatcgctactcagagtacggcgcggccgtgctgttcttgctcatgtgcacctttgcgctcatcgcgcactggctagcctgcatctggtacgccatcggcaacatggagcagccacacatggactcacgcatcggctggctgcacaacctgggcgaccagataggcaaaccctacaacagcagcggcctgggcggcccctccatcaaggacaagtatgtgacggcgctctacttcaccttcagcagcctcaccagtgtgggcttcggcaacgtctctcccaacaccaactcagagaagatcttctccatctgcgtcatgctcattggctccctcatgtatgctagcatcttcggcaacgtgtcggccatcatccagcggctgtactcgggcacagcccgctaccacacacagatgctgcgggtgcgggagttcatccgcttccaccagatccccaatcccctgcgccagcgcctcgaggagtacttccagcacgcctggtcctacaccaacggcatcgacatgaacgcggtgctgaagggcttccctgagtgcctgcaggctgacatctgcctgcacctgaaccgctcactgctgcagcactgcaaacccttccgaggggccaccaagggctgccttcgggccctggccatgaagttcaagaccacacatgcaccgccaggggacacactggtgcatgctggggacctgctcaccgccctgtacttcatctcccggggctccatcgagatcctgcggggcgacgtcgtcgtggccatcctggggaagaatgacatctttggggagcctctgaacctgtatgcaaggcctggcaagtcgaacggggatgtgcgggccctcacctactgtgacctacacaagatccatcgggacgacctgctggaggtgctggacatgtaccctgagttctccgaccacttctggtccagcctggagatcaccttcaacctgcgagataccaacatgatcccgggctcccccggcagtacggagttagagggtggcttcagtcggcaacgcaagcgcaagttgtccttccgcaggcgcacggacaaggacacggagcagccaggggaggtgtcggccttggggccgggccgggcgggggcagggccgagtagccggggccggccgggggggccgtggggggagagcccgtccagtggcccctccagccctgagagcagtgaggatgagggcccaggccgcagctccagccccctccgcctggtgcccttctccagccccaggccccccggagagccgccgggtggggagcccctgatggaggactgcgagaagagcagcgacacttgcaaccccctgtcaggcgccttctcaggagtgtccaacattttcagcttctggggggacagtcggggccgccagtaccaggagctccctcgatgccccgcccccacccccagcctcctcaacatccccctctccagcccgggtcggcggccccggggcgacgtggagagcaggctggatgccctccagcgccagctcaacaggctggagacccggctgagtgcagacatggccactgtcctgcagctgctacagaggcagatgacgctggtcccgcccgcctacagtgctgtgaccaccccggggcctggccccacttccacatccccgctgttgcccgtcagccccctccccaccctcaccttggactcgctttctcaggtttcccagttcatggcgtgtgaggagctgcccccgggggccccagagcttccccaagaaggccccacacgacgcctctccctaccgggccagctgggggccctcacctcccagcccctgcacagacacggctcggacccgggcagttagtggggctgcccagtgtggacacgtggctcacccagggatcaaggcgctgctgggccgctccccttggaggccctgctcaggaggccctgaccgtggaaggggagaggaactcgaaagcacagctcctcccccagcccttgggaccatcttctcctgcagtcccctgggccccagtgagaggggcaggggcagggccggcagtaggtggggcctgtggtccccccactgccctgagggcattagctggtctaactgcccggaggcacccggccctgggccttaggcacctcaaggacttttctgctatttactgctcttattgttaaggataataattaaggatcatatgaataattaatgaagatgctgatgactatgaataataaataattatcctgaggaga

SEQ ID NO: 172 - DNA, 3884 bp, Homo sapiens
  source 1..3884: mol_type = genomic DNA
  misc_feature 1..3884: note = cDNA of KCNH2 gene SNP c.1652T>C (p.Phe551Ser)
atgccggtgcggaggggccacgtcgcgccgcagaacaccttcctggacaccatcatccgcaagtttgagggccagagccgtaagttcatcatcgccaacgctcgggtggagaactgcgccgtcatctactgcaacgacggcttctgcgagctgtgcggctactcgcgggccgaggtgatgcagcgaccctgcacctgcgacttcctgcacgggccgcgcacgcagcgccgcgctgccgcgcagatcgcgcaggcactgctgggcgccgaggagcgcaaagtggaaatcgccttctaccggaaagatgggagctgcttcctatgtctggtggatgtggtgcccgtgaagaacgaggatggggctgtcatcatgttcatcctcaatttcgaggtggtgatggagaaggacatggtggggtccccggctcatgacaccaaccaccggggcccccccaccagctggctggccccaggccgcgccaagaccttccgcctgaagctgcccgcgctgctggcgctgacggcccgggagtcgtcggtgcggtcgggcggcgcgggcggcgcgggcgccccgggggccgtggtggtggacgtggacctgacgcccgcggcacccagcagcgagtcgctggccctggacgaagtgacagccatggacaaccacgtggcagggctcgggcccgcggaggagcggcgtgcgctggtgggtcccggctctccgccccgcagcgcgcccggccagctcccatcgccccgggcgcacagcctcaaccccgacgcctcgggctccagctgcagcctggcccggacgcgctcccgagaaagctgcgccagcgtgcgccgcgcctcgtcggccgacgacatcgaggccatgcgcgccggggtgctgcccccgccaccgcgccacgccagcaccggggccatgcacccactgcgcagcggcttgctcaactccacctcggactccgacctcgtgcgctaccgcaccattagcaagattccccaaatcaccctcaactttgtggacctcaagggcgaccccttcttggcttcgcccaccagtgaccgtgagatcatagcacctaagataaaggagcgaacccacaatgtcactgagaaggtcacccaggtcctgtccctgggcgccgacgtgctgcctgagtacaagctgcaggcaccgcgcatccaccgctggaccatcctgcattacagccccttcaaggccgtgtgggactggctcatcctgctgctggtcatctacacggctgtcttcacaccctactcggctgccttcctgctgaaggagacggaagaaggcccgcctgctaccgagtgtggctacgcctgccagccgctggctgtggtggacctcatcgtggacatcatgttcattgtggacatcctcatcaacttccgcaccacctacgtcaatgccaacgaggaggtggtcagccaccccggccgcatcgccgtccactacttcaagggctggttcctcatcgacatggtggccgccatccccttcgacctgctcatcttcggctctggctctgaggagctgatcgggctgctgaagactgcgcggctgctgcggctggtgcgcgtggcgcggaagctggatcgctactcagagtacggcgcggccgtgctgtccttgctcatgtgcacctttgcgctcatcgcgcactggctagcctgcatctggtacgccatcggcaacatggagcagccacacatggactcacgcatcggctggctgcacaacctgggcgaccagataggcaaaccctacaacagcagcggcctgggcggcccctccatcaaggacaagtatgtgacggcgctctacttcaccttcagcagcctcaccagtgtgggcttcggcaacgtctctcccaacaccaactcagagaagatcttctccatctgcgtcatgctcattggctccctcatgtatgctagcatcttcggcaacgtgtcggccatcatccagcggctgtactcgggcacagcccgctaccacacacagatgctgcgggtgcgggagttcatccgcttccaccagatccccaatcccctgcgccagcgcctcgaggagtacttccagcacgcctggtcctacaccaacggcatcgacatgaacgcggtgctgaagggcttccctgagtgcctgcaggctgacatctgcctgcacctgaaccgctcactgctgcagcactgcaaacccttccgaggggccaccaagggctgccttcgggccctggccatgaagttcaagaccacacatgcaccgccaggggacacactggtgcatgctggggacctgctcaccgccctgtacttcatctcccggggctccatcgagatcctgcggggcgacgtcgtcgtggccatcctggggaagaatgacatctttggggagcctctgaacctgtatgcaaggcctggcaagtcgaacggggatgtgcgggccctcacctactgtgacctacacaagatccatcgggacgacctgctggaggtgctggacatgtaccctgagttctccgaccacttctggtccagcctggagatcaccttcaacctgcgagataccaacatgatcccgggctcccccggcagtacggagttagagggtggcttcagtcggcaacgcaagcgcaagttgtccttccgcaggcgcacggacaaggacacggagcagccaggggaggtgtcggccttggggccgggccgggcgggggcagggccgagtagccggggccggccgggggggccgtggggggagagcccgtccagtggcccctccagccctgagagcagtgaggatgagggcccaggccgcagctccagccccctccgcctggtgcccttctccagccccaggccccccggagagccgccgggtggggagcccctgatggaggactgcgagaagagcagcgacacttgcaaccccctgtcaggcgccttctcaggagtgtccaacattttcagcttctggggggacagtcggggccgccagtaccaggagctccctcgatgccccgcccccacccccagcctcctcaacatccccctctccagcccgggtcggcggccccggggcgacgtggagagcaggctggatgccctccagcgccagctcaacaggctggagacccggctgagtgcagacatggccactgtcctgcagctgctacagaggcagatgacgctggtcccgcccgcctacagtgctgtgaccaccccggggcctggccccacttccacatccccgctgttgcccgtcagccccctccccaccctcaccttggactcgctttctcaggtttcccagttcatggcgtgtgaggagctgcccccgggggccccagagcttccccaagaaggccccacacgacgcctctccctaccgggccagctgggggccctcacctcccagcccctgcacagacacggctcggacccgggcagttagtggggctgcccagtgtggacacgtggctcacccagggatcaaggcgctgctgggccgctccccttggaggccctgctcaggaggccctgaccgtggaaggggagaggaactcgaaagcacagctcctcccccagcccttgggaccatcttctcctgcagtcccctgggccccagtgagaggggcaggggcagggccggcagtaggtggggcctgtggtccccccactgccctgagggcattagctggtctaactgcccggaggcacccggccctgggccttaggcacctcaaggacttttctgctatttactgctcttattgttaaggataataattaaggatcatatgaataattaatgaagatgctgatgactatgaataataaataattatcctgaggaga

SEQ ID NO: 173 - DNA, 3884 bp, Homo sapiens
  source 1..3884: mol_type = genomic DNA
  misc_feature 1..3884: note = cDNA of KCNH2 gene SNP c.1655T>A (p.Leu552Ter)
atgccggtgcggaggggccacgtcgcgccgcagaacaccttcctggacaccatcatccgcaagtttgagggccagagccgtaagttcatcatcgccaacgctcgggtggagaactgcgccgtcatctactgcaacgacggcttctgcgagctgtgcggctactcgcgggccgaggtgatgcagcgaccctgcacctgcgacttcctgcacgggccgcgcacgcagcgccgcgctgccgcgcagatcgcgcaggcactgctgggcgccgaggagcgcaaagtggaaatcgccttctaccggaaagatgggagctgcttcctatgtctggtggatgtggtgcccgtgaagaacgaggatggggctgtcatcatgttcatcctcaatttcgaggtggtgatggagaaggacatggtggggtccccggctcatgacaccaaccaccggggcccccccaccagctggctggccccaggccgcgccaagaccttccgcctgaagctgcccgcgctgctggcgctgacggcccgggagtcgtcggtgcggtcgggcggcgcgggcggcgcgggcgccccgggggccgtggtggtggacgtggacctgacgcccgcggcacccagcagcgagtcgctggccctggacgaagtgacagccatggacaaccacgtggcagggctcgggcccgcggaggagcggcgtgcgctggtgggtcccggctctccgccccgcagcgcgcccggccagctcccatcgccccgggcgcacagcctcaaccccgacgcctcgggctccagctgcagcctggcccggacgcgctcccgagaaagctgcgccagcgtgcgccgcgcctcgtcggccgacgacatcgaggccatgcgcgccggggtgctgcccccgccaccgcgccacgccagcaccggggccatgcacccactgcgcagcggcttgctcaactccacctcggactccgacctcgtgcgctaccgcaccattagcaagattccccaaatcaccctcaactttgtggacctcaagggcgaccccttcttggcttcgcccaccagtgaccgtgagatcatagcacctaagataaaggagcgaacccacaatgtcactgagaaggtcacccaggtcctgtccctgggcgccgacgtgctgcctgagtacaagctgcaggcaccgcgcatccaccgctggaccatcctgcattacagccccttcaaggccgtgtgggactggctcatcctgctgctggtcatctacacggctgtcttcacaccctactcggctgccttcctgctgaaggagacggaagaaggcccgcctgctaccgagtgtggctacgcctgccagccgctggctgtggtggacctcatcgtggacatcatgttcattgtggacatcctcatcaacttccgcaccacctacgtcaatgccaacgaggaggtggtcagccaccccggccgcatcgccgtccactacttcaagggctggttcctcatcgacatggtggccgccatccccttcgacctgctcatcttcggctctggctctgaggagctgatcgggctgctgaagactgcgcggctgctgcggctggtgcgcgtggcgcggaagctggatcgctactcagagtacggcgcggccgtgctgttctagctcatgtgcacctttgcgctcatcgcgcactggctagcctgcatctggtacgccatcggcaacatggagcagccacacatggactcacgcatcggctggctgcacaacctgggcgaccagataggcaaaccctacaacagcagcggcctgggcggcccctccatcaaggacaagtatgtgacggcgctctacttcaccttcagcagcctcaccagtgtgggcttcggcaacgtctctcccaacaccaactcagagaagatcttctccatctgcgtcatgctcattggctccctcatgtatgctagcatcttcggcaacgtgtcggccatcatccagcggctgtactcgggcacagcccgctaccacacacagatgctgcgggtgcgggagttcatccgcttccaccagatccccaatcccctgcgccagcgcctcgaggagtacttccagcacgcctggtcctacaccaacggcatcgacatgaacgcggtgctgaagggcttccctgagtgcctgcaggctgacatctgcctgcacctgaaccgctcactgctgcagcactgcaaacccttccgaggggccaccaagggctgccttcgggccctggccatgaagttcaagaccacacatgcaccgccaggggacacactggtgcatgctggggacctgctcaccgccctgtacttcatctcccggggctccatcgagatcctgcggggcgacgtcgtcgtggccatcctggggaagaatgacatctttggggagcctctgaacctgtatgcaaggcctggcaagtcgaacggggatgtgcgggccctcacctactgtgacctacacaagatccatcgggacgacctgctggaggtgctggacatgtaccctgagttctccgaccacttctggtccagcctggagatcaccttcaacctgcgagataccaacatgatcccgggctcccccggcagtacggagttagagggtggcttcagtcggcaacgcaagcgcaagttgtccttccgcaggcgcacggacaaggacacggagcagccaggggaggtgtcggccttggggccgggccgggcgggggcagggccgagtagccggggccggccgggggggccgtggggggagagcccgtccagtggcccctccagccctgagagcagtgaggatgagggcccaggccgcagctccagccccctccgcctggtgcccttctccagccccaggccccccggagagccgccgggtggggagcccctgatggaggactgcgagaagagcagcgacacttgcaaccccctgtcaggcgccttctcaggagtgtccaacattttcagcttctggggggacagtcggggccgccagtaccaggagctccctcgatgccccgcccccacccccagcctcctcaacatccccctctccagcccgggtcggcggccccggggcgacgtggagagcaggctggatgccctccagcgccagctcaacaggctggagacccggctgagtgcagacatggccactgtcctgcagctgctacagaggcagatgacgctggtcccgcccgcctacagtgctgtgaccaccccggggcctggccccacttccacatccccgctgttgcccgtcagccccctccccaccctcaccttggactcgctttctcaggtttcccagttcatggcgtgtgaggagctgcccccgggggccccagagcttccccaagaaggccccacacgacgcctctccctaccgggccagctgggggccctcacctcccagcccctgcacagacacggctcggacccgggcagttagtggggctgcccagtgtggacacgtggctcacccagggatcaaggcgctgctgggccgctccccttggaggccctgctcaggaggccctgaccgtggaaggggagaggaactcgaaagcacagctcctcccccagcccttgggaccatcttctcctgcagtcccctgggccccagtgagaggggcaggggcagggccggcagtaggtggggcctgtggtccccccactgccctgagggcattagctggtctaactgcccggaggcacccggccctgggccttaggcacctcaaggacttttctgctatttactgctcttattgttaaggataataattaaggatcatatgaataattaatgaagatgctgatgactatgaataataaataattatcctgaggaga

SEQ ID NO: 174 - DNA, 3884 bp, Homo sapiens
  source 1..3884: mol_type = genomic DNA
  misc_feature 1..3884: note = cDNA of KCNH2 gene SNP c.1655T>C (p.Leu552Ser)
atgccggtgcggaggggccacgtcgcgccgcagaacaccttcctggacaccatcatccgcaagtttgagggccagagccgtaagttcatcatcgccaacgctcgggtggagaactgcgccgtcatctactgcaacgacggcttctgcgagctgtgcggctactcgcgggccgaggtgatgcagcgaccctgcacctgcgacttcctgcacgggccgcgcacgcagcgccgcgctgccgcgcagatcgcgcaggcactgctgggcgccgaggagcgcaaagtggaaatcgccttctaccggaaagatgggagctgcttcctatgtctggtggatgtggtgcccgtgaagaacgaggatggggctgtcatcatgttcatcctcaatttcgaggtggtgatggagaaggacatggtggggtccccggctcatgacaccaaccaccggggcccccccaccagctggctggccccaggccgcgccaagaccttccgcctgaagctgcccgcgctgctggcgctgacggcccgggagtcgtcggtgcggtcgggcggcgcgggcggcgcgggcgccccgggggccgtggtggtggacgtggacctgacgcccgcggcacccagcagcgagtcgctggccctggacgaagtgacagccatggacaaccacgtggcagggctcgggcccgcggaggagcggcgtgcgctggtgggtcccggctctccgccccgcagcgcgcccggccagctcccatcgccccgggcgcacagcctcaaccccgacgcctcgggctccagctgcagcctggcccggacgcgctcccgagaaagctgcgccagcgtgcgccgcgcctcgtcggccgacgacatcgaggccatgcgcgccggggtgctgcccccgccaccgcgccacgccagcaccggggccatgcacccactgcgcagcggcttgctcaactccacctcggactccgacctcgtgcgctaccgcaccattagcaagattccccaaatcaccctcaactttgtggacctcaagggcgaccccttcttggcttcgcccaccagtgaccgtgagatcatagcacctaagataaaggagcgaacccacaatgtcactgagaaggtcacccaggtcctgtccctgggcgccgacgtgctgcctgagtacaagctgcaggcaccgcgcatccaccgctggaccatcctgcattacagccccttcaaggccgtgtgggactggctcatcctgctgctggtcatctacacggctgtcttcacaccctactcggctgccttcctgctgaaggagacggaagaaggcccgcctgctaccgagtgtggctacgcctgccagccgctggctgtggtggacctcatcgtggacatcatgttcattgtggacatcctcatcaacttccgcaccacctacgtcaatgccaacgaggaggtggtcagccaccccggccgcatcgccgtccactacttcaagggctggttcctcatcgacatggtggccgccatccccttcgacctgctcatcttcggctctggctctgaggagctgatcgggctgctgaagactgcgcggctgctgcggctggtgcgcgtggcgcggaagctggatcgctactcagagtacggcgcggccgtgctgttctcgctcatgtgcacctttgcgctcatcgcgcactggctagcctgcatctggtacgccatcggcaacatggagcagccacacatggactcacgcatcggctggctgcacaacctgggcgaccagataggcaaaccctacaacagcagcggcctgggcggcccctccatcaaggacaagtatgtgacggcgctctacttcaccttcagcagcctcaccagtgtgggcttcggcaacgtctctcccaacaccaactcagagaagatcttctccatctgcgtcatgctcattggctccctcatgtatgctagcatcttcggcaacgtgtcggccatcatccagcggctgtactcgggcacagcccgctaccacacacagatgctgcgggtgcgggagttcatccgcttccaccagatccccaatcccctgcgccagcgcctcgaggagtacttccagcacgcctggtcctacaccaacggcatcgacatgaacgcggtgctgaagggcttccctgagtgcctgcaggctgacatctgcctgcacctgaaccgctcactgctgcagcactgcaaacccttccgaggggccaccaagggctgccttcgggccctggccatgaagttcaagaccacacatgcaccgccaggggacacactggtgcatgctggggacctgctcaccgccctgtacttcatctcccggggctccatcgagatcctgcggggcgacgtcgtcgtggccatcctggggaagaatgacatctttggggagcctctgaacctgtatgcaaggcctggcaagtcgaacggggatgtgcgggccctcacctactgtgacctacacaagatccatcgggacgacctgctggaggtgctggacatgtaccctgagttctccgaccacttctggtccagcctggagatcaccttcaacctgcgagataccaacatgatcccgggctcccccggcagtacggagttagagggtggcttcagtcggcaacgcaagcgcaagttgtccttccgcaggcgcacggacaaggacacggagcagccaggggaggtgtcggccttggggccgggccgggcgggggcagggccgagtagccggggccggccgggggggccgtggggggagagcccgtccagtggcccctccagccctgagagcagtgaggatgagggcccaggccgcagctccagccccctccgcctggtgcccttctccagccccaggccccccggagagccgccgggtggggagcccctgatggaggactgcgagaagagcagcgacacttgcaaccccctgtcaggcgccttctcaggagtgtccaacattttcagcttctggggggacagtcggggccgccagtaccaggagctccctcgatgccccgcccccacccccagcctcctcaacatccccctctccagcccgggtcggcggccccggggcgacgtggagagcaggctggatgccctccagcgccagctcaacaggctggagacccggctgagtgcagacatggccactgtcctgcagctgctacagaggcagatgacgctggtcccgcccgcctacagtgctgtgaccaccccggggcctggccccacttccacatccccgctgttgcccgtcagccccctccccaccctcaccttggactcgctttctcaggtttcccagttcatggcgtgtgaggagctgcccccgggggccccagagcttccccaagaaggccccacacgacgcctctccctaccgggccagctgggggccctcacctcccagcccctgcacagacacggctcggacccgggcagttagtggggctgcccagtgtggacacgtggctcacccagggatcaaggcgctgctgggccgctccccttggaggccctgctcaggaggccctgaccgtggaaggggagaggaactcgaaagcacagctcctcccccagcccttgggaccatcttctcctgcagtcccctgggccccagtgagaggggcaggggcagggccggcagtaggtggggcctgtggtccccccactgccctgagggcattagctggtctaactgcccggaggcacccggccctgggccttaggcacctcaaggacttttctgctatttactgctcttattgttaaggataataattaaggatcatatgaataattaatgaagatgctgatgactatgaataataaataattatcctgaggaga

SEQ ID NO: 175 - DNA, 3884 bp, Homo sapiens
  source 1..3884: mol_type = genomic DNA
  misc_feature 1..3884: note = cDNA of KCNH2 gene SNP c.1661T>C (p.Met554Thr)
atgccggtgcggaggggccacgtcgcgccgcagaacaccttcctggacaccatcatccgcaagtttgagggccagagccgtaagttcatcatcgccaacgctcgggtggagaactgcgccgtcatctactgcaacgacggcttctgcgagctgtgcggctactcgcgggccgaggtgatgcagcgaccctgcacctgcgacttcctgcacgggccgcgcacgcagcgccgcgctgccgcgcagatcgcgcaggcactgctgggcgccgaggagcgcaaagtggaaatcgccttctaccggaaagatgggagctgcttcctatgtctggtggatgtggtgcccgtgaagaacgaggatggggctgtcatcatgttcatcctcaatttcgaggtggtgatggagaaggacatggtggggtccccggctcatgacaccaaccaccggggcccccccaccagctggctggccccaggccgcgccaagaccttccgcctgaagctgcccgcgctgctggcgctgacggcccgggagtcgtcggtgcggtcgggcggcgcgggcggcgcgggcgccccgggggccgtggtggtggacgtggacctgacgcccgcggcacccagcagcgagtcgctggccctggacgaagtgacagccatggacaaccacgtggcagggctcgggcccgcggaggagcggcgtgcgctggtgggtcccggctctccgccccgcagcgcgcccggccagctcccatcgccccgggcgcacagcctcaaccccgacgcctcgggctccagctgcagcctggcccggacgcgctcccgagaaagctgcgccagcgtgcgccgcgcctcgtcggccgacgacatcgaggccatgcgcgccggggtgctgcccccgccaccgcgccacgccagcaccggggccatgcacccactgcgcagcggcttgctcaactccacctcggactccgacctcgtgcgctaccgcaccattagcaagattccccaaatcaccctcaactttgtggacctcaagggcgaccccttcttggcttcgcccaccagtgaccgtgagatcatagcacctaagataaaggagcgaacccacaatgtcactgagaaggtcacccaggtcctgtccctgggcgccgacgtgctgcctgagtacaagctgcaggcaccgcgcatccaccgctggaccatcctgcattacagccccttcaaggccgtgtgggactggctcatcctgctgctggtcatctacacggctgtcttcacaccctactcggctgccttcctgctgaaggagacggaagaaggcccgcctgctaccgagtgtggctacgcctgccagccgctggctgtggtggacctcatcgtggacatcatgttcattgtggacatcctcatcaacttccgcaccacctacgtcaatgccaacgaggaggtggtcagccaccccggccgcatcgccgtccactacttcaagggctggttcctcatcgacatggtggccgccatccccttcgacctgctcatcttcggctctggctctgaggagctgatcgggctgctgaagactgcgcggctgctgcggctggtgcgcgtggcgcggaagctggatcgctactcagagtacggcgcggccgtgctgttcttgctcacgtgcacctttgcgctcatcgcgcactggctagcctgcatctggtacgccatcggcaacatggagcagccacacatggactcacgcatcggctggctgcacaacctgggcgaccagataggcaaaccctacaacagcagcggcctgggcggcccctccatcaaggacaagtatgtgacggcgctctacttcaccttcagcagcctcaccagtgtgggcttcggcaacgtctctcccaacaccaactcagagaagatcttctccatctgcgtcatgctcattggctccctcatgtatgctagcatcttcggcaacgtgtcggccatcatccagcggctgtactcgggcacagcccgctaccacacacagatgctgcgggtgcgggagttcatccgcttccaccagatccccaatcccctgcgccagcgcctcgaggagtacttccagcacgcctggtcctacaccaacggcatcgacatgaacgcggtgctgaagggcttccctgagtgcctgcaggctgacatctgcctgcacctgaaccgctcactgctgcagcactgcaaacccttccgaggggccaccaagggctgccttcgggccctggccatgaagttcaagaccacacatgcaccgccaggggacacactggtgcatgctggggacctgctcaccgccctgtacttcatctcccggggctccatcgagatcctgcggggcgacgtcgtcgtggccatcctggggaagaatgacatctttggggagcctctgaacctgtatgcaaggcctggcaagtcgaacggggatgtgcgggccctcacctactgtgacctacacaagatccatcgggacgacctgctggaggtgctggacatgtaccctgagttctccgaccacttctggtccagcctggagatcaccttcaacctgcgagataccaacatgatcccgggctcccccggcagtacggagttagagggtggcttcagtcggcaacgcaagcgcaagttgtccttccgcaggcgcacggacaaggacacggagcagccaggggaggtgtcggccttggggccgggccgggcgggggcagggccgagtagccggggccggccgggggggccgtggggggagagcccgtccagtggcccctccagccctgagagcagtgaggatgagggcccaggccgcagctccagccccctccgcctggtgcccttctccagccccaggccccccggagagccgccgggtggggagcccctgatggaggactgcgagaagagcagcgacacttgcaaccccctgtcaggcgccttctcaggagtgtccaacattttcagcttctggggggacagtcggggccgccagtaccaggagctccctcgatgccccgcccccacccccagcctcctcaacatccccctctccagcccgggtcggcggccccggggcgacgtggagagcaggctggatgccctccagcgccagctcaacaggctggagacccggctgagtgcagacatggccactgtcctgcagctgctacagaggcagatgacgctggtcccgcccgcctacagtgctgtgaccaccccggggcctggccccacttccacatccccgctgttgcccgtcagccccctccccaccctcaccttggactcgctttctcaggtttcccagttcatggcgtgtgaggagctgcccccgggggccccagagcttccccaagaaggccccacacgacgcctctccctaccgggccagctgggggccctcacctcccagcccctgcacagacacggctcggacccgggcagttagtggggctgcccagtgtggacacgtggctcacccagggatcaaggcgctgctgggccgctccccttggaggccctgctcaggaggccctgaccgtggaaggggagaggaactcgaaagcacagctcctcccccagcccttgggaccatcttctcctgcagtcccctgggccccagtgagaggggcaggggcagggccggcagtaggtggggcctgtggtccccccactgccctgagggcattagctggtctaactgcccggaggcacccggccctgggccttaggcacctcaaggacttttctgctatttactgctcttattgttaaggataataattaaggatcatatgaataattaatgaagatgctgatgactatgaataataaataattatcctgaggaga

SEQ ID NO: 176 - DNA, 3884 bp, Homo sapiens
  source 1..3884: mol_type = genomic DNA
  misc_feature 1..3884: note = cDNA of KCNH2 gene SNP c.1664G>A (p.Cys555Tyr)
atgccggtgcggaggggccacgtcgcgccgcagaacaccttcctggacaccatcatccgcaagtttgagggccagagccgtaagttcatcatcgccaacgctcgggtggagaactgcgccgtcatctactgcaacgacggcttctgcgagctgtgcggctactcgcgggccgaggtgatgcagcgaccctgcacctgcgacttcctgcacgggccgcgcacgcagcgccgcgctgccgcgcagatcgcgcaggcactgctgggcgccgaggagcgcaaagtggaaatcgccttctaccggaaagatgggagctgcttcctatgtctggtggatgtggtgcccgtgaagaacgaggatggggctgtcatcatgttcatcctcaatttcgaggtggtgatggagaaggacatggtggggtccccggctcatgacaccaaccaccggggcccccccaccagctggctggccccaggccgcgccaagaccttccgcctgaagctgcccgcgctgctggcgctgacggcccgggagtcgtcggtgcggtcgggcggcgcgggcggcgcgggcgccccgggggccgtggtggtggacgtggacctgacgcccgcggcacccagcagcgagtcgctggccctggacgaagtgacagccatggacaaccacgtggcagggctcgggcccgcggaggagcggcgtgcgctggtgggtcccggctctccgccccgcagcgcgcccggccagctcccatcgccccgggcgcacagcctcaaccccgacgcctcgggctccagctgcagcctggcccggacgcgctcccgagaaagctgcgccagcgtgcgccgcgcctcgtcggccgacgacatcgaggccatgcgcgccggggtgctgcccccgccaccgcgccacgccagcaccggggccatgcacccactgcgcagcggcttgctcaactccacctcggactccgacctcgtgcgctaccgcaccattagcaagattccccaaatcaccctcaactttgtggacctcaagggcgaccccttcttggcttcgcccaccagtgaccgtgagatcatagcacctaagataaaggagcgaacccacaatgtcactgagaaggtcacccaggtcctgtccctgggcgccgacgtgctgcctgagtacaagctgcaggcaccgcgcatccaccgctggaccatcctgcattacagccccttcaaggccgtgtgggactggctcatcctgctgctggtcatctacacggctgtcttcacaccctactcggctgccttcctgctgaaggagacggaagaaggcccgcctgctaccgagtgtggctacgcctgccagccgctggctgtggtggacctcatcgtggacatcatgttcattgtggacatcctcatcaacttccgcaccacctacgtcaatgccaacgaggaggtggtcagccaccccggccgcatcgccgtccactacttcaagggctggttcctcatcgacatggtggccgccatccccttcgacctgctcatcttcggctctggctctgaggagctgatcgggctgctgaagactgcgcggctgctgcggctggtgcgcgtggcgcggaagctggatcgctactcagagtacggcgcggccgtgctgttcttgctcatgtacacctttgcgctcatcgcgcactggctagcctgcatctggtacgccatcggcaacatggagcagccacacatggactcacgcatcggctggctgcacaacctgggcgaccagataggcaaaccctacaacagcagcggcctgggcggcccctccatcaaggacaagtatgtgacggcgctctacttcaccttcagcagcctcaccagtgtgggcttcggcaacgtctctcccaacaccaactcagagaagatcttctccatctgcgtcatgctcattggctccctcatgtatgctagcatcttcggcaacgtgtcggccatcatccagcggctgtactcgggcacagcccgctaccacacacagatgctgcgggtgcgggagttcatccgcttccaccagatccccaatcccctgcgccagcgcctcgaggagtacttccagcacgcctggtcctacaccaacggcatcgacatgaacgcggtgctgaagggcttccctgagtgcctgcaggctgacatctgcctgcacctgaaccgctcactgctgcagcactgcaaacccttccgaggggccaccaagggctgccttcgggccctggccatgaagttcaagaccacacatgcaccgccaggggacacactggtgcatgctggggacctgctcaccgccctgtacttcatctcccggggctccatcgagatcctgcggggcgacgtcgtcgtggccatcctggggaagaatgacatctttggggagcctctgaacctgtatgcaaggcctggcaagtcgaacggggatgtgcgggccctcacctactgtgacctacacaagatccatcgggacgacctgctggaggtgctggacatgtaccctgagttctccgaccacttctggtccagcctggagatcaccttcaacctgcgagataccaacatgatcccgggctcccccggcagtacggagttagagggtggcttcagtcggcaacgcaagcgcaagttgtccttccgcaggcgcacggacaaggacacggagcagccaggggaggtgtcggccttggggccgggccgggcgggggcagggccgagtagccggggccggccgggggggccgtggggggagagcccgtccagtggcccctccagccctgagagcagtgaggatgagggcccaggccgcagctccagccccctccgcctggtgcccttctccagccccaggccccccggagagccgccgggtggggagcccctgatggaggactgcgagaagagcagcgacacttgcaaccccctgtcaggcgccttctcaggagtgtccaacattttcagcttctggggggacagtcggggccgccagtaccaggagctccctcgatgccccgcccccacccccagcctcctcaacatccccctctccagcccgggtcggcggccccggggcgacgtggagagcaggctggatgccctccagcgccagctcaacaggctggagacccggctgagtgcagacatggccactgtcctgcagctgctacagaggcagatgacgctggtcccgcccgcctacagtgctgtgaccaccccggggcctggccccacttccacatccccgctgttgcccgtcagccccctccccaccctcaccttggactcgctttctcaggtttcccagttcatggcgtgtgaggagctgcccccgggggccccagagcttccccaagaaggccccacacgacgcctctccctaccgggccagctgggggccctcacctcccagcccctgcacagacacggctcggacccgggcagttagtggggctgcccagtgtggacacgtggctcacccagggatcaaggcgctgctgggccgctccccttggaggccctgctcaggaggccctgaccgtggaaggggagaggaactcgaaagcacagctcctcccccagcccttgggaccatcttctcctgcagtcccctgggccccagtgagaggggcaggggcagggccggcagtaggtggggcctgtggtccccccactgccctgagggcattagctggtctaactgcccggaggcacccggccctgggccttaggcacctcaaggacttttctgctatttactgctcttattgttaaggataataattaaggatcatatgaataattaatgaagatgctgatgactatgaataataaataattatcctgaggaga

SEQ ID NO: 177 - DNA, 3884 bp, Homo sapiens
  source 1..3884: mol_type = genomic DNA
  misc_feature 1..3884: note = cDNA of KCNH2 gene SNP c.1672G>C (p.Ala558Pro)
atgccggtgcggaggggccacgtcgcgccgcagaacaccttcctggacaccatcatccgcaagtttgagggccagagccgtaagttcatcatcgccaacgctcgggtggagaactgcgccgtcatctactgcaacgacggcttctgcgagctgtgcggctactcgcgggccgaggtgatgcagcgaccctgcacctgcgacttcctgcacgggccgcgcacgcagcgccgcgctgccgcgcagatcgcgcaggcactgctgggcgccgaggagcgcaaagtggaaatcgccttctaccggaaagatgggagctgcttcctatgtctggtggatgtggtgcccgtgaagaacgaggatggggctgtcatcatgttcatcctcaatttcgaggtggtgatggagaaggacatggtggggtccccggctcatgacaccaaccaccggggcccccccaccagctggctggccccaggccgcgccaagaccttccgcctgaagctgcccgcgctgctggcgctgacggcccgggagtcgtcggtgcggtcgggcggcgcgggcggcgcgggcgccccgggggccgtggtggtggacgtggacctgacgcccgcggcacccagcagcgagtcgctggccctggacgaagtgacagccatggacaaccacgtggcagggctcgggcccgcggaggagcggcgtgcgctggtgggtcccggctctccgccccgcagcgcgcccggccagctcccatcgccccgggcgcacagcctcaaccccgacgcctcgggctccagctgcagcctggcccggacgcgctcccgagaaagctgcgccagcgtgcgccgcgcctcgtcggccgacgacatcgaggccatgcgcgccggggtgctgcccccgccaccgcgccacgccagcaccggggccatgcacccactgcgcagcggcttgctcaactccacctcggactccgacctcgtgcgctaccgcaccattagcaagattccccaaatcaccctcaactttgtggacctcaagggcgaccccttcttggcttcgcccaccagtgaccgtgagatcatagcacctaagataaaggagcgaacccacaatgtcactgagaaggtcacccaggtcctgtccctgggcgccgacgtgctgcctgagtacaagctgcaggcaccgcgcatccaccgctggaccatcctgcattacagccccttcaaggccgtgtgggactggctcatcctgctgctggtcatctacacggctgtcttcacaccctactcggctgccttcctgctgaaggagacggaagaaggcccgcctgctaccgagtgtggctacgcctgccagccgctggctgtggtggacctcatcgtggacatcatgttcattgtggacatcctcatcaacttccgcaccacctacgtcaatgccaacgaggaggtggtcagccaccccggccgcatcgccgtccactacttcaagggctggttcctcatcgacatggtggccgccatccccttcgacctgctcatcttcggctctggctctgaggagctgatcgggctgctgaagactgcgcggctgctgcggctggtgcgcgtggcgcggaagctggatcgctactcagagtacggcgcggccgtgctgttcttgctcatgtgcacctttccgctcatcgcgcactggctagcctgcatctggtacgccatcggcaacatggagcagccacacatggactcacgcatcggctggctgcacaacctgggcgaccagataggcaaaccctacaacagcagcggcctgggcggcccctccatcaaggacaagtatgtgacggcgctctacttcaccttcagcagcctcaccagtgtgggcttcggcaacgtctctcccaacaccaactcagagaagatcttctccatctgcgtcatgctcattggctccctcatgtatgctagcatcttcggcaacgtgtcggccatcatccagcggctgtactcgggcacagcccgctaccacacacagatgctgcgggtgcgggagttcatccgcttccaccagatccccaatcccctgcgccagcgcctcgaggagtacttccagcacgcctggtcctacaccaacggcatcgacatgaacgcggtgctgaagggcttccctgagtgcctgcaggctgacatctgcctgcacctgaaccgctcactgctgcagcactgcaaacccttccgaggggccaccaagggctgccttcgggccctggccatgaagttcaagaccacacatgcaccgccaggggacacactggtgcatgctggggacctgctcaccgccctgtacttcatctcccggggctccatcgagatcctgcggggcgacgtcgtcgtggccatcctggggaagaatgacatctttggggagcctctgaacctgtatgcaaggcctggcaagtcgaacggggatgtgcgggccctcacctactgtgacctacacaagatccatcgggacgacctgctggaggtgctggacatgtaccctgagttctccgaccacttctggtccagcctggagatcaccttcaacctgcgagataccaacatgatcccgggctcccccggcagtacggagttagagggtggcttcagtcggcaacgcaagcgcaagttgtccttccgcaggcgcacggacaaggacacggagcagccaggggaggtgtcggccttggggccgggccgggcgggggcagggccgagtagccggggccggccgggggggccgtggggggagagcccgtccagtggcccctccagccctgagagcagtgaggatgagggcccaggccgcagctccagccccctccgcctggtgcccttctccagccccaggccccccggagagccgccgggtggggagcccctgatggaggactgcgagaagagcagcgacacttgcaaccccctgtcaggcgccttctcaggagtgtccaacattttcagcttctggggggacagtcggggccgccagtaccaggagctccctcgatgccccgcccccacccccagcctcctcaacatccccctctccagcccgggtcggcggccccggggcgacgtggagagcaggctggatgccctccagcgccagctcaacaggctggagacccggctgagtgcagacatggccactgtcctgcagctgctacagaggcagatgacgctggtcccgcccgcctacagtgctgtgaccaccccggggcctggccccacttccacatccccgctgttgcccgtcagccccctccccaccctcaccttggactcgctttctcaggtttcccagttcatggcgtgtgaggagctgcccccgggggccccagagcttccccaagaaggccccacacgacgcctctccctaccgggccagctgggggccctcacctcccagcccctgcacagacacggctcggacccgggcagttagtggggctgcccagtgtggacacgtggctcacccagggatcaaggcgctgctgggccgctccccttggaggccctgctcaggaggccctgaccgtggaaggggagaggaactcgaaagcacagctcctcccccagcccttgggaccatcttctcctgcagtcccctgggccccagtgagaggggcaggggcagggccggcagtaggtggggcctgtggtccccccactgccctgagggcattagctggtctaactgcccggaggcacccggccctgggccttaggcacctcaaggacttttctgctatttactgctcttattgttaaggataataattaaggatcatatgaataattaatgaagatgctgatgactatgaataataaataattatcctgaggaga

SEQ ID NO: 178 - DNA, 3884 bp, Homo sapiens
  source 1..3884: mol_type = genomic DNA
  misc_feature 1..3884: note = cDNA of KCNH2 gene SNP c.1673C>A (p.Ala558Glu)
atgccggtgcggaggggccacgtcgcgccgcagaacaccttcctggacaccatcatccgcaagtttgagggccagagccgtaagttcatcatcgccaacgctcgggtggagaactgcgccgtcatctactgcaacgacggcttctgcgagctgtgcggctactcgcgggccgaggtgatgcagcgaccctgcacctgcgacttcctgcacgggccgcgcacgcagcgccgcgctgccgcgcagatcgcgcaggcactgctgggcgccgaggagcgcaaagtggaaatcgccttctaccggaaagatgggagctgcttcctatgtctggtggatgtggtgcccgtgaagaacgaggatggggctgtcatcatgttcatcctcaatttcgaggtggtgatggagaaggacatggtggggtccccggctcatgacaccaaccaccggggcccccccaccagctggctggccccaggccgcgccaagaccttccgcctgaagctgcccgcgctgctggcgctgacggcccgggagtcgtcggtgcggtcgggcggcgcgggcggcgcgggcgccccgggggccgtggtggtggacgtggacctgacgcccgcggcacccagcagcgagtcgctggccctggacgaagtgacagccatggacaaccacgtggcagggctcgggcccgcggaggagcggcgtgcgctggtgggtcccggctctccgccccgcagcgcgcccggccagctcccatcgccccgggcgcacagcctcaaccccgacgcctcgggctccagctgcagcctggcccggacgcgctcccgagaaagctgcgccagcgtgcgccgcgcctcgtcggccgacgacatcgaggccatgcgcgccggggtgctgcccccgccaccgcgccacgccagcaccggggccatgcacccactgcgcagcggcttgctcaactccacctcggactccgacctcgtgcgctaccgcaccattagcaagattccccaaatcaccctcaactttgtggacctcaagggcgaccccttcttggcttcgcccaccagtgaccgtgagatcatagcacctaagataaaggagcgaacccacaatgtcactgagaaggtcacccaggtcctgtccctgggcgccgacgtgctgcctgagtacaagctgcaggcaccgcgcatccaccgctggaccatcctgcattacagccccttcaaggccgtgtgggactggctcatcctgctgctggtcatctacacggctgtcttcacaccctactcggctgccttcctgctgaaggagacggaagaaggcccgcctgctaccgagtgtggctacgcctgccagccgctggctgtggtggacctcatcgtggacatcatgttcattgtggacatcctcatcaacttccgcaccacctacgtcaatgccaacgaggaggtggtcagccaccccggccgcatcgccgtccactacttcaagggctggttcctcatcgacatggtggccgccatccccttcgacctgctcatcttcggctctggctctgaggagctgatcgggctgctgaagactgcgcggctgctgcggctggtgcgcgtggcgcggaagctggatcgctactcagagtacggcgcggccgtgctgttcttgctcatgtgcacctttgagctcatcgcgcactggctagcctgcatctggtacgccatcggcaacatggagcagccacacatggactcacgcatcggctggctgcacaacctgggcgaccagataggcaaaccctacaacagcagcggcctgggcggcccctccatcaaggacaagtatgtgacggcgctctacttcaccttcagcagcctcaccagtgtgggcttcggcaacgtctctcccaacaccaactcagagaagatcttctccatctgcgtcatgctcattggctccctcatgtatgctagcatcttcggcaacgtgtcggccatcatccagcggctgtactcgggcacagcccgctaccacacacagatgctgcgggtgcgggagttcatccgcttccaccagatccccaatcccctgcgccagcgcctcgaggagtacttccagcacgcctggtcctacaccaacggcatcgacatgaacgcggtgctgaagggcttccctgagtgcctgcaggctgacatctgcctgcacctgaaccgctcactgctgcagcactgcaaacccttccgaggggccaccaagggctgccttcgggccctggccatgaagttcaagaccacacatgcaccgccaggggacacactggtgcatgctggggacctgctcaccgccctgtacttcatctcccggggctccatcgagatcctgcggggcgacgtcgtcgtggccatcctggggaagaatgacatctttggggagcctctgaacctgtatgcaaggcctggcaagtcgaacggggatgtgcgggccctcacctactgtgacctacacaagatccatcgggacgacctgctggaggtgctggacatgtaccctgagttctccgaccacttctggtccagcctggagatcaccttcaacctgcgagataccaacatgatcccgggctcccccggcagtacggagttagagggtggcttcagtcggcaacgcaagcgcaagttgtccttccgcaggcgcacggacaaggacacggagcagccaggggaggtgtcggccttggggccgggccgggcgggggcagggccgagtagccggggccggccgggggggccgtggggggagagcccgtccagtggcccctccagccctgagagcagtgaggatgagggcccaggccgcagctccagccccctccgcctggtgcccttctccagccccaggccccccggagagccgccgggtggggagcccctgatggaggactgcgagaagagcagcgacacttgcaaccccctgtcaggcgccttctcaggagtgtccaacattttcagcttctggggggacagtcggggccgccagtaccaggagctccctcgatgccccgcccccacccccagcctcctcaacatccccctctccagcccgggtcggcggccccggggcgacgtggagagcaggctggatgccctccagcgccagctcaacaggctggagacccggctgagtgcagacatggccactgtcctgcagctgctacagaggcagatgacgctggtcccgcccgcctacagtgctgtgaccaccccggggcctggccccacttccacatccccgctgttgcccgtcagccccctccccaccctcaccttggactcgctttctcaggtttcccagttcatggcgtgtgaggagctgcccccgggggccccagagcttccccaagaaggccccacacgacgcctctccctaccgggccagctgggggccctcacctcccagcccctgcacagacacggctcggacccgggcagttagtggggctgcccagtgtggacacgtggctcacccagggatcaaggcgctgctgggccgctccccttggaggccctgctcaggaggccctgaccgtggaaggggagaggaactcgaaagcacagctcctcccccagcccttgggaccatcttctcctgcagtcccctgggccccagtgagaggggcaggggcagggccggcagtaggtggggcctgtggtccccccactgccctgagggcattagctggtctaactgcccggaggcacccggccctgggccttaggcacctcaaggacttttctgctatttactgctcttattgttaaggataataattaaggatcatatgaataattaatgaagatgctgatgactatgaataataaataattatcctgaggaga

SEQ ID NO: 179 - DNA, 3884 bp, Homo sapiens
  source 1..3884: mol_type = genomic DNA
  misc_feature 1..3884: note = cDNA of KCNH2 gene SNP c.1675C>T (p.Leu559Phe)
atgccggtgcggaggggccacgtcgcgccgcagaacaccttcctggacaccatcatccgcaagtttgagggccagagccgtaagttcatcatcgccaacgctcgggtggagaactgcgccgtcatctactgcaacgacggcttctgcgagctgtgcggctactcgcgggccgaggtgatgcagcgaccctgcacctgcgacttcctgcacgggccgcgcacgcagcgccgcgctgccgcgcagatcgcgcaggcactgctgggcgccgaggagcgcaaagtggaaatcgccttctaccggaaagatgggagctgcttcctatgtctggtggatgtggtgcccgtgaagaacgaggatggggctgtcatcatgttcatcctcaatttcgaggtggtgatggagaaggacatggtggggtccccggctcatgacaccaaccaccggggcccccccaccagctggctggccccaggccgcgccaagaccttccgcctgaagctgcccgcgctgctggcgctgacggcccgggagtcgtcggtgcggtcgggcggcgcgggcggcgcgggcgccccgggggccgtggtggtggacgtggacctgacgcccgcggcacccagcagcgagtcgctggccctggacgaagtgacagccatggacaaccacgtggcagggctcgggcccgcggaggagcggcgtgcgctggtgggtcccggctctccgccccgcagcgcgcccggccagctcccatcgccccgggcgcacagcctcaaccccgacgcctcgggctccagctgcagcctggcccggacgcgctcccgagaaagctgcgccagcgtgcgccgcgcctcgtcggccgacgacatcgaggccatgcgcgccggggtgctgcccccgccaccgcgccacgccagcaccggggccatgcacccactgcgcagcggcttgctcaactccacctcggactccgacctcgtgcgctaccgcaccattagcaagattccccaaatcaccctcaactttgtggacctcaagggcgaccccttcttggcttcgcccaccagtgaccgtgagatcatagcacctaagataaaggagcgaacccacaatgtcactgagaaggtcacccaggtcctgtccctgggcgccgacgtgctgcctgagtacaagctgcaggcaccgcgcatccaccgctggaccatcctgcattacagccccttcaaggccgtgtgggactggctcatcctgctgctggtcatctacacggctgtcttcacaccctactcggctgccttcctgctgaaggagacggaagaaggcccgcctgctaccgagtgtggctacgcctgccagccgctggctgtggtggacctcatcgtggacatcatgttcattgtggacatcctcatcaacttccgcaccacctacgtcaatgccaacgaggaggtggtcagccaccccggccgcatcgccgtccactacttcaagggctggttcctcatcgacatggtggccgccatccccttcgacctgctcatcttcggctctggctctgaggagctgatcgggctgctgaagactgcgcggctgctgcggctggtgcgcgtggcgcggaagctggatcgctactcagagtacggcgcggccgtgctgttcttgctcatgtgcacctttgcgttcatcgcgcactggctagcctgcatctggtacgccatcggcaacatggagcagccacacatggactcacgcatcggctggctgcacaacctgggcgaccagataggcaaaccctacaacagcagcggcctgggcggcccctccatcaaggacaagtatgtgacggcgctctacttcaccttcagcagcctcaccagtgtgggcttcggcaacgtctctcccaacaccaactcagagaagatcttctccatctgcgtcatgctcattggctccctcatgtatgctagcatcttcggcaacgtgtcggccatcatccagcggctgtactcgggcacagcccgctaccacacacagatgctgcgggtgcgggagttcatccgcttccaccagatccccaatcccctgcgccagcgcctcgaggagtacttccagcacgcctggtcctacaccaacggcatcgacatgaacgcggtgctgaagggcttccctgagtgcctgcaggctgacatctgcctgcacctgaaccgctcactgctgcagcactgcaaacccttccgaggggccaccaagggctgccttcgggccctggccatgaagttcaagaccacacatgcaccgccaggggacacactggtgcatgctggggacctgctcaccgccctgtacttcatctcccggggctccatcgagatcctgcggggcgacgtcgtcgtggccatcctggggaagaatgacatctttggggagcctctgaacctgtatgcaaggcctggcaagtcgaacggggatgtgcgggccctcacctactgtgacctacacaagatccatcgggacgacctgctggaggtgctggacatgtaccctgagttctccgaccacttctggtccagcctggagatcaccttcaacctgcgagataccaacatgatcccgggctcccccggcagtacggagttagagggtggcttcagtcggcaacgcaagcgcaagttgtccttccgcaggcgcacggacaaggacacggagcagccaggggaggtgtcggccttggggccgggccgggcgggggcagggccgagtagccggggccggccgggggggccgtggggggagagcccgtccagtggcccctccagccctgagagcagtgaggatgagggcccaggccgcagctccagccccctccgcctggtgcccttctccagccccaggccccccggagagccgccgggtggggagcccctgatggaggactgcgagaagagcagcgacacttgcaaccccctgtcaggcgccttctcaggagtgtccaacattttcagcttctggggggacagtcggggccgccagtaccaggagctccctcgatgccccgcccccacccccagcctcctcaacatccccctctccagcccgggtcggcggccccggggcgacgtggagagcaggctggatgccctccagcgccagctcaacaggctggagacccggctgagtgcagacatggccactgtcctgcagctgctacagaggcagatgacgctggtcccgcccgcctacagtgctgtgaccaccccggggcctggccccacttccacatccccgctgttgcccgtcagccccctccccaccctcaccttggactcgctttctcaggtttcccagttcatggcgtgtgaggagctgcccccgggggccccagagcttccccaagaaggccccacacgacgcctctccctaccgggccagctgggggccctcacctcccagcccctgcacagacacggctcggacccgggcagttagtggggctgcccagtgtggacacgtggctcacccagggatcaaggcgctgctgggccgctccccttggaggccctgctcaggaggccctgaccgtggaaggggagaggaactcgaaagcacagctcctcccccagcccttgggaccatcttctcctgcagtcccctgggccccagtgagaggggcaggggcagggccggcagtaggtggggcctgtggtccccccactgccctgagggcattagctggtctaactgcccggaggcacccggccctgggccttaggcacctcaaggacttttctgctatttactgctcttattgttaaggataataattaaggatcatatgaataattaatgaagatgctgatgactatgaataataaataattatcctgaggaga

SEQ ID NO: 180 - DNA, 3884 bp, Homo sapiens
  source 1..3884: mol_type = genomic DNA
  misc_feature 1..3884: note = cDNA of KCNH2 gene SNP c.1676T>A (p.Leu559His)
atgccggtgcggaggggccacgtcgcgccgcagaacaccttcctggacaccatcatccgcaagtttgagggccagagccgtaagttcatcatcgccaacgctcgggtggagaactgcgccgtcatctactgcaacgacggcttctgcgagctgtgcggctactcgcgggccgaggtgatgcagcgaccctgcacctgcgacttcctgcacgggccgcgcacgcagcgccgcgctgccgcgcagatcgcgcaggcactgctgggcgccgaggagcgcaaagtggaaatcgccttctaccggaaagatgggagctgcttcctatgtctggtggatgtggtgcccgtgaagaacgaggatggggctgtcatcatgttcatcctcaatttcgaggtggtgatggagaaggacatggtggggtccccggctcatgacaccaaccaccggggcccccccaccagctggctggccccaggccgcgccaagaccttccgcctgaagctgcccgcgctgctggcgctgacggcccgggagtcgtcggtgcggtcgggcggcgcgggcggcgcgggcgccccgggggccgtggtggtggacgtggacctgacgcccgcggcacccagcagcgagtcgctggccctggacgaagtgacagccatggacaaccacgtggcagggctcgggcccgcggaggagcggcgtgcgctggtgggtcccggctctccgccccgcagcgcgcccggccagctcccatcgccccgggcgcacagcctcaaccccgacgcctcgggctccagctgcagcctggcccggacgcgctcccgagaaagctgcgccagcgtgcgccgcgcctcgtcggccgacgacatcgaggccatgcgcgccggggtgctgcccccgccaccgcgccacgccagcaccggggccatgcacccactgcgcagcggcttgctcaactccacctcggactccgacctcgtgcgctaccgcaccattagcaagattccccaaatcaccctcaactttgtggacctcaagggcgaccccttcttggcttcgcccaccagtgaccgtgagatcatagcacctaagataaaggagcgaacccacaatgtcactgagaaggtcacccaggtcctgtccctgggcgccgacgtgctgcctgagtacaagctgcaggcaccgcgcatccaccgctggaccatcctgcattacagccccttcaaggccgtgtgggactggctcatcctgctgctggtcatctacacggctgtcttcacaccctactcggctgccttcctgctgaaggagacggaagaaggcccgcctgctaccgagtgtggctacgcctgccagccgctggctgtggtggacctcatcgtggacatcatgttcattgtggacatcctcatcaacttccgcaccacctacgtcaatgccaacgaggaggtggtcagccaccccggccgcatcgccgtccactacttcaagggctggttcctcatcgacatggtggccgccatccccttcgacctgctcatcttcggctctggctctgaggagctgatcgggctgctgaagactgcgcggctgctgcggctggtgcgcgtggcgcggaagctggatcgctactcagagtacggcgcggccgtgctgttcttgctcatgtgcacctttgcgcacatcgcgcactggctagcctgcatctggtacgccatcggcaacatggagcagccacacatggactcacgcatcggctggctgcacaacctgggcgaccagataggcaaaccctacaacagcagcggcctgggcggcccctccatcaaggacaagtatgtgacggcgctctacttcaccttcagcagcctcaccagtgtgggcttcggcaacgtctctcccaacaccaactcagagaagatcttctccatctgcgtcatgctcattggctccctcatgtatgctagcatcttcggcaacgtgtcggccatcatccagcggctgtactcgggcacagcccgctaccacacacagatgctgcgggtgcgggagttcatccgcttccaccagatccccaatcccctgcgccagcgcctcgaggagtacttccagcacgcctggtcctacaccaacggcatcgacatgaacgcggtgctgaagggcttccctgagtgcctgcaggctgacatctgcctgcacctgaaccgctcactgctgcagcactgcaaacccttccgaggggccaccaagggctgccttcgggccctggccatgaagttcaagaccacacatgcaccgccaggggacacactggtgcatgctggggacctgctcaccgccctgtacttcatctcccggggctccatcgagatcctgcggggcgacgtcgtcgtggccatcctggggaagaatgacatctttggggagcctctgaacctgtatgcaaggcctggcaagtcgaacggggatgtgcgggccctcacctactgtgacctacacaagatccatcgggacgacctgctggaggtgctggacatgtaccctgagttctccgaccacttctggtccagcctggagatcaccttcaacctgcgagataccaacatgatcccgggctcccccggcagtacggagttagagggtggcttcagtcggcaacgcaagcgcaagttgtccttccgcaggcgcacggacaaggacacggagcagccaggggaggtgtcggccttggggccgggccgggcgggggcagggccgagtagccggggccggccgggggggccgtggggggagagcccgtccagtggcccctccagccctgagagcagtgaggatgagggcccaggccgcagctccagccccctccgcctggtgcccttctccagccccaggccccccggagagccgccgggtggggagcccctgatggaggactgcgagaagagcagcgacacttgcaaccccctgtcaggcgccttctcaggagtgtccaacattttcagcttctggggggacagtcggggccgccagtaccaggagctccctcgatgccccgcccccacccccagcctcctcaacatccccctctccagcccgggtcggcggccccggggcgacgtggagagcaggctggatgccctccagcgccagctcaacaggctggagacccggctgagtgcagacatggccactgtcctgcagctgctacagaggcagatgacgctggtcccgcccgcctacagtgctgtgaccaccccggggcctggccccacttccacatccccgctgttgcccgtcagccccctccccaccctcaccttggactcgctttctcaggtttcccagttcatggcgtgtgaggagctgcccccgggggccccagagcttccccaagaaggccccacacgacgcctctccctaccgggccagctgggggccctcacctcccagcccctgcacagacacggctcggacccgggcagttagtggggctgcccagtgtggacacgtggctcacccagggatcaaggcgctgctgggccgctccccttggaggccctgctcaggaggccctgaccgtggaaggggagaggaactcgaaagcacagctcctcccccagcccttgggaccatcttctcctgcagtcccctgggccccagtgagaggggcaggggcagggccggcagtaggtggggcctgtggtccccccactgccctgagggcattagctggtctaactgcccggaggcacccggccctgggccttaggcacctcaaggacttttctgctatttactgctcttattgttaaggataataattaaggatcatatgaataattaatgaagatgctgatgactatgaataataaataattatcctgaggaga

SEQ ID NO: 181 - DNA, 3884 bp, Homo sapiens
  source 1..3884: mol_type = genomic DNA
  misc_feature 1..3884: note = cDNA of KCNH2 gene SNP c.1676T>C (p.Leu559Pro)
atgccggtgcggaggggccacgtcgcgccgcagaacaccttcctggacaccatcatccgcaagtttgagggccagagccgtaagttcatcatcgccaacgctcgggtggagaactgcgccgtcatctactgcaacgacggcttctgcgagctgtgcggctactcgcgggccgaggtgatgcagcgaccctgcacctgcgacttcctgcacgggccgcgcacgcagcgccgcgctgccgcgcagatcgcgcaggcactgctgggcgccgaggagcgcaaagtggaaatcgccttctaccggaaagatgggagctgcttcctatgtctggtggatgtggtgcccgtgaagaacgaggatggggctgtcatcatgttcatcctcaatttcgaggtggtgatggagaaggacatggtggggtccccggctcatgacaccaaccaccggggcccccccaccagctggctggccccaggccgcgccaagaccttccgcctgaagctgcccgcgctgctggcgctgacggcccgggagtcgtcggtgcggtcgggcggcgcgggcggcgcgggcgccccgggggccgtggtggtggacgtggacctgacgcccgcggcacccagcagcgagtcgctggccctggacgaagtgacagccatggacaaccacgtggcagggctcgggcccgcggaggagcggcgtgcgctggtgggtcccggctctccgccccgcagcgcgcccggccagctcccatcgccccgggcgcacagcctcaaccccgacgcctcgggctccagctgcagcctggcccggacgcgctcccgagaaagctgcgccagcgtgcgccgcgcctcgtcggccgacgacatcgaggccatgcgcgccggggtgctgcccccgccaccgcgccacgccagcaccggggccatgcacccactgcgcagcggcttgctcaactccacctcggactccgacctcgtgcgctaccgcaccattagcaagattccccaaatcaccctcaactttgtggacctcaagggcgaccccttcttggcttcgcccaccagtgaccgtgagatcatagcacctaagataaaggagcgaacccacaatgtcactgagaaggtcacccaggtcctgtccctgggcgccgacgtgctgcctgagtacaagctgcaggcaccgcgcatccaccgctggaccatcctgcattacagccccttcaaggccgtgtgggactggctcatcctgctgctggtcatctacacggctgtcttcacaccctactcggctgccttcctgctgaaggagacggaagaaggcccgcctgctaccgagtgtggctacgcctgccagccgctggctgtggtggacctcatcgtggacatcatgttcattgtggacatcctcatcaacttccgcaccacctacgtcaatgccaacgaggaggtggtcagccaccccggccgcatcgccgtccactacttcaagggctggttcctcatcgacatggtggccgccatccccttcgacctgctcatcttcggctctggctctgaggagctgatcgggctgctgaagactgcgcggctgctgcggctggtgcgcgtggcgcggaagctggatcgctactcagagtacggcgcggccgtgctgttcttgctcatgtgcacctttgcgcccatcgcgcactggctagcctgcatctggtacgccatcggcaacatggagcagccacacatggactcacgcatcggctggctgcacaacctgggcgaccagataggcaaaccctacaacagcagcggcctgggcggcccctccatcaaggacaagtatgtgacggcgctctacttcaccttcagcagcctcaccagtgtgggcttcggcaacgtctctcccaacaccaactcagagaagatcttctccatctgcgtcatgctcattggctccctcatgtatgctagcatcttcggcaacgtgtcggccatcatccagcggctgtactcgggcacagcccgctaccacacacagatgctgcgggtgcgggagttcatccgcttccaccagatccccaatcccctgcgccagcgcctcgaggagtacttccagcacgcctggtcctacaccaacggcatcgacatgaacgcggtgctgaagggcttccctgagtgcctgcaggctgacatctgcctgcacctgaaccgctcactgctgcagcactgcaaacccttccgaggggccaccaagggctgccttcgggccctggccatgaagttcaagaccacacatgcaccgccaggggacacactggtgcatgctggggacctgctcaccgccctgtacttcatctcccggggctccatcgagatcctgcggggcgacgtcgtcgtggccatcctggggaagaatgacatctttggggagcctctgaacctgtatgcaaggcctggcaagtcgaacggggatgtgcgggccctcacctactgtgacctacacaagatccatcgggacgacctgctggaggtgctggacatgtaccctgagttctccgaccacttctggtccagcctggagatcaccttcaacctgcgagataccaacatgatcccgggctcccccggcagtacggagttagagggtggcttcagtcggcaacgcaagcgcaagttgtccttccgcaggcgcacggacaaggacacggagcagccaggggaggtgtcggccttggggccgggccgggcgggggcagggccgagtagccggggccggccgggggggccgtggggggagagcccgtccagtggcccctccagccctgagagcagtgaggatgagggcccaggccgcagctccagccccctccgcctggtgcccttctccagccccaggccccccggagagccgccgggtggggagcccctgatggaggactgcgagaagagcagcgacacttgcaaccccctgtcaggcgccttctcaggagtgtccaacattttcagcttctggggggacagtcggggccgccagtaccaggagctccctcgatgccccgcccccacccccagcctcctcaacatccccctctccagcccgggtcggcggccccggggcgacgtggagagcaggctggatgccctccagcgccagctcaacaggctggagacccggctgagtgcagacatggccactgtcctgcagctgctacagaggcagatgacgctggtcccgcccgcctacagtgctgtgaccaccccggggcctggccccacttccacatccccgctgttgcccgtcagccccctccccaccctcaccttggactcgctttctcaggtttcccagttcatggcgtgtgaggagctgcccccgggggccccagagcttccccaagaaggccccacacgacgcctctccctaccgggccagctgggggccctcacctcccagcccctgcacagacacggctcggacccgggcagttagtggggctgcccagtgtggacacgtggctcacccagggatcaaggcgctgctgggccgctccccttggaggccctgctcaggaggccctgaccgtggaaggggagaggaactcgaaagcacagctcctcccccagcccttgggaccatcttctcctgcagtcccctgggccccagtgagaggggcaggggcagggccggcagtaggtggggcctgtggtccccccactgccctgagggcattagctggtctaactgcccggaggcacccggccctgggccttaggcacctcaaggacttttctgctatttactgctcttattgttaaggataataattaaggatcatatgaataattaatgaagatgctgatgactatgaataataaataattatcctgaggaga

SEQ ID NO: 182 - DNA, 3884 bp, Homo sapiens
  source 1..3884: mol_type = genomic DNA
  misc_feature 1..3884: note = cDNA of KCNH2 gene SNP c.1678A>G (p.Ile560Val)
atgccggtgcggaggggccacgtcgcgccgcagaacaccttcctggacaccatcatccgcaagtttgagggccagagccgtaagttcatcatcgccaacgctcgggtggagaactgcgccgtcatctactgcaacgacggcttctgcgagctgtgcggctactcgcgggccgaggtgatgcagcgaccctgcacctgcgacttcctgcacgggccgcgcacgcagcgccgcgctgccgcgcagatcgcgcaggcactgctgggcgccgaggagcgcaaagtggaaatcgccttctaccggaaagatgggagctgcttcctatgtctggtggatgtggtgcccgtgaagaacgaggatggggctgtcatcatgttcatcctcaatttcgaggtggtgatggagaaggacatggtggggtccccggctcatgacaccaaccaccggggcccccccaccagctggctggccccaggccgcgccaagaccttccgcctgaagctgcccgcgctgctggcgctgacggcccgggagtcgtcggtgcggtcgggcggcgcgggcggcgcgggcgccccgggggccgtggtggtggacgtggacctgacgcccgcggcacccagcagcgagtcgctggccctggacgaagtgacagccatggacaaccacgtggcagggctcgggcccgcggaggagcggcgtgcgctggtgggtcccggctctccgccccgcagcgcgcccggccagctcccatcgccccgggcgcacagcctcaaccccgacgcctcgggctccagctgcagcctggcccggacgcgctcccgagaaagctgcgccagcgtgcgccgcgcctcgtcggccgacgacatcgaggccatgcgcgccggggtgctgcccccgccaccgcgccacgccagcaccggggccatgcacccactgcgcagcggcttgctcaactccacctcggactccgacctcgtgcgctaccgcaccattagcaagattccccaaatcaccctcaactttgtggacctcaagggcgaccccttcttggcttcgcccaccagtgaccgtgagatcatagcacctaagataaaggagcgaacccacaatgtcactgagaaggtcacccaggtcctgtccctgggcgccgacgtgctgcctgagtacaagctgcaggcaccgcgcatccaccgctggaccatcctgcattacagccccttcaaggccgtgtgggactggctcatcctgctgctggtcatctacacggctgtcttcacaccctactcggctgccttcctgctgaaggagacggaagaaggcccgcctgctaccgagtgtggctacgcctgccagccgctggctgtggtggacctcatcgtggacatcatgttcattgtggacatcctcatcaacttccgcaccacctacgtcaatgccaacgaggaggtggtcagccaccccggccgcatcgccgtccactacttcaagggctggttcctcatcgacatggtggccgccatccccttcgacctgctcatcttcggctctggctctgaggagctgatcgggctgctgaagactgcgcggctgctgcggctggtgcgcgtggcgcggaagctggatcgctactcagagtacggcgcggccgtgctgttcttgctcatgtgcacctttgcgctcgtcgcgcactggctagcctgcatctggtacgccatcggcaacatggagcagccacacatggactcacgcatcggctggctgcacaacctgggcgaccagataggcaaaccctacaacagcagcggcctgggcggcccctccatcaaggacaagtatgtgacggcgctctacttcaccttcagcagcctcaccagtgtgggcttcggcaacgtctctcccaacaccaactcagagaagatcttctccatctgcgtcatgctcattggctccctcatgtatgctagcatcttcggcaacgtgtcggccatcatccagcggctgtactcgggcacagcccgctaccacacacagatgctgcgggtgcgggagttcatccgcttccaccagatccccaatcccctgcgccagcgcctcgaggagtacttccagcacgcctggtcctacaccaacggcatcgacatgaacgcggtgctgaagggcttccctgagtgcctgcaggctgacatctgcctgcacctgaaccgctcactgctgcagcactgcaaacccttccgaggggccaccaagggctgccttcgggccctggccatgaagttcaagaccacacatgcaccgccaggggacacactggtgcatgctggggacctgctcaccgccctgtacttcatctcccggggctccatcgagatcctgcggggcgacgtcgtcgtggccatcctggggaagaatgacatctttggggagcctctgaacctgtatgcaaggcctggcaagtcgaacggggatgtgcgggccctcacctactgtgacctacacaagatccatcgggacgacctgctggaggtgctggacatgtaccctgagttctccgaccacttctggtccagcctggagatcaccttcaacctgcgagataccaacatgatcccgggctcccccggcagtacggagttagagggtggcttcagtcggcaacgcaagcgcaagttgtccttccgcaggcgcacggacaaggacacggagcagccaggggaggtgtcggccttggggccgggccgggcgggggcagggccgagtagccggggccggccgggggggccgtggggggagagcccgtccagtggcccctccagccctgagagcagtgaggatgagggcccaggccgcagctccagccccctccgcctggtgcccttctccagccccaggccccccggagagccgccgggtggggagcccctgatggaggactgcgagaagagcagcgacacttgcaaccccctgtcaggcgccttctcaggagtgtccaacattttcagcttctggggggacagtcggggccgccagtaccaggagctccctcgatgccccgcccccacccccagcctcctcaacatccccctctccagcccgggtcggcggccccggggcgacgtggagagcaggctggatgccctccagcgccagctcaacaggctggagacccggctgagtgcagacatggccactgtcctgcagctgctacagaggcagatgacgctggtcccgcccgcctacagtgctgtgaccaccccggggcctggccccacttccacatccccgctgttgcccgtcagccccctccccaccctcaccttggactcgctttctcaggtttcccagttcatggcgtgtgaggagctgcccccgggggccccagagcttccccaagaaggccccacacgacgcctctccctaccgggccagctgggggccctcacctcccagcccctgcacagacacggctcggacccgggcagttagtggggctgcccagtgtggacacgtggctcacccagggatcaaggcgctgctgggccgctccccttggaggccctgctcaggaggccctgaccgtggaaggggagaggaactcgaaagcacagctcctcccccagcccttgggaccatcttctcctgcagtcccctgggccccagtgagaggggcaggggcagggccggcagtaggtggggcctgtggtccccccactgccctgagggcattagctggtctaactgcccggaggcacccggccctgggccttaggcacctcaaggacttttctgctatttactgctcttattgttaaggataataattaaggatcatatgaataattaatgaagatgctgatgactatgaataataaataattatcctgaggaga

SEQ ID NO: 183 - DNA, 3884 bp, Homo sapiens
  source 1..3884: mol_type = genomic DNA
  misc_feature 1..3884: note = cDNA of KCNH2 gene SNP c.167G>A (p.Arg56Gln)
atgccggtgcggaggggccacgtcgcgccgcagaacaccttcctggacaccatcatccgcaagtttgagggccagagccgtaagttcatcatcgccaacgctcgggtggagaactgcgccgtcatctactgcaacgacggcttctgcgagctgtgcggctactcgcaggccgaggtgatgcagcgaccctgcacctgcgacttcctgcacgggccgcgcacgcagcgccgcgctgccgcgcagatcgcgcaggcactgctgggcgccgaggagcgcaaagtggaaatcgccttctaccggaaagatgggagctgcttcctatgtctggtggatgtggtgcccgtgaagaacgaggatggggctgtcatcatgttcatcctcaatttcgaggtggtgatggagaaggacatggtggggtccccggctcatgacaccaaccaccggggcccccccaccagctggctggccccaggccgcgccaagaccttccgcctgaagctgcccgcgctgctggcgctgacggcccgggagtcgtcggtgcggtcgggcggcgcgggcggcgcgggcgccccgggggccgtggtggtggacgtggacctgacgcccgcggcacccagcagcgagtcgctggccctggacgaagtgacagccatggacaaccacgtggcagggctcgggcccgcggaggagcggcgtgcgctggtgggtcccggctctccgccccgcagcgcgcccggccagctcccatcgccccgggcgcacagcctcaaccccgacgcctcgggctccagctgcagcctggcccggacgcgctcccgagaaagctgcgccagcgtgcgccgcgcctcgtcggccgacgacatcgaggccatgcgcgccggggtgctgcccccgccaccgcgccacgccagcaccggggccatgcacccactgcgcagcggcttgctcaactccacctcggactccgacctcgtgcgctaccgcaccattagcaagattccccaaatcaccctcaactttgtggacctcaagggcgaccccttcttggcttcgcccaccagtgaccgtgagatcatagcacctaagataaaggagcgaacccacaatgtcactgagaaggtcacccaggtcctgtccctgggcgccgacgtgctgcctgagtacaagctgcaggcaccgcgcatccaccgctggaccatcctgcattacagccccttcaaggccgtgtgggactggctcatcctgctgctggtcatctacacggctgtcttcacaccctactcggctgccttcctgctgaaggagacggaagaaggcccgcctgctaccgagtgtggctacgcctgccagccgctggctgtggtggacctcatcgtggacatcatgttcattgtggacatcctcatcaacttccgcaccacctacgtcaatgccaacgaggaggtggtcagccaccccggccgcatcgccgtccactacttcaagggctggttcctcatcgacatggtggccgccatccccttcgacctgctcatcttcggctctggctctgaggagctgatcgggctgctgaagactgcgcggctgctgcggctggtgcgcgtggcgcggaagctggatcgctactcagagtacggcgcggccgtgctgttcttgctcatgtgcacctttgcgctcatcgcgcactggctagcctgcatctggtacgccatcggcaacatggagcagccacacatggactcacgcatcggctggctgcacaacctgggcgaccagataggcaaaccctacaacagcagcggcctgggcggcccctccatcaaggacaagtatgtgacggcgctctacttcaccttcagcagcctcaccagtgtgggcttcggcaacgtctctcccaacaccaactcagagaagatcttctccatctgcgtcatgctcattggctccctcatgtatgctagcatcttcggcaacgtgtcggccatcatccagcggctgtactcgggcacagcccgctaccacacacagatgctgcgggtgcgggagttcatccgcttccaccagatccccaatcccctgcgccagcgcctcgaggagtacttccagcacgcctggtcctacaccaacggcatcgacatgaacgcggtgctgaagggcttccctgagtgcctgcaggctgacatctgcctgcacctgaaccgctcactgctgcagcactgcaaacccttccgaggggccaccaagggctgccttcgggccctggccatgaagttcaagaccacacatgcaccgccaggggacacactggtgcatgctggggacctgctcaccgccctgtacttcatctcccggggctccatcgagatcctgcggggcgacgtcgtcgtggccatcctggggaagaatgacatctttggggagcctctgaacctgtatgcaaggcctggcaagtcgaacggggatgtgcgggccctcacctactgtgacctacacaagatccatcgggacgacctgctggaggtgctggacatgtaccctgagttctccgaccacttctggtccagcctggagatcaccttcaacctgcgagataccaacatgatcccgggctcccccggcagtacggagttagagggtggcttcagtcggcaacgcaagcgcaagttgtccttccgcaggcgcacggacaaggacacggagcagccaggggaggtgtcggccttggggccgggccgggcgggggcagggccgagtagccggggccggccgggggggccgtggggggagagcccgtccagtggcccctccagccctgagagcagtgaggatgagggcccaggccgcagctccagccccctccgcctggtgcccttctccagccccaggccccccggagagccgccgggtggggagcccctgatggaggactgcgagaagagcagcgacacttgcaaccccctgtcaggcgccttctcaggagtgtccaacattttcagcttctggggggacagtcggggccgccagtaccaggagctccctcgatgccccgcccccacccccagcctcctcaacatccccctctccagcccgggtcggcggccccggggcgacgtggagagcaggctggatgccctccagcgccagctcaacaggctggagacccggctgagtgcagacatggccactgtcctgcagctgctacagaggcagatgacgctggtcccgcccgcctacagtgctgtgaccaccccggggcctggccccacttccacatccccgctgttgcccgtcagccccctccccaccctcaccttggactcgctttctcaggtttcccagttcatggcgtgtgaggagctgcccccgggggccccagagcttccccaagaaggccccacacgacgcctctccctaccgggccagctgggggccctcacctcccagcccctgcacagacacggctcggacccgggcagttagtggggctgcccagtgtggacacgtggctcacccagggatcaaggcgctgctgggccgctccccttggaggccctgctcaggaggccctgaccgtggaaggggagaggaactcgaaagcacagctcctcccccagcccttgggaccatcttctcctgcagtcccctgggccccagtgagaggggcaggggcagggccggcagtaggtggggcctgtggtccccccactgccctgagggcattagctggtctaactgcccggaggcacccggccctgggccttaggcacctcaaggacttttctgctatttactgctcttattgttaaggataataattaaggatcatatgaataattaatgaagatgctgatgactatgaataataaataattatcctgaggaga

SEQ ID NO: 184 - DNA, 3884 bp, Homo sapiens
  source 1..3884: mol_type = genomic DNA
  misc_feature 1..3884: note = cDNA of KCNH2 gene SNP c.167G>T (p.Arg56Leu)
atgccggtgcggaggggccacgtcgcgccgcagaacaccttcctggacaccatcatccgcaagtttgagggccagagccgtaagttcatcatcgccaacgctcgggtggagaactgcgccgtcatctactgcaacgacggcttctgcgagctgtgcggctactcgctggccgaggtgatgcagcgaccctgcacctgcgacttcctgcacgggccgcgcacgcagcgccgcgctgccgcgcagatcgcgcaggcactgctgggcgccgaggagcgcaaagtggaaatcgccttctaccggaaagatgggagctgcttcctatgtctggtggatgtggtgcccgtgaagaacgaggatggggctgtcatcatgttcatcctcaatttcgaggtggtgatggagaaggacatggtggggtccccggctcatgacaccaaccaccggggcccccccaccagctggctggccccaggccgcgccaagaccttccgcctgaagctgcccgcgctgctggcgctgacggcccgggagtcgtcggtgcggtcgggcggcgcgggcggcgcgggcgccccgggggccgtggtggtggacgtggacctgacgcccgcggcacccagcagcgagtcgctggccctggacgaagtgacagccatggacaaccacgtggcagggctcgggcccgcggaggagcggcgtgcgctggtgggtcccggctctccgccccgcagcgcgcccggccagctcccatcgccccgggcgcacagcctcaaccccgacgcctcgggctccagctgcagcctggcccggacgcgctcccgagaaagctgcgccagcgtgcgccgcgcctcgtcggccgacgacatcgaggccatgcgcgccggggtgctgcccccgccaccgcgccacgccagcaccggggccatgcacccactgcgcagcggcttgctcaactccacctcggactccgacctcgtgcgctaccgcaccattagcaagattccccaaatcaccctcaactttgtggacctcaagggcgaccccttcttggcttcgcccaccagtgaccgtgagatcatagcacctaagataaaggagcgaacccacaatgtcactgagaaggtcacccaggtcctgtccctgggcgccgacgtgctgcctgagtacaagctgcaggcaccgcgcatccaccgctggaccatcctgcattacagccccttcaaggccgtgtgggactggctcatcctgctgctggtcatctacacggctgtcttcacaccctactcggctgccttcctgctgaaggagacggaagaaggcccgcctgctaccgagtgtggctacgcctgccagccgctggctgtggtggacctcatcgtggacatcatgttcattgtggacatcctcatcaacttccgcaccacctacgtcaatgccaacgaggaggtggtcagccaccccggccgcatcgccgtccactacttcaagggctggttcctcatcgacatggtggccgccatccccttcgacctgctcatcttcggctctggctctgaggagctgatcgggctgctgaagactgcgcggctgctgcggctggtgcgcgtggcgcggaagctggatcgctactcagagtacggcgcggccgtgctgttcttgctcatgtgcacctttgcgctcatcgcgcactggctagcctgcatctggtacgccatcggcaacatggagcagccacacatggactcacgcatcggctggctgcacaacctgggcgaccagataggcaaaccctacaacagcagcggcctgggcggcccctccatcaaggacaagtatgtgacggcgctctacttcaccttcagcagcctcaccagtgtgggcttcggcaacgtctctcccaacaccaactcagagaagatcttctccatctgcgtcatgctcattggctccctcatgtatgctagcatcttcggcaacgtgtcggccatcatccagcggctgtactcgggcacagcccgctaccacacacagatgctgcgggtgcgggagttcatccgcttccaccagatccccaatcccctgcgccagcgcctcgaggagtacttccagcacgcctggtcctacaccaacggcatcgacatgaacgcggtgctgaagggcttccctgagtgcctgcaggctgacatctgcctgcacctgaaccgctcactgctgcagcactgcaaacccttccgaggggccaccaagggctgccttcgggccctggccatgaagttcaagaccacacatgcaccgccaggggacacactggtgcatgctggggacctgctcaccgccctgtacttcatctcccggggctccatcgagatcctgcggggcgacgtcgtcgtggccatcctggggaagaatgacatctttggggagcctctgaacctgtatgcaaggcctggcaagtcgaacggggatgtgcgggccctcacctactgtgacctacacaagatccatcgggacgacctgctggaggtgctggacatgtaccctgagttctccgaccacttctggtccagcctggagatcaccttcaacctgcgagataccaacatgatcccgggctcccccggcagtacggagttagagggtggcttcagtcggcaacgcaagcgcaagttgtccttccgcaggcgcacggacaaggacacggagcagccaggggaggtgtcggccttggggccgggccgggcgggggcagggccgagtagccggggccggccgggggggccgtggggggagagcccgtccagtggcccctccagccctgagagcagtgaggatgagggcccaggccgcagctccagccccctccgcctggtgcccttctccagccccaggccccccggagagccgccgggtggggagcccctgatggaggactgcgagaagagcagcgacacttgcaaccccctgtcaggcgccttctcaggagtgtccaacattttcagcttctggggggacagtcggggccgccagtaccaggagctccctcgatgccccgcccccacccccagcctcctcaacatccccctctccagcccgggtcggcggccccggggcgacgtggagagcaggctggatgccctccagcgccagctcaacaggctggagacccggctgagtgcagacatggccactgtcctgcagctgctacagaggcagatgacgctggtcccgcccgcctacagtgctgtgaccaccccggggcctggccccacttccacatccccgctgttgcccgtcagccccctccccaccctcaccttggactcgctttctcaggtttcccagttcatggcgtgtgaggagctgcccccgggggccccagagcttccccaagaaggccccacacgacgcctctccctaccgggccagctgggggccctcacctcccagcccctgcacagacacggctcggacccgggcagttagtggggctgcccagtgtggacacgtggctcacccagggatcaaggcgctgctgggccgctccccttggaggccctgctcaggaggccctgaccgtggaaggggagaggaactcgaaagcacagctcctcccccagcccttgggaccatcttctcctgcagtcccctgggccccagtgagaggggcaggggcagggccggcagtaggtggggcctgtggtccccccactgccctgagggcattagctggtctaactgcccggaggcacccggccctgggccttaggcacctcaaggacttttctgctatttactgctcttattgttaaggataataattaaggatcatatgaataattaatgaagatgctgatgactatgaataataaataattatcctgaggaga

SEQ ID NO: 185 - DNA, 3884 bp, Homo sapiens
  source 1..3884: mol_type = genomic DNA
  misc_feature 1..3884: note = cDNA of KCNH2 gene SNP c.1681G>A (p.Ala561Thr)
atgccggtgcggaggggccacgtcgcgccgcagaacaccttcctggacaccatcatccgcaagtttgagggccagagccgtaagttcatcatcgccaacgctcgggtggagaactgcgccgtcatctactgcaacgacggcttctgcgagctgtgcggctactcgcgggccgaggtgatgcagcgaccctgcacctgcgacttcctgcacgggccgcgcacgcagcgccgcgctgccgcgcagatcgcgcaggcactgctgggcgccgaggagcgcaaagtggaaatcgccttctaccggaaagatgggagctgcttcctatgtctggtggatgtggtgcccgtgaagaacgaggatggggctgtcatcatgttcatcctcaatttcgaggtggtgatggagaaggacatggtggggtccccggctcatgacaccaaccaccggggcccccccaccagctggctggccccaggccgcgccaagaccttccgcctgaagctgcccgcgctgctggcgctgacggcccgggagtcgtcggtgcggtcgggcggcgcgggcggcgcgggcgccccgggggccgtggtggtggacgtggacctgacgcccgcggcacccagcagcgagtcgctggccctggacgaagtgacagccatggacaaccacgtggcagggctcgggcccgcggaggagcggcgtgcgctggtgggtcccggctctccgccccgcagcgcgcccggccagctcccatcgccccgggcgcacagcctcaaccccgacgcctcgggctccagctgcagcctggcccggacgcgctcccgagaaagctgcgccagcgtgcgccgcgcctcgtcggccgacgacatcgaggccatgcgcgccggggtgctgcccccgccaccgcgccacgccagcaccggggccatgcacccactgcgcagcggcttgctcaactccacctcggactccgacctcgtgcgctaccgcaccattagcaagattccccaaatcaccctcaactttgtggacctcaagggcgaccccttcttggcttcgcccaccagtgaccgtgagatcatagcacctaagataaaggagcgaacccacaatgtcactgagaaggtcacccaggtcctgtccctgggcgccgacgtgctgcctgagtacaagctgcaggcaccgcgcatccaccgctggaccatcctgcattacagccccttcaaggccgtgtgggactggctcatcctgctgctggtcatctacacggctgtcttcacaccctactcggctgccttcctgctgaaggagacggaagaaggcccgcctgctaccgagtgtggctacgcctgccagccgctggctgtggtggacctcatcgtggacatcatgttcattgtggacatcctcatcaacttccgcaccacctacgtcaatgccaacgaggaggtggtcagccaccccggccgcatcgccgtccactacttcaagggctggttcctcatcgacatggtggccgccatccccttcgacctgctcatcttcggctctggctctgaggagctgatcgggctgctgaagactgcgcggctgctgcggctggtgcgcgtggcgcggaagctggatcgctactcagagtacggcgcggccgtgctgttcttgctcatgtgcacctttgcgctcatcacgcactggctagcctgcatctggtacgccatcggcaacatggagcagccacacatggactcacgcatcggctggctgcacaacctgggcgaccagataggcaaaccctacaacagcagcggcctgggcggcccctccatcaaggacaagtatgtgacggcgctctacttcaccttcagcagcctcaccagtgtgggcttcggcaacgtctctcccaacaccaactcagagaagatcttctccatctgcgtcatgctcattggctccctcatgtatgctagcatcttcggcaacgtgtcggccatcatccagcggctgtactcgggcacagcccgctaccacacacagatgctgcgggtgcgggagttcatccgcttccaccagatccccaatcccctgcgccagcgcctcgaggagtacttccagcacgcctggtcctacaccaacggcatcgacatgaacgcggtgctgaagggcttccctgagtgcctgcaggctgacatctgcctgcacctgaaccgctcactgctgcagcactgcaaacccttccgaggggccaccaagggctgccttcgggccctggccatgaagttcaagaccacacatgcaccgccaggggacacactggtgcatgctggggacctgctcaccgccctgtacttcatctcccggggctccatcgagatcctgcggggcgacgtcgtcgtggccatcctggggaagaatgacatctttggggagcctctgaacctgtatgcaaggcctggcaagtcgaacggggatgtgcgggccctcacctactgtgacctacacaagatccatcgggacgacctgctggaggtgctggacatgtaccctgagttctccgaccacttctggtccagcctggagatcaccttcaacctgcgagataccaacatgatcccgggctcccccggcagtacggagttagagggtggcttcagtcggcaacgcaagcgcaagttgtccttccgcaggcgcacggacaaggacacggagcagccaggggaggtgtcggccttggggccgggccgggcgggggcagggccgagtagccggggccggccgggggggccgtggggggagagcccgtccagtggcccctccagccctgagagcagtgaggatgagggcccaggccgcagctccagccccctccgcctggtgcccttctccagccccaggccccccggagagccgccgggtggggagcccctgatggaggactgcgagaagagcagcgacacttgcaaccccctgtcaggcgccttctcaggagtgtccaacattttcagcttctggggggacagtcggggccgccagtaccaggagctccctcgatgccccgcccccacccccagcctcctcaacatccccctctccagcccgggtcggcggccccggggcgacgtggagagcaggctggatgccctccagcgccagctcaacaggctggagacccggctgagtgcagacatggccactgtcctgcagctgctacagaggcagatgacgctggtcccgcccgcctacagtgctgtgaccaccccggggcctggccccacttccacatccccgctgttgcccgtcagccccctccccaccctcaccttggactcgctttctcaggtttcccagttcatggcgtgtgaggagctgcccccgggggccccagagcttccccaagaaggccccacacgacgcctctccctaccgggccagctgggggccctcacctcccagcccctgcacagacacggctcggacccgggcagttagtggggctgcccagtgtggacacgtggctcacccagggatcaaggcgctgctgggccgctccccttggaggccctgctcaggaggccctgaccgtggaaggggagaggaactcgaaagcacagctcctcccccagcccttgggaccatcttctcctgcagtcccctgggccccagtgagaggggcaggggcagggccggcagtaggtggggcctgtggtccccccactgccctgagggcattagctggtctaactgcccggaggcacccggccctgggccttaggcacctcaaggacttttctgctatttactgctcttattgttaaggataataattaaggatcatatgaataattaatgaagatgctgatgactatgaataataaataattatcctgaggaga

SEQ ID NO: 186 - DNA, 3884 bp, Homo sapiens
  source 1..3884: mol_type = genomic DNA
  misc_feature 1..3884: note = cDNA of KCNH2 gene SNP c.1681G>C (p.Ala561Pro)
atgccggtgcggaggggccacgtcgcgccgcagaacaccttcctggacaccatcatccgcaagtttgagggccagagccgtaagttcatcatcgccaacgctcgggtggagaactgcgccgtcatctactgcaacgacggcttctgcgagctgtgcggctactcgcgggccgaggtgatgcagcgaccctgcacctgcgacttcctgcacgggccgcgcacgcagcgccgcgctgccgcgcagatcgcgcaggcactgctgggcgccgaggagcgcaaagtggaaatcgccttctaccggaaagatgggagctgcttcctatgtctggtggatgtggtgcccgtgaagaacgaggatggggctgtcatcatgttcatcctcaatttcgaggtggtgatggagaaggacatggtggggtccccggctcatgacaccaaccaccggggcccccccaccagctggctggccccaggccgcgccaagaccttccgcctgaagctgcccgcgctgctggcgctgacggcccgggagtcgtcggtgcggtcgggcggcgcgggcggcgcgggcgccccgggggccgtggtggtggacgtggacctgacgcccgcggcacccagcagcgagtcgctggccctggacgaagtgacagccatggacaaccacgtggcagggctcgggcccgcggaggagcggcgtgcgctggtgggtcccggctctccgccccgcagcgcgcccggccagctcccatcgccccgggcgcacagcctcaaccccgacgcctcgggctccagctgcagcctggcccggacgcgctcccgagaaagctgcgccagcgtgcgccgcgcctcgtcggccgacgacatcgaggccatgcgcgccggggtgctgcccccgccaccgcgccacgccagcaccggggccatgcacccactgcgcagcggcttgctcaactccacctcggactccgacctcgtgcgctaccgcaccattagcaagattccccaaatcaccctcaactttgtggacctcaagggcgaccccttcttggcttcgcccaccagtgaccgtgagatcatagcacctaagataaaggagcgaacccacaatgtcactgagaaggtcacccaggtcctgtccctgggcgccgacgtgctgcctgagtacaagctgcaggcaccgcgcatccaccgctggaccatcctgcattacagccccttcaaggccgtgtgggactggctcatcctgctgctggtcatctacacggctgtcttcacaccctactcggctgccttcctgctgaaggagacggaagaaggcccgcctgctaccgagtgtggctacgcctgccagccgctggctgtggtggacctcatcgtggacatcatgttcattgtggacatcctcatcaacttccgcaccacctacgtcaatgccaacgaggaggtggtcagccaccccggccgcatcgccgtccactacttcaagggctggttcctcatcgacatggtggccgccatccccttcgacctgctcatcttcggctctggctctgaggagctgatcgggctgctgaagactgcgcggctgctgcggctggtgcgcgtggcgcggaagctggatcgctactcagagtacggcgcggccgtgctgttcttgctcatgtgcacctttgcgctcatcccgcactggctagcctgcatctggtacgccatcggcaacatggagcagccacacatggactcacgcatcggctggctgcacaacctgggcgaccagataggcaaaccctacaacagcagcggcctgggcggcccctccatcaaggacaagtatgtgacggcgctctacttcaccttcagcagcctcaccagtgtgggcttcggcaacgtctctcccaacaccaactcagagaagatcttctccatctgcgtcatgctcattggctccctcatgtatgctagcatcttcggcaacgtgtcggccatcatccagcggctgtactcgggcacagcccgctaccacacacagatgctgcgggtgcgggagttcatccgcttccaccagatccccaatcccctgcgccagcgcctcgaggagtacttccagcacgcctggtcctacaccaacggcatcgacatgaacgcggtgctgaagggcttccctgagtgcctgcaggctgacatctgcctgcacctgaaccgctcactgctgcagcactgcaaacccttccgaggggccaccaagggctgccttcgggccctggccatgaagttcaagaccacacatgcaccgccaggggacacactggtgcatgctggggacctgctcaccgccctgtacttcatctcccggggctccatcgagatcctgcggggcgacgtcgtcgtggccatcctggggaagaatgacatctttggggagcctctgaacctgtatgcaaggcctggcaagtcgaacggggatgtgcgggccctcacctactgtgacctacacaagatccatcgggacgacctgctggaggtgctggacatgtaccctgagttctccgaccacttctggtccagcctggagatcaccttcaacctgcgagataccaacatgatcccgggctcccccggcagtacggagttagagggtggcttcagtcggcaacgcaagcgcaagttgtccttccgcaggcgcacggacaaggacacggagcagccaggggaggtgtcggccttggggccgggccgggcgggggcagggccgagtagccggggccggccgggggggccgtggggggagagcccgtccagtggcccctccagccctgagagcagtgaggatgagggcccaggccgcagctccagccccctccgcctggtgcccttctccagccccaggccccccggagagccgccgggtggggagcccctgatggaggactgcgagaagagcagcgacacttgcaaccccctgtcaggcgccttctcaggagtgtccaacattttcagcttctggggggacagtcggggccgccagtaccaggagctccctcgatgccccgcccccacccccagcctcctcaacatccccctctccagcccgggtcggcggccccggggcgacgtggagagcaggctggatgccctccagcgccagctcaacaggctggagacccggctgagtgcagacatggccactgtcctgcagctgctacagaggcagatgacgctggtcccgcccgcctacagtgctgtgaccaccccggggcctggccccacttccacatccccgctgttgcccgtcagccccctccccaccctcaccttggactcgctttctcaggtttcccagttcatggcgtgtgaggagctgcccccgggggccccagagcttccccaagaaggccccacacgacgcctctccctaccgggccagctgggggccctcacctcccagcccctgcacagacacggctcggacccgggcagttagtggggctgcccagtgtggacacgtggctcacccagggatcaaggcgctgctgggccgctccccttggaggccctgctcaggaggccctgaccgtggaaggggagaggaactcgaaagcacagctcctcccccagcccttgggaccatcttctcctgcagtcccctgggccccagtgagaggggcaggggcagggccggcagtaggtggggcctgtggtccccccactgccctgagggcattagctggtctaactgcccggaggcacccggccctgggccttaggcacctcaaggacttttctgctatttactgctcttattgttaaggataataattaaggatcatatgaataattaatgaagatgctgatgactatgaataataaataattatcctgaggaga

SEQ ID NO: 187 - DNA, 3884 bp, Homo sapiens
  source 1..3884: mol_type = genomic DNA
  misc_feature 1..3884: note = cDNA of KCNH2 gene SNP c.1682C>T (p.Ala561Val)
atgccggtgcggaggggccacgtcgcgccgcagaacaccttcctggacaccatcatccgcaagtttgagggccagagccgtaagttcatcatcgccaacgctcgggtggagaactgcgccgtcatctactgcaacgacggcttctgcgagctgtgcggctactcgcgggccgaggtgatgcagcgaccctgcacctgcgacttcctgcacgggccgcgcacgcagcgccgcgctgccgcgcagatcgcgcaggcactgctgggcgccgaggagcgcaaagtggaaatcgccttctaccggaaagatgggagctgcttcctatgtctggtggatgtggtgcccgtgaagaacgaggatggggctgtcatcatgttcatcctcaatttcgaggtggtgatggagaaggacatggtggggtccccggctcatgacaccaaccaccggggcccccccaccagctggctggccccaggccgcgccaagaccttccgcctgaagctgcccgcgctgctggcgctgacggcccgggagtcgtcggtgcggtcgggcggcgcgggcggcgcgggcgccccgggggccgtggtggtggacgtggacctgacgcccgcggcacccagcagcgagtcgctggccctggacgaagtgacagccatggacaaccacgtggcagggctcgggcccgcggaggagcggcgtgcgctggtgggtcccggctctccgccccgcagcgcgcccggccagctcccatcgccccgggcgcacagcctcaaccccgacgcctcgggctccagctgcagcctggcccggacgcgctcccgagaaagctgcgccagcgtgcgccgcgcctcgtcggccgacgacatcgaggccatgcgcgccggggtgctgcccccgccaccgcgccacgccagcaccggggccatgcacccactgcgcagcggcttgctcaactccacctcggactccgacctcgtgcgctaccgcaccattagcaagattccccaaatcaccctcaactttgtggacctcaagggcgaccccttcttggcttcgcccaccagtgaccgtgagatcatagcacctaagataaaggagcgaacccacaatgtcactgagaaggtcacccaggtcctgtccctgggcgccgacgtgctgcctgagtacaagctgcaggcaccgcgcatccaccgctggaccatcctgcattacagccccttcaaggccgtgtgggactggctcatcctgctgctggtcatctacacggctgtcttcacaccctactcggctgccttcctgctgaaggagacggaagaaggcccgcctgctaccgagtgtggctacgcctgccagccgctggctgtggtggacctcatcgtggacatcatgttcattgtggacatcctcatcaacttccgcaccacctacgtcaatgccaacgaggaggtggtcagccaccccggccgcatcgccgtccactacttcaagggctggttcctcatcgacatggtggccgccatccccttcgacctgctcatcttcggctctggctctgaggagctgatcgggctgctgaagactgcgcggctgctgcggctggtgcgcgtggcgcggaagctggatcgctactcagagtacggcgcggccgtgctgttcttgctcatgtgcacctttgcgctcatcgtgcactggctagcctgcatctggtacgccatcggcaacatggagcagccacacatggactcacgcatcggctggctgcacaacctgggcgaccagataggcaaaccctacaacagcagcggcctgggcggcccctccatcaaggacaagtatgtgacggcgctctacttcaccttcagcagcctcaccagtgtgggcttcggcaacgtctctcccaacaccaactcagagaagatcttctccatctgcgtcatgctcattggctccctcatgtatgctagcatcttcggcaacgtgtcggccatcatccagcggctgtactcgggcacagcccgctaccacacacagatgctgcgggtgcgggagttcatccgcttccaccagatccccaatcccctgcgccagcgcctcgaggagtacttccagcacgcctggtcctacaccaacggcatcgacatgaacgcggtgctgaagggcttccctgagtgcctgcaggctgacatctgcctgcacctgaaccgctcactgctgcagcactgcaaacccttccgaggggccaccaagggctgccttcgggccctggccatgaagttcaagaccacacatgcaccgccaggggacacactggtgcatgctggggacctgctcaccgccctgtacttcatctcccggggctccatcgagatcctgcggggcgacgtcgtcgtggccatcctggggaagaatgacatctttggggagcctctgaacctgtatgcaaggcctggcaagtcgaacggggatgtgcgggccctcacctactgtgacctacacaagatccatcgggacgacctgctggaggtgctggacatgtaccctgagttctccgaccacttctggtccagcctggagatcaccttcaacctgcgagataccaacatgatcccgggctcccccggcagtacggagttagagggtggcttcagtcggcaacgcaagcgcaagttgtccttccgcaggcgcacggacaaggacacggagcagccaggggaggtgtcggccttggggccgggccgggcgggggcagggccgagtagccggggccggccgggggggccgtggggggagagcccgtccagtggcccctccagccctgagagcagtgaggatgagggcccaggccgcagctccagccccctccgcctggtgcccttctccagccccaggccccccggagagccgccgggtggggagcccctgatggaggactgcgagaagagcagcgacacttgcaaccccctgtcaggcgccttctcaggagtgtccaacattttcagcttctggggggacagtcggggccgccagtaccaggagctccctcgatgccccgcccccacccccagcctcctcaacatccccctctccagcccgggtcggcggccccggggcgacgtggagagcaggctggatgccctccagcgccagctcaacaggctggagacccggctgagtgcagacatggccactgtcctgcagctgctacagaggcagatgacgctggtcccgcccgcctacagtgctgtgaccaccccggggcctggccccacttccacatccccgctgttgcccgtcagccccctccccaccctcaccttggactcgctttctcaggtttcccagttcatggcgtgtgaggagctgcccccgggggccccagagcttccccaagaaggccccacacgacgcctctccctaccgggccagctgggggccctcacctcccagcccctgcacagacacggctcggacccgggcagttagtggggctgcccagtgtggacacgtggctcacccagggatcaaggcgctgctgggccgctccccttggaggccctgctcaggaggccctgaccgtggaaggggagaggaactcgaaagcacagctcctcccccagcccttgggaccatcttctcctgcagtcccctgggccccagtgagaggggcaggggcagggccggcagtaggtggggcctgtggtccccccactgccctgagggcattagctggtctaactgcccggaggcacccggccctgggccttaggcacctcaaggacttttctgctatttactgctcttattgttaaggataataattaaggatcatatgaataattaatgaagatgctgatgactatgaataataaataattatcctgaggaga

SEQ ID NO: 188 - DNA, 3884 bp, Homo sapiens
  source 1..3884: mol_type = genomic DNA
  misc_feature 1..3884: note = cDNA of KCNH2 gene SNP c.1684C>T (p.His562Tyr)
atgccggtgcggaggggccacgtcgcgccgcagaacaccttcctggacaccatcatccgcaagtttgagggccagagccgtaagttcatcatcgccaacgctcgggtggagaactgcgccgtcatctactgcaacgacggcttctgcgagctgtgcggctactcgcgggccgaggtgatgcagcgaccctgcacctgcgacttcctgcacgggccgcgcacgcagcgccgcgctgccgcgcagatcgcgcaggcactgctgggcgccgaggagcgcaaagtggaaatcgccttctaccggaaagatgggagctgcttcctatgtctggtggatgtggtgcccgtgaagaacgaggatggggctgtcatcatgttcatcctcaatttcgaggtggtgatggagaaggacatggtggggtccccggctcatgacaccaaccaccggggcccccccaccagctggctggccccaggccgcgccaagaccttccgcctgaagctgcccgcgctgctggcgctgacggcccgggagtcgtcggtgcggtcgggcggcgcgggcggcgcgggcgccccgggggccgtggtggtggacgtggacctgacgcccgcggcacccagcagcgagtcgctggccctggacgaagtgacagccatggacaaccacgtggcagggctcgggcccgcggaggagcggcgtgcgctggtgggtcccggctctccgccccgcagcgcgcccggccagctcccatcgccccgggcgcacagcctcaaccccgacgcctcgggctccagctgcagcctggcccggacgcgctcccgagaaagctgcgccagcgtgcgccgcgcctcgtcggccgacgacatcgaggccatgcgcgccggggtgctgcccccgccaccgcgccacgccagcaccggggccatgcacccactgcgcagcggcttgctcaactccacctcggactccgacctcgtgcgctaccgcaccattagcaagattccccaaatcaccctcaactttgtggacctcaagggcgaccccttcttggcttcgcccaccagtgaccgtgagatcatagcacctaagataaaggagcgaacccacaatgtcactgagaaggtcacccaggtcctgtccctgggcgccgacgtgctgcctgagtacaagctgcaggcaccgcgcatccaccgctggaccatcctgcattacagccccttcaaggccgtgtgggactggctcatcctgctgctggtcatctacacggctgtcttcacaccctactcggctgccttcctgctgaaggagacggaagaaggcccgcctgctaccgagtgtggctacgcctgccagccgctggctgtggtggacctcatcgtggacatcatgttcattgtggacatcctcatcaacttccgcaccacctacgtcaatgccaacgaggaggtggtcagccaccccggccgcatcgccgtccactacttcaagggctggttcctcatcgacatggtggccgccatccccttcgacctgctcatcttcggctctggctctgaggagctgatcgggctgctgaagactgcgcggctgctgcggctggtgcgcgtggcgcggaagctggatcgctactcagagtacggcgcggccgtgctgttcttgctcatgtgcacctttgcgctcatcgcgtactggctagcctgcatctggtacgccatcggcaacatggagcagccacacatggactcacgcatcggctggctgcacaacctgggcgaccagataggcaaaccctacaacagcagcggcctgggcggcccctccatcaaggacaagtatgtgacggcgctctacttcaccttcagcagcctcaccagtgtgggcttcggcaacgtctctcccaacaccaactcagagaagatcttctccatctgcgtcatgctcattggctccctcatgtatgctagcatcttcggcaacgtgtcggccatcatccagcggctgtactcgggcacagcccgctaccacacacagatgctgcgggtgcgggagttcatccgcttccaccagatccccaatcccctgcgccagcgcctcgaggagtacttccagcacgcctggtcctacaccaacggcatcgacatgaacgcggtgctgaagggcttccctgagtgcctgcaggctgacatctgcctgcacctgaaccgctcactgctgcagcactgcaaacccttccgaggggccaccaagggctgccttcgggccctggccatgaagttcaagaccacacatgcaccgccaggggacacactggtgcatgctggggacctgctcaccgccctgtacttcatctcccggggctccatcgagatcctgcggggcgacgtcgtcgtggccatcctggggaagaatgacatctttggggagcctctgaacctgtatgcaaggcctggcaagtcgaacggggatgtgcgggccctcacctactgtgacctacacaagatccatcgggacgacctgctggaggtgctggacatgtaccctgagttctccgaccacttctggtccagcctggagatcaccttcaacctgcgagataccaacatgatcccgggctcccccggcagtacggagttagagggtggcttcagtcggcaacgcaagcgcaagttgtccttccgcaggcgcacggacaaggacacggagcagccaggggaggtgtcggccttggggccgggccgggcgggggcagggccgagtagccggggccggccgggggggccgtggggggagagcccgtccagtggcccctccagccctgagagcagtgaggatgagggcccaggccgcagctccagccccctccgcctggtgcccttctccagccccaggccccccggagagccgccgggtggggagcccctgatggaggactgcgagaagagcagcgacacttgcaaccccctgtcaggcgccttctcaggagtgtccaacattttcagcttctggggggacagtcggggccgccagtaccaggagctccctcgatgccccgcccccacccccagcctcctcaacatccccctctccagcccgggtcggcggccccggggcgacgtggagagcaggctggatgccctccagcgccagctcaacaggctggagacccggctgagtgcagacatggccactgtcctgcagctgctacagaggcagatgacgctggtcccgcccgcctacagtgctgtgaccaccccggggcctggccccacttccacatccccgctgttgcccgtcagccccctccccaccctcaccttggactcgctttctcaggtttcccagttcatggcgtgtgaggagctgcccccgggggccccagagcttccccaagaaggccccacacgacgcctctccctaccgggccagctgggggccctcacctcccagcccctgcacagacacggctcggacccgggcagttagtggggctgcccagtgtggacacgtggctcacccagggatcaaggcgctgctgggccgctccccttggaggccctgctcaggaggccctgaccgtggaaggggagaggaactcgaaagcacagctcctcccccagcccttgggaccatcttctcctgcagtcccctgggccccagtgagaggggcaggggcagggccggcagtaggtggggcctgtggtccccccactgccctgagggcattagctggtctaactgcccggaggcacccggccctgggccttaggcacctcaaggacttttctgctatttactgctcttattgttaaggataataattaaggatcatatgaataattaatgaagatgctgatgactatgaataataaataattatcctgaggaga

SEQ ID NO: 189 - DNA, 3884 bp, Homo sapiens
  source 1..3884: mol_type = genomic DNA
  misc_feature 1..3884: note = cDNA of KCNH2 gene SNP c.1685A>C (p.His562Pro)
atgccggtgcggaggggccacgtcgcgccgcagaacaccttcctggacaccatcatccgcaagtttgagggccagagccgtaagttcatcatcgccaacgctcgggtggagaactgcgccgtcatctactgcaacgacggcttctgcgagctgtgcggctactcgcgggccgaggtgatgcagcgaccctgcacctgcgacttcctgcacgggccgcgcacgcagcgccgcgctgccgcgcagatcgcgcaggcactgctgggcgccgaggagcgcaaagtggaaatcgccttctaccggaaagatgggagctgcttcctatgtctggtggatgtggtgcccgtgaagaacgaggatggggctgtcatcatgttcatcctcaatttcgaggtggtgatggagaaggacatggtggggtccccggctcatgacaccaaccaccggggcccccccaccagctggctggccccaggccgcgccaagaccttccgcctgaagctgcccgcgctgctggcgctgacggcccgggagtcgtcggtgcggtcgggcggcgcgggcggcgcgggcgccccgggggccgtggtggtggacgtggacctgacgcccgcggcacccagcagcgagtcgctggccctggacgaagtgacagccatggacaaccacgtggcagggctcgggcccgcggaggagcggcgtgcgctggtgggtcccggctctccgccccgcagcgcgcccggccagctcccatcgccccgggcgcacagcctcaaccccgacgcctcgggctccagctgcagcctggcccggacgcgctcccgagaaagctgcgccagcgtgcgccgcgcctcgtcggccgacgacatcgaggccatgcgcgccggggtgctgcccccgccaccgcgccacgccagcaccggggccatgcacccactgcgcagcggcttgctcaactccacctcggactccgacctcgtgcgctaccgcaccattagcaagattccccaaatcaccctcaactttgtggacctcaagggcgaccccttcttggcttcgcccaccagtgaccgtgagatcatagcacctaagataaaggagcgaacccacaatgtcactgagaaggtcacccaggtcctgtccctgggcgccgacgtgctgcctgagtacaagctgcaggcaccgcgcatccaccgctggaccatcctgcattacagccccttcaaggccgtgtgggactggctcatcctgctgctggtcatctacacggctgtcttcacaccctactcggctgccttcctgctgaaggagacggaagaaggcccgcctgctaccgagtgtggctacgcctgccagccgctggctgtggtggacctcatcgtggacatcatgttcattgtggacatcctcatcaacttccgcaccacctacgtcaatgccaacgaggaggtggtcagccaccccggccgcatcgccgtccactacttcaagggctggttcctcatcgacatggtggccgccatccccttcgacctgctcatcttcggctctggctctgaggagctgatcgggctgctgaagactgcgcggctgctgcggctggtgcgcgtggcgcggaagctggatcgctactcagagtacggcgcggccgtgctgttcttgctcatgtgcacctttgcgctcatcgcgccctggctagcctgcatctggtacgccatcggcaacatggagcagccacacatggactcacgcatcggctggctgcacaacctgggcgaccagataggcaaaccctacaacagcagcggcctgggcggcccctccatcaaggacaagtatgtgacggcgctctacttcaccttcagcagcctcaccagtgtgggcttcggcaacgtctctcccaacaccaactcagagaagatcttctccatctgcgtcatgctcattggctccctcatgtatgctagcatcttcggcaacgtgtcggccatcatccagcggctgtactcgggcacagcccgctaccacacacagatgctgcgggtgcgggagttcatccgcttccaccagatccccaatcccctgcgccagcgcctcgaggagtacttccagcacgcctggtcctacaccaacggcatcgacatgaacgcggtgctgaagggcttccctgagtgcctgcaggctgacatctgcctgcacctgaaccgctcactgctgcagcactgcaaacccttccgaggggccaccaagggctgccttcgggccctggccatgaagttcaagaccacacatgcaccgccaggggacacactggtgcatgctggggacctgctcaccgccctgtacttcatctcccggggctccatcgagatcctgcggggcgacgtcgtcgtggccatcctggggaagaatgacatctttggggagcctctgaacctgtatgcaaggcctggcaagtcgaacggggatgtgcgggccctcacctactgtgacctacacaagatccatcgggacgacctgctggaggtgctggacatgtaccctgagttctccgaccacttctggtccagcctggagatcaccttcaacctgcgagataccaacatgatcccgggctcccccggcagtacggagttagagggtggcttcagtcggcaacgcaagcgcaagttgtccttccgcaggcgcacggacaaggacacggagcagccaggggaggtgtcggccttggggccgggccgggcgggggcagggccgagtagccggggccggccgggggggccgtggggggagagcccgtccagtggcccctccagccctgagagcagtgaggatgagggcccaggccgcagctccagccccctccgcctggtgcccttctccagccccaggccccccggagagccgccgggtggggagcccctgatggaggactgcgagaagagcagcgacacttgcaaccccctgtcaggcgccttctcaggagtgtccaacattttcagcttctggggggacagtcggggccgccagtaccaggagctccctcgatgccccgcccccacccccagcctcctcaacatccccctctccagcccgggtcggcggccccggggcgacgtggagagcaggctggatgccctccagcgccagctcaacaggctggagacccggctgagtgcagacatggccactgtcctgcagctgctacagaggcagatgacgctggtcccgcccgcctacagtgctgtgaccaccccggggcctggccccacttccacatccccgctgttgcccgtcagccccctccccaccctcaccttggactcgctttctcaggtttcccagttcatggcgtgtgaggagctgcccccgggggccccagagcttccccaagaaggccccacacgacgcctctccctaccgggccagctgggggccctcacctcccagcccctgcacagacacggctcggacccgggcagttagtggggctgcccagtgtggacacgtggctcacccagggatcaaggcgctgctgggccgctccccttggaggccctgctcaggaggccctgaccgtggaaggggagaggaactcgaaagcacagctcctcccccagcccttgggaccatcttctcctgcagtcccctgggccccagtgagaggggcaggggcagggccggcagtaggtggggcctgtggtccccccactgccctgagggcattagctggtctaactgcccggaggcacccggccctgggccttaggcacctcaaggacttttctgctatttactgctcttattgttaaggataataattaaggatcatatgaataattaatgaagatgctgatgactatgaataataaataattatcctgaggaga

SEQ ID NO: 190 - DNA, 3884 bp, Homo sapiens
  source 1..3884: mol_type = genomic DNA
  misc_feature 1..3884: note = cDNA of KCNH2 gene SNP c.1685A>G (p.His562Arg)
atgccggtgcggaggggccacgtcgcgccgcagaacaccttcctggacaccatcatccgcaagtttgagggccagagccgtaagttcatcatcgccaacgctcgggtggagaactgcgccgtcatctactgcaacgacggcttctgcgagctgtgcggctactcgcgggccgaggtgatgcagcgaccctgcacctgcgacttcctgcacgggccgcgcacgcagcgccgcgctgccgcgcagatcgcgcaggcactgctgggcgccgaggagcgcaaagtggaaatcgccttctaccggaaagatgggagctgcttcctatgtctggtggatgtggtgcccgtgaagaacgaggatggggctgtcatcatgttcatcctcaatttcgaggtggtgatggagaaggacatggtggggtccccggctcatgacaccaaccaccggggcccccccaccagctggctggccccaggccgcgccaagaccttccgcctgaagctgcccgcgctgctggcgctgacggcccgggagtcgtcggtgcggtcgggcggcgcgggcggcgcgggcgccccgggggccgtggtggtggacgtggacctgacgcccgcggcacccagcagcgagtcgctggccctggacgaagtgacagccatggacaaccacgtggcagggctcgggcccgcggaggagcggcgtgcgctggtgggtcccggctctccgccccgcagcgcgcccggccagctcccatcgccccgggcgcacagcctcaaccccgacgcctcgggctccagctgcagcctggcccggacgcgctcccgagaaagctgcgccagcgtgcgccgcgcctcgtcggccgacgacatcgaggccatgcgcgccggggtgctgcccccgccaccgcgccacgccagcaccggggccatgcacccactgcgcagcggcttgctcaactccacctcggactccgacctcgtgcgctaccgcaccattagcaagattccccaaatcaccctcaactttgtggacctcaagggcgaccccttcttggcttcgcccaccagtgaccgtgagatcatagcacctaagataaaggagcgaacccacaatgtcactgagaaggtcacccaggtcctgtccctgggcgccgacgtgctgcctgagtacaagctgcaggcaccgcgcatccaccgctggaccatcctgcattacagccccttcaaggccgtgtgggactggctcatcctgctgctggtcatctacacggctgtcttcacaccctactcggctgccttcctgctgaaggagacggaagaaggcccgcctgctaccgagtgtggctacgcctgccagccgctggctgtggtggacctcatcgtggacatcatgttcattgtggacatcctcatcaacttccgcaccacctacgtcaatgccaacgaggaggtggtcagccaccccggccgcatcgccgtccactacttcaagggctggttcctcatcgacatggtggccgccatccccttcgacctgctcatcttcggctctggctctgaggagctgatcgggctgctgaagactgcgcggctgctgcggctggtgcgcgtggcgcggaagctggatcgctactcagagtacggcgcggccgtgctgttcttgctcatgtgcacctttgcgctcatcgcgcgctggctagcctgcatctggtacgccatcggcaacatggagcagccacacatggactcacgcatcggctggctgcacaacctgggcgaccagataggcaaaccctacaacagcagcggcctgggcggcccctccatcaaggacaagtatgtgacggcgctctacttcaccttcagcagcctcaccagtgtgggcttcggcaacgtctctcccaacaccaactcagagaagatcttctccatctgcgtcatgctcattggctccctcatgtatgctagcatcttcggcaacgtgtcggccatcatccagcggctgtactcgggcacagcccgctaccacacacagatgctgcgggtgcgggagttcatccgcttccaccagatccccaatcccctgcgccagcgcctcgaggagtacttccagcacgcctggtcctacaccaacggcatcgacatgaacgcggtgctgaagggcttccctgagtgcctgcaggctgacatctgcctgcacctgaaccgctcactgctgcagcactgcaaacccttccgaggggccaccaagggctgccttcgggccctggccatgaagttcaagaccacacatgcaccgccaggggacacactggtgcatgctggggacctgctcaccgccctgtacttcatctcccggggctccatcgagatcctgcggggcgacgtcgtcgtggccatcctggggaagaatgacatctttggggagcctctgaacctgtatgcaaggcctggcaagtcgaacggggatgtgcgggccctcacctactgtgacctacacaagatccatcgggacgacctgctggaggtgctggacatgtaccctgagttctccgaccacttctggtccagcctggagatcaccttcaacctgcgagataccaacatgatcccgggctcccccggcagtacggagttagagggtggcttcagtcggcaacgcaagcgcaagttgtccttccgcaggcgcacggacaaggacacggagcagccaggggaggtgtcggccttggggccgggccgggcgggggcagggccgagtagccggggccggccgggggggccgtggggggagagcccgtccagtggcccctccagccctgagagcagtgaggatgagggcccaggccgcagctccagccccctccgcctggtgcccttctccagccccaggccccccggagagccgccgggtggggagcccctgatggaggactgcgagaagagcagcgacacttgcaaccccctgtcaggcgccttctcaggagtgtccaacattttcagcttctggggggacagtcggggccgccagtaccaggagctccctcgatgccccgcccccacccccagcctcctcaacatccccctctccagcccgggtcggcggccccggggcgacgtggagagcaggctggatgccctccagcgccagctcaacaggctggagacccggctgagtgcagacatggccactgtcctgcagctgctacagaggcagatgacgctggtcccgcccgcctacagtgctgtgaccaccccggggcctggccccacttccacatccccgctgttgcccgtcagccccctccccaccctcaccttggactcgctttctcaggtttcccagttcatggcgtgtgaggagctgcccccgggggccccagagcttccccaagaaggccccacacgacgcctctccctaccgggccagctgggggccctcacctcccagcccctgcacagacacggctcggacccgggcagttagtggggctgcccagtgtggacacgtggctcacccagggatcaaggcgctgctgggccgctccccttggaggccctgctcaggaggccctgaccgtggaaggggagaggaactcgaaagcacagctcctcccccagcccttgggaccatcttctcctgcagtcccctgggccccagtgagaggggcaggggcagggccggcagtaggtggggcctgtggtccccccactgccctgagggcattagctggtctaactgcccggaggcacccggccctgggccttaggcacctcaaggacttttctgctatttactgctcttattgttaaggataataattaaggatcatatgaataattaatgaagatgctgatgactatgaataataaataattatcctgaggaga

SEQ ID NO: 191 - DNA, 3884 bp, Homo sapiens
  source 1..3884: mol_type = genomic DNA
  misc_feature 1..3884: note = cDNA of KCNH2 gene SNP c.1686C>G (p.His562Gln)
atgccggtgcggaggggccacgtcgcgccgcagaacaccttcctggacaccatcatccgcaagtttgagggccagagccgtaagttcatcatcgccaacgctcgggtggagaactgcgccgtcatctactgcaacgacggcttctgcgagctgtgcggctactcgcgggccgaggtgatgcagcgaccctgcacctgcgacttcctgcacgggccgcgcacgcagcgccgcgctgccgcgcagatcgcgcaggcactgctgggcgccgaggagcgcaaagtggaaatcgccttctaccggaaagatgggagctgcttcctatgtctggtggatgtggtgcccgtgaagaacgaggatggggctgtcatcatgttcatcctcaatttcgaggtggtgatggagaaggacatggtggggtccccggctcatgacaccaaccaccggggcccccccaccagctggctggccccaggccgcgccaagaccttccgcctgaagctgcccgcgctgctggcgctgacggcccgggagtcgtcggtgcggtcgggcggcgcgggcggcgcgggcgccccgggggccgtggtggtggacgtggacctgacgcccgcggcacccagcagcgagtcgctggccctggacgaagtgacagccatggacaaccacgtggcagggctcgggcccgcggaggagcggcgtgcgctggtgggtcccggctctccgccccgcagcgcgcccggccagctcccatcgccccgggcgcacagcctcaaccccgacgcctcgggctccagctgcagcctggcccggacgcgctcccgagaaagctgcgccagcgtgcgccgcgcctcgtcggccgacgacatcgaggccatgcgcgccggggtgctgcccccgccaccgcgccacgccagcaccggggccatgcacccactgcgcagcggcttgctcaactccacctcggactccgacctcgtgcgctaccgcaccattagcaagattccccaaatcaccctcaactttgtggacctcaagggcgaccccttcttggcttcgcccaccagtgaccgtgagatcatagcacctaagataaaggagcgaacccacaatgtcactgagaaggtcacccaggtcctgtccctgggcgccgacgtgctgcctgagtacaagctgcaggcaccgcgcatccaccgctggaccatcctgcattacagccccttcaaggccgtgtgggactggctcatcctgctgctggtcatctacacggctgtcttcacaccctactcggctgccttcctgctgaaggagacggaagaaggcccgcctgctaccgagtgtggctacgcctgccagccgctggctgtggtggacctcatcgtggacatcatgttcattgtggacatcctcatcaacttccgcaccacctacgtcaatgccaacgaggaggtggtcagccaccccggccgcatcgccgtccactacttcaagggctggttcctcatcgacatggtggccgccatccccttcgacctgctcatcttcggctctggctctgaggagctgatcgggctgctgaagactgcgcggctgctgcggctggtgcgcgtggcgcggaagctggatcgctactcagagtacggcgcggccgtgctgttcttgctcatgtgcacctttgcgctcatcgcgcagtggctagcctgcatctggtacgccatcggcaacatggagcagccacacatggactcacgcatcggctggctgcacaacctgggcgaccagataggcaaaccctacaacagcagcggcctgggcggcccctccatcaaggacaagtatgtgacggcgctctacttcaccttcagcagcctcaccagtgtgggcttcggcaacgtctctcccaacaccaactcagagaagatcttctccatctgcgtcatgctcattggctccctcatgtatgctagcatcttcggcaacgtgtcggccatcatccagcggctgtactcgggcacagcccgctaccacacacagatgctgcgggtgcgggagttcatccgcttccaccagatccccaatcccctgcgccagcgcctcgaggagtacttccagcacgcctggtcctacaccaacggcatcgacatgaacgcggtgctgaagggcttccctgagtgcctgcaggctgacatctgcctgcacctgaaccgctcactgctgcagcactgcaaacccttccgaggggccaccaagggctgccttcgggccctggccatgaagttcaagaccacacatgcaccgccaggggacacactggtgcatgctggggacctgctcaccgccctgtacttcatctcccggggctccatcgagatcctgcggggcgacgtcgtcgtggccatcctggggaagaatgacatctttggggagcctctgaacctgtatgcaaggcctggcaagtcgaacggggatgtgcgggccctcacctactgtgacctacacaagatccatcgggacgacctgctggaggtgctggacatgtaccctgagttctccgaccacttctggtccagcctggagatcaccttcaacctgcgagataccaacatgatcccgggctcccccggcagtacggagttagagggtggcttcagtcggcaacgcaagcgcaagttgtccttccgcaggcgcacggacaaggacacggagcagccaggggaggtgtcggccttggggccgggccgggcgggggcagggccgagtagccggggccggccgggggggccgtggggggagagcccgtccagtggcccctccagccctgagagcagtgaggatgagggcccaggccgcagctccagccccctccgcctggtgcccttctccagccccaggccccccggagagccgccgggtggggagcccctgatggaggactgcgagaagagcagcgacacttgcaaccccctgtcaggcgccttctcaggagtgtccaacattttcagcttctggggggacagtcggggccgccagtaccaggagctccctcgatgccccgcccccacccccagcctcctcaacatccccctctccagcccgggtcggcggccccggggcgacgtggagagcaggctggatgccctccagcgccagctcaacaggctggagacccggctgagtgcagacatggccactgtcctgcagctgctacagaggcagatgacgctggtcccgcccgcctacagtgctgtgaccaccccggggcctggccccacttccacatccccgctgttgcccgtcagccccctccccaccctcaccttggactcgctttctcaggtttcccagttcatggcgtgtgaggagctgcccccgggggccccagagcttccccaagaaggccccacacgacgcctctccctaccgggccagctgggggccctcacctcccagcccctgcacagacacggctcggacccgggcagttagtggggctgcccagtgtggacacgtggctcacccagggatcaaggcgctgctgggccgctccccttggaggccctgctcaggaggccctgaccgtggaaggggagaggaactcgaaagcacagctcctcccccagcccttgggaccatcttctcctgcagtcccctgggccccagtgagaggggcaggggcagggccggcagtaggtggggcctgtggtccccccactgccctgagggcattagctggtctaactgcccggaggcacccggccctgggccttaggcacctcaaggacttttctgctatttactgctcttattgttaaggataataattaaggatcatatgaataattaatgaagatgctgatgactatgaataataaataattatcctgaggaga

SEQ ID NO: 192 - DNA, 3884 bp, Homo sapiens
  source 1..3884: mol_type = genomic DNA
  misc_feature 1..3884: note = cDNA of KCNH2 gene SNP c.1687T>G (p.Trp563Gly)
atgccggtgcggaggggccacgtcgcgccgcagaacaccttcctggacaccatcatccgcaagtttgagggccagagccgtaagttcatcatcgccaacgctcgggtggagaactgcgccgtcatctactgcaacgacggcttctgcgagctgtgcggctactcgcgggccgaggtgatgcagcgaccctgcacctgcgacttcctgcacgggccgcgcacgcagcgccgcgctgccgcgcagatcgcgcaggcactgctgggcgccgaggagcgcaaagtggaaatcgccttctaccggaaagatgggagctgcttcctatgtctggtggatgtggtgcccgtgaagaacgaggatggggctgtcatcatgttcatcctcaatttcgaggtggtgatggagaaggacatggtggggtccccggctcatgacaccaaccaccggggcccccccaccagctggctggccccaggccgcgccaagaccttccgcctgaagctgcccgcgctgctggcgctgacggcccgggagtcgtcggtgcggtcgggcggcgcgggcggcgcgggcgccccgggggccgtggtggtggacgtggacctgacgcccgcggcacccagcagcgagtcgctggccctggacgaagtgacagccatggacaaccacgtggcagggctcgggcccgcggaggagcggcgtgcgctggtgggtcccggctctccgccccgcagcgcgcccggccagctcccatcgccccgggcgcacagcctcaaccccgacgcctcgggctccagctgcagcctggcccggacgcgctcccgagaaagctgcgccagcgtgcgccgcgcctcgtcggccgacgacatcgaggccatgcgcgccggggtgctgcccccgccaccgcgccacgccagcaccggggccatgcacccactgcgcagcggcttgctcaactccacctcggactccgacctcgtgcgctaccgcaccattagcaagattccccaaatcaccctcaactttgtggacctcaagggcgaccccttcttggcttcgcccaccagtgaccgtgagatcatagcacctaagataaaggagcgaacccacaatgtcactgagaaggtcacccaggtcctgtccctgggcgccgacgtgctgcctgagtacaagctgcaggcaccgcgcatccaccgctggaccatcctgcattacagccccttcaaggccgtgtgggactggctcatcctgctgctggtcatctacacggctgtcttcacaccctactcggctgccttcctgctgaaggagacggaagaaggcccgcctgctaccgagtgtggctacgcctgccagccgctggctgtggtggacctcatcgtggacatcatgttcattgtggacatcctcatcaacttccgcaccacctacgtcaatgccaacgaggaggtggtcagccaccccggccgcatcgccgtccactacttcaagggctggttcctcatcgacatggtggccgccatccccttcgacctgctcatcttcggctctggctctgaggagctgatcgggctgctgaagactgcgcggctgctgcggctggtgcgcgtggcgcggaagctggatcgctactcagagtacggcgcggccgtgctgttcttgctcatgtgcacctttgcgctcatcgcgcacgggctagcctgcatctggtacgccatcggcaacatggagcagccacacatggactcacgcatcggctggctgcacaacctgggcgaccagataggcaaaccctacaacagcagcggcctgggcggcccctccatcaaggacaagtatgtgacggcgctctacttcaccttcagcagcctcaccagtgtgggcttcggcaacgtctctcccaacaccaactcagagaagatcttctccatctgcgtcatgctcattggctccctcatgtatgctagcatcttcggcaacgtgtcggccatcatccagcggctgtactcgggcacagcccgctaccacacacagatgctgcgggtgcgggagttcatccgcttccaccagatccccaatcccctgcgccagcgcctcgaggagtacttccagcacgcctggtcctacaccaacggcatcgacatgaacgcggtgctgaagggcttccctgagtgcctgcaggctgacatctgcctgcacctgaaccgctcactgctgcagcactgcaaacccttccgaggggccaccaagggctgccttcgggccctggccatgaagttcaagaccacacatgcaccgccaggggacacactggtgcatgctggggacctgctcaccgccctgtacttcatctcccggggctccatcgagatcctgcggggcgacgtcgtcgtggccatcctggggaagaatgacatctttggggagcctctgaacctgtatgcaaggcctggcaagtcgaacggggatgtgcgggccctcacctactgtgacctacacaagatccatcgggacgacctgctggaggtgctggacatgtaccctgagttctccgaccacttctggtccagcctggagatcaccttcaacctgcgagataccaacatgatcccgggctcccccggcagtacggagttagagggtggcttcagtcggcaacgcaagcgcaagttgtccttccgcaggcgcacggacaaggacacggagcagccaggggaggtgtcggccttggggccgggccgggcgggggcagggccgagtagccggggccggccgggggggccgtggggggagagcccgtccagtggcccctccagccctgagagcagtgaggatgagggcccaggccgcagctccagccccctccgcctggtgcccttctccagccccaggccccccggagagccgccgggtggggagcccctgatggaggactgcgagaagagcagcgacacttgcaaccccctgtcaggcgccttctcaggagtgtccaacattttcagcttctggggggacagtcggggccgccagtaccaggagctccctcgatgccccgcccccacccccagcctcctcaacatccccctctccagcccgggtcggcggccccggggcgacgtggagagcaggctggatgccctccagcgccagctcaacaggctggagacccggctgagtgcagacatggccactgtcctgcagctgctacagaggcagatgacgctggtcccgcccgcctacagtgctgtgaccaccccggggcctggccccacttccacatccccgctgttgcccgtcagccccctccccaccctcaccttggactcgctttctcaggtttcccagttcatggcgtgtgaggagctgcccccgggggccccagagcttccccaagaaggccccacacgacgcctctccctaccgggccagctgggggccctcacctcccagcccctgcacagacacggctcggacccgggcagttagtggggctgcccagtgtggacacgtggctcacccagggatcaaggcgctgctgggccgctccccttggaggccctgctcaggaggccctgaccgtggaaggggagaggaactcgaaagcacagctcctcccccagcccttgggaccatcttctcctgcagtcccctgggccccagtgagaggggcaggggcagggccggcagtaggtggggcctgtggtccccccactgccctgagggcattagctggtctaactgcccggaggcacccggccctgggccttaggcacctcaaggacttttctgctatttactgctcttattgttaaggataataattaaggatcatatgaataattaatgaagatgctgatgactatgaataataaataattatcctgaggaga

SEQ ID NO: 193 - DNA, 3884 bp, Homo sapiens
  source 1..3884: mol_type = genomic DNA
  misc_feature 1..3884: note = cDNA of KCNH2 gene SNP c.1688G>A (p.Trp563Ter)
atgccggtgcggaggggccacgtcgcgccgcagaacaccttcctggacaccatcatccgcaagtttgagggccagagccgtaagttcatcatcgccaacgctcgggtggagaactgcgccgtcatctactgcaacgacggcttctgcgagctgtgcggctactcgcgggccgaggtgatgcagcgaccctgcacctgcgacttcctgcacgggccgcgcacgcagcgccgcgctgccgcgcagatcgcgcaggcactgctgggcgccgaggagcgcaaagtggaaatcgccttctaccggaaagatgggagctgcttcctatgtctggtggatgtggtgcccgtgaagaacgaggatggggctgtcatcatgttcatcctcaatttcgaggtggtgatggagaaggacatggtggggtccccggctcatgacaccaaccaccggggcccccccaccagctggctggccccaggccgcgccaagaccttccgcctgaagctgcccgcgctgctggcgctgacggcccgggagtcgtcggtgcggtcgggcggcgcgggcggcgcgggcgccccgggggccgtggtggtggacgtggacctgacgcccgcggcacccagcagcgagtcgctggccctggacgaagtgacagccatggacaaccacgtggcagggctcgggcccgcggaggagcggcgtgcgctggtgggtcccggctctccgccccgcagcgcgcccggccagctcccatcgccccgggcgcacagcctcaaccccgacgcctcgggctccagctgcagcctggcccggacgcgctcccgagaaagctgcgccagcgtgcgccgcgcctcgtcggccgacgacatcgaggccatgcgcgccggggtgctgcccccgccaccgcgccacgccagcaccggggccatgcacccactgcgcagcggcttgctcaactccacctcggactccgacctcgtgcgctaccgcaccattagcaagattccccaaatcaccctcaactttgtggacctcaagggcgaccccttcttggcttcgcccaccagtgaccgtgagatcatagcacctaagataaaggagcgaacccacaatgtcactgagaaggtcacccaggtcctgtccctgggcgccgacgtgctgcctgagtacaagctgcaggcaccgcgcatccaccgctggaccatcctgcattacagccccttcaaggccgtgtgggactggctcatcctgctgctggtcatctacacggctgtcttcacaccctactcggctgccttcctgctgaaggagacggaagaaggcccgcctgctaccgagtgtggctacgcctgccagccgctggctgtggtggacctcatcgtggacatcatgttcattgtggacatcctcatcaacttccgcaccacctacgtcaatgccaacgaggaggtggtcagccaccccggccgcatcgccgtccactacttcaagggctggttcctcatcgacatggtggccgccatccccttcgacctgctcatcttcggctctggctctgaggagctgatcgggctgctgaagactgcgcggctgctgcggctggtgcgcgtggcgcggaagctggatcgctactcagagtacggcgcggccgtgctgttcttgctcatgtgcacctttgcgctcatcgcgcactagctagcctgcatctggtacgccatcggcaacatggagcagccacacatggactcacgcatcggctggctgcacaacctgggcgaccagataggcaaaccctacaacagcagcggcctgggcggcccctccatcaaggacaagtatgtgacggcgctctacttcaccttcagcagcctcaccagtgtgggcttcggcaacgtctctcccaacaccaactcagagaagatcttctccatctgcgtcatgctcattggctccctcatgtatgctagcatcttcggcaacgtgtcggccatcatccagcggctgtactcgggcacagcccgctaccacacacagatgctgcgggtgcgggagttcatccgcttccaccagatccccaatcccctgcgccagcgcctcgaggagtacttccagcacgcctggtcctacaccaacggcatcgacatgaacgcggtgctgaagggcttccctgagtgcctgcaggctgacatctgcctgcacctgaaccgctcactgctgcagcactgcaaacccttccgaggggccaccaagggctgccttcgggccctggccatgaagttcaagaccacacatgcaccgccaggggacacactggtgcatgctggggacctgctcaccgccctgtacttcatctcccggggctccatcgagatcctgcggggcgacgtcgtcgtggccatcctggggaagaatgacatctttggggagcctctgaacctgtatgcaaggcctggcaagtcgaacggggatgtgcgggccctcacctactgtgacctacacaagatccatcgggacgacctgctggaggtgctggacatgtaccctgagttctccgaccacttctggtccagcctggagatcaccttcaacctgcgagataccaacatgatcccgggctcccccggcagtacggagttagagggtggcttcagtcggcaacgcaagcgcaagttgtccttccgcaggcgcacggacaaggacacggagcagccaggggaggtgtcggccttggggccgggccgggcgggggcagggccgagtagccggggccggccgggggggccgtggggggagagcccgtccagtggcccctccagccctgagagcagtgaggatgagggcccaggccgcagctccagccccctccgcctggtgcccttctccagccccaggccccccggagagccgccgggtggggagcccctgatggaggactgcgagaagagcagcgacacttgcaaccccctgtcaggcgccttctcaggagtgtccaacattttcagcttctggggggacagtcggggccgccagtaccaggagctccctcgatgccccgcccccacccccagcctcctcaacatccccctctccagcccgggtcggcggccccggggcgacgtggagagcaggctggatgccctccagcgccagctcaacaggctggagacccggctgagtgcagacatggccactgtcctgcagctgctacagaggcagatgacgctggtcccgcccgcctacagtgctgtgaccaccccggggcctggccccacttccacatccccgctgttgcccgtcagccccctccccaccctcaccttggactcgctttctcaggtttcccagttcatggcgtgtgaggagctgcccccgggggccccagagcttccccaagaaggccccacacgacgcctctccctaccgggccagctgggggccctcacctcccagcccctgcacagacacggctcggacccgggcagttagtggggctgcccagtgtggacacgtggctcacccagggatcaaggcgctgctgggccgctccccttggaggccctgctcaggaggccctgaccgtggaaggggagaggaactcgaaagcacagctcctcccccagcccttgggaccatcttctcctgcagtcccctgggccccagtgagaggggcaggggcagggccggcagtaggtggggcctgtggtccccccactgccctgagggcattagctggtctaactgcccggaggcacccggccctgggccttaggcacctcaaggacttttctgctatttactgctcttattgttaaggataataattaaggatcatatgaataattaatgaagatgctgatgactatgaataataaataattatcctgaggaga

SEQ ID NO: 194 - DNA, 3884 bp, Homo sapiens
  source 1..3884: mol_type = genomic DNA
  misc_feature 1..3884: note = cDNA of KCNH2 gene SNP c.1689G>A (p.Trp563Ter)
atgccggtgcggaggggccacgtcgcgccgcagaacaccttcctggacaccatcatccgcaagtttgagggccagagccgtaagttcatcatcgccaacgctcgggtggagaactgcgccgtcatctactgcaacgacggcttctgcgagctgtgcggctactcgcgggccgaggtgatgcagcgaccctgcacctgcgacttcctgcacgggccgcgcacgcagcgccgcgctgccgcgcagatcgcgcaggcactgctgggcgccgaggagcgcaaagtggaaatcgccttctaccggaaagatgggagctgcttcctatgtctggtggatgtggtgcccgtgaagaacgaggatggggctgtcatcatgttcatcctcaatttcgaggtggtgatggagaaggacatggtggggtccccggctcatgacaccaaccaccggggcccccccaccagctggctggccccaggccgcgccaagaccttccgcctgaagctgcccgcgctgctggcgctgacggcccgggagtcgtcggtgcggtcgggcggcgcgggcggcgcgggcgccccgggggccgtggtggtggacgtggacctgacgcccgcggcacccagcagcgagtcgctggccctggacgaagtgacagccatggacaaccacgtggcagggctcgggcccgcggaggagcggcgtgcgctggtgggtcccggctctccgccccgcagcgcgcccggccagctcccatcgccccgggcgcacagcctcaaccccgacgcctcgggctccagctgcagcctggcccggacgcgctcccgagaaagctgcgccagcgtgcgccgcgcctcgtcggccgacgacatcgaggccatgcgcgccggggtgctgcccccgccaccgcgccacgccagcaccggggccatgcacccactgcgcagcggcttgctcaactccacctcggactccgacctcgtgcgctaccgcaccattagcaagattccccaaatcaccctcaactttgtggacctcaagggcgaccccttcttggcttcgcccaccagtgaccgtgagatcatagcacctaagataaaggagcgaacccacaatgtcactgagaaggtcacccaggtcctgtccctgggcgccgacgtgctgcctgagtacaagctgcaggcaccgcgcatccaccgctggaccatcctgcattacagccccttcaaggccgtgtgggactggctcatcctgctgctggtcatctacacggctgtcttcacaccctactcggctgccttcctgctgaaggagacggaagaaggcccgcctgctaccgagtgtggctacgcctgccagccgctggctgtggtggacctcatcgtggacatcatgttcattgtggacatcctcatcaacttccgcaccacctacgtcaatgccaacgaggaggtggtcagccaccccggccgcatcgccgtccactacttcaagggctggttcctcatcgacatggtggccgccatccccttcgacctgctcatcttcggctctggctctgaggagctgatcgggctgctgaagactgcgcggctgctgcggctggtgcgcgtggcgcggaagctggatcgctactcagagtacggcgcggccgtgctgttcttgctcatgtgcacctttgcgctcatcgcgcactgactagcctgcatctggtacgccatcggcaacatggagcagccacacatggactcacgcatcggctggctgcacaacctgggcgaccagataggcaaaccctacaacagcagcggcctgggcggcccctccatcaaggacaagtatgtgacggcgctctacttcaccttcagcagcctcaccagtgtgggcttcggcaacgtctctcccaacaccaactcagagaagatcttctccatctgcgtcatgctcattggctccctcatgtatgctagcatcttcggcaacgtgtcggccatcatccagcggctgtactcgggcacagcccgctaccacacacagatgctgcgggtgcgggagttcatccgcttccaccagatccccaatcccctgcgccagcgcctcgaggagtacttccagcacgcctggtcctacaccaacggcatcgacatgaacgcggtgctgaagggcttccctgagtgcctgcaggctgacatctgcctgcacctgaaccgctcactgctgcagcactgcaaacccttccgaggggccaccaagggctgccttcgggccctggccatgaagttcaagaccacacatgcaccgccaggggacacactggtgcatgctggggacctgctcaccgccctgtacttcatctcccggggctccatcgagatcctgcggggcgacgtcgtcgtggccatcctggggaagaatgacatctttggggagcctctgaacctgtatgcaaggcctggcaagtcgaacggggatgtgcgggccctcacctactgtgacctacacaagatccatcgggacgacctgctggaggtgctggacatgtaccctgagttctccgaccacttctggtccagcctggagatcaccttcaacctgcgagataccaacatgatcccgggctcccccggcagtacggagttagagggtggcttcagtcggcaacgcaagcgcaagttgtccttccgcaggcgcacggacaaggacacggagcagccaggggaggtgtcggccttggggccgggccgggcgggggcagggccgagtagccggggccggccgggggggccgtggggggagagcccgtccagtggcccctccagccctgagagcagtgaggatgagggcccaggccgcagctccagccccctccgcctggtgcccttctccagccccaggccccccggagagccgccgggtggggagcccctgatggaggactgcgagaagagcagcgacacttgcaaccccctgtcaggcgccttctcaggagtgtccaacattttcagcttctggggggacagtcggggccgccagtaccaggagctccctcgatgccccgcccccacccccagcctcctcaacatccccctctccagcccgggtcggcggccccggggcgacgtggagagcaggctggatgccctccagcgccagctcaacaggctggagacccggctgagtgcagacatggccactgtcctgcagctgctacagaggcagatgacgctggtcccgcccgcctacagtgctgtgaccaccccggggcctggccccacttccacatccccgctgttgcccgtcagccccctccccaccctcaccttggactcgctttctcaggtttcccagttcatggcgtgtgaggagctgcccccgggggccccagagcttccccaagaaggccccacacgacgcctctccctaccgggccagctgggggccctcacctcccagcccctgcacagacacggctcggacccgggcagttagtggggctgcccagtgtggacacgtggctcacccagggatcaaggcgctgctgggccgctccccttggaggccctgctcaggaggccctgaccgtggaaggggagaggaactcgaaagcacagctcctcccccagcccttgggaccatcttctcctgcagtcccctgggccccagtgagaggggcaggggcagggccggcagtaggtggggcctgtggtccccccactgccctgagggcattagctggtctaactgcccggaggcacccggccctgggccttaggcacctcaaggacttttctgctatttactgctcttattgttaaggataataattaaggatcatatgaataattaatgaagatgctgatgactatgaataataaataattatcctgaggaga

SEQ ID NO: 195 - DNA, 3884 bp, Homo sapiens
  source 1..3884: mol_type = genomic DNA
  misc_feature 1..3884: note = cDNA of KCNH2 gene SNP c.1689G>C (p.Trp563Cys)
atgccggtgcggaggggccacgtcgcgccgcagaacaccttcctggacaccatcatccgcaagtttgagggccagagccgtaagttcatcatcgccaacgctcgggtggagaactgcgccgtcatctactgcaacgacggcttctgcgagctgtgcggctactcgcgggccgaggtgatgcagcgaccctgcacctgcgacttcctgcacgggccgcgcacgcagcgccgcgctgccgcgcagatcgcgcaggcactgctgggcgccgaggagcgcaaagtggaaatcgccttctaccggaaagatgggagctgcttcctatgtctggtggatgtggtgcccgtgaagaacgaggatggggctgtcatcatgttcatcctcaatttcgaggtggtgatggagaaggacatggtggggtccccggctcatgacaccaaccaccggggcccccccaccagctggctggccccaggccgcgccaagaccttccgcctgaagctgcccgcgctgctggcgctgacggcccgggagtcgtcggtgcggtcgggcggcgcgggcggcgcgggcgccccgggggccgtggtggtggacgtggacctgacgcccgcggcacccagcagcgagtcgctggccctggacgaagtgacagccatggacaaccacgtggcagggctcgggcccgcggaggagcggcgtgcgctggtgggtcccggctctccgccccgcagcgcgcccggccagctcccatcgccccgggcgcacagcctcaaccccgacgcctcgggctccagctgcagcctggcccggacgcgctcccgagaaagctgcgccagcgtgcgccgcgcctcgtcggccgacgacatcgaggccatgcgcgccggggtgctgcccccgccaccgcgccacgccagcaccggggccatgcacccactgcgcagcggcttgctcaactccacctcggactccgacctcgtgcgctaccgcaccattagcaagattccccaaatcaccctcaactttgtggacctcaagggcgaccccttcttggcttcgcccaccagtgaccgtgagatcatagcacctaagataaaggagcgaacccacaatgtcactgagaaggtcacccaggtcctgtccctgggcgccgacgtgctgcctgagtacaagctgcaggcaccgcgcatccaccgctggaccatcctgcattacagccccttcaaggccgtgtgggactggctcatcctgctgctggtcatctacacggctgtcttcacaccctactcggctgccttcctgctgaaggagacggaagaaggcccgcctgctaccgagtgtggctacgcctgccagccgctggctgtggtggacctcatcgtggacatcatgttcattgtggacatcctcatcaacttccgcaccacctacgtcaatgccaacgaggaggtggtcagccaccccggccgcatcgccgtccactacttcaagggctggttcctcatcgacatggtggccgccatccccttcgacctgctcatcttcggctctggctctgaggagctgatcgggctgctgaagactgcgcggctgctgcggctggtgcgcgtggcgcggaagctggatcgctactcagagtacggcgcggccgtgctgttcttgctcatgtgcacctttgcgctcatcgcgcactgcctagcctgcatctggtacgccatcggcaacatggagcagccacacatggactcacgcatcggctggctgcacaacctgggcgaccagataggcaaaccctacaacagcagcggcctgggcggcccctccatcaaggacaagtatgtgacggcgctctacttcaccttcagcagcctcaccagtgtgggcttcggcaacgtctctcccaacaccaactcagagaagatcttctccatctgcgtcatgctcattggctccctcatgtatgctagcatcttcggcaacgtgtcggccatcatccagcggctgtactcgggcacagcccgctaccacacacagatgctgcgggtgcgggagttcatccgcttccaccagatccccaatcccctgcgccagcgcctcgaggagtacttccagcacgcctggtcctacaccaacggcatcgacatgaacgcggtgctgaagggcttccctgagtgcctgcaggctgacatctgcctgcacctgaaccgctcactgctgcagcactgcaaacccttccgaggggccaccaagggctgccttcgggccctggccatgaagttcaagaccacacatgcaccgccaggggacacactggtgcatgctggggacctgctcaccgccctgtacttcatctcccggggctccatcgagatcctgcggggcgacgtcgtcgtggccatcctggggaagaatgacatctttggggagcctctgaacctgtatgcaaggcctggcaagtcgaacggggatgtgcgggccctcacctactgtgacctacacaagatccatcgggacgacctgctggaggtgctggacatgtaccctgagttctccgaccacttctggtccagcctggagatcaccttcaacctgcgagataccaacatgatcccgggctcccccggcagtacggagttagagggtggcttcagtcggcaacgcaagcgcaagttgtccttccgcaggcgcacggacaaggacacggagcagccaggggaggtgtcggccttggggccgggccgggcgggggcagggccgagtagccggggccggccgggggggccgtggggggagagcccgtccagtggcccctccagccctgagagcagtgaggatgagggcccaggccgcagctccagccccctccgcctggtgcccttctccagccccaggccccccggagagccgccgggtggggagcccctgatggaggactgcgagaagagcagcgacacttgcaaccccctgtcaggcgccttctcaggagtgtccaacattttcagcttctggggggacagtcggggccgccagtaccaggagctccctcgatgccccgcccccacccccagcctcctcaacatccccctctccagcccgggtcggcggccccggggcgacgtggagagcaggctggatgccctccagcgccagctcaacaggctggagacccggctgagtgcagacatggccactgtcctgcagctgctacagaggcagatgacgctggtcccgcccgcctacagtgctgtgaccaccccggggcctggccccacttccacatccccgctgttgcccgtcagccccctccccaccctcaccttggactcgctttctcaggtttcccagttcatggcgtgtgaggagctgcccccgggggccccagagcttccccaagaaggccccacacgacgcctctccctaccgggccagctgggggccctcacctcccagcccctgcacagacacggctcggacccgggcagttagtggggctgcccagtgtggacacgtggctcacccagggatcaaggcgctgctgggccgctccccttggaggccctgctcaggaggccctgaccgtggaaggggagaggaactcgaaagcacagctcctcccccagcccttgggaccatcttctcctgcagtcccctgggccccagtgagaggggcaggggcagggccggcagtaggtggggcctgtggtccccccactgccctgagggcattagctggtctaactgcccggaggcacccggccctgggccttaggcacctcaaggacttttctgctatttactgctcttattgttaaggataataattaaggatcatatgaataattaatgaagatgctgatgactatgaataataaataattatcctgaggaga

SEQ ID NO: 196 - DNA, 3884 bp, Homo sapiens
  source 1..3884: mol_type = genomic DNA
  misc_feature 1..3884: note = cDNA of KCNH2 gene SNP c.1689G>T (p.Trp563Cys)
atgccggtgcggaggggccacgtcgcgccgcagaacaccttcctggacaccatcatccgcaagtttgagggccagagccgtaagttcatcatcgccaacgctcgggtggagaactgcgccgtcatctactgcaacgacggcttctgcgagctgtgcggctactcgcgggccgaggtgatgcagcgaccctgcacctgcgacttcctgcacgggccgcgcacgcagcgccgcgctgccgcgcagatcgcgcaggcactgctgggcgccgaggagcgcaaagtggaaatcgccttctaccggaaagatgggagctgcttcctatgtctggtggatgtggtgcccgtgaagaacgaggatggggctgtcatcatgttcatcctcaatttcgaggtggtgatggagaaggacatggtggggtccccggctcatgacaccaaccaccggggcccccccaccagctggctggccccaggccgcgccaagaccttccgcctgaagctgcccgcgctgctggcgctgacggcccgggagtcgtcggtgcggtcgggcggcgcgggcggcgcgggcgccccgggggccgtggtggtggacgtggacctgacgcccgcggcacccagcagcgagtcgctggccctggacgaagtgacagccatggacaaccacgtggcagggctcgggcccgcggaggagcggcgtgcgctggtgggtcccggctctccgccccgcagcgcgcccggccagctcccatcgccccgggcgcacagcctcaaccccgacgcctcgggctccagctgcagcctggcccggacgcgctcccgagaaagctgcgccagcgtgcgccgcgcctcgtcggccgacgacatcgaggccatgcgcgccggggtgctgcccccgccaccgcgccacgccagcaccggggccatgcacccactgcgcagcggcttgctcaactccacctcggactccgacctcgtgcgctaccgcaccattagcaagattccccaaatcaccctcaactttgtggacctcaagggcgaccccttcttggcttcgcccaccagtgaccgtgagatcatagcacctaagataaaggagcgaacccacaatgtcactgagaaggtcacccaggtcctgtccctgggcgccgacgtgctgcctgagtacaagctgcaggcaccgcgcatccaccgctggaccatcctgcattacagccccttcaaggccgtgtgggactggctcatcctgctgctggtcatctacacggctgtcttcacaccctactcggctgccttcctgctgaaggagacggaagaaggcccgcctgctaccgagtgtggctacgcctgccagccgctggctgtggtggacctcatcgtggacatcatgttcattgtggacatcctcatcaacttccgcaccacctacgtcaatgccaacgaggaggtggtcagccaccccggccgcatcgccgtccactacttcaagggctggttcctcatcgacatggtggccgccatccccttcgacctgctcatcttcggctctggctctgaggagctgatcgggctgctgaagactgcgcggctgctgcggctggtgcgcgtggcgcggaagctggatcgctactcagagtacggcgcggccgtgctgttcttgctcatgtgcacctttgcgctcatcgcgcactgtctagcctgcatctggtacgccatcggcaacatggagcagccacacatggactcacgcatcggctggctgcacaacctgggcgaccagataggcaaaccctacaacagcagcggcctgggcggcccctccatcaaggacaagtatgtgacggcgctctacttcaccttcagcagcctcaccagtgtgggcttcggcaacgtctctcccaacaccaactcagagaagatcttctccatctgcgtcatgctcattggctccctcatgtatgctagcatcttcggcaacgtgtcggccatcatccagcggctgtactcgggcacagcccgctaccacacacagatgctgcgggtgcgggagttcatccgcttccaccagatccccaatcccctgcgccagcgcctcgaggagtacttccagcacgcctggtcctacaccaacggcatcgacatgaacgcggtgctgaagggcttccctgagtgcctgcaggctgacatctgcctgcacctgaaccgctcactgctgcagcactgcaaacccttccgaggggccaccaagggctgccttcgggccctggccatgaagttcaagaccacacatgcaccgccaggggacacactggtgcatgctggggacctgctcaccgccctgtacttcatctcccggggctccatcgagatcctgcggggcgacgtcgtcgtggccatcctggggaagaatgacatctttggggagcctctgaacctgtatgcaaggcctggcaagtcgaacggggatgtgcgggccctcacctactgtgacctacacaagatccatcgggacgacctgctggaggtgctggacatgtaccctgagttctccgaccacttctggtccagcctggagatcaccttcaacctgcgagataccaacatgatcccgggctcccccggcagtacggagttagagggtggcttcagtcggcaacgcaagcgcaagttgtccttccgcaggcgcacggacaaggacacggagcagccaggggaggtgtcggccttggggccgggccgggcgggggcagggccgagtagccggggccggccgggggggccgtggggggagagcccgtccagtggcccctccagccctgagagcagtgaggatgagggcccaggccgcagctccagccccctccgcctggtgcccttctccagccccaggccccccggagagccgccgggtggggagcccctgatggaggactgcgagaagagcagcgacacttgcaaccccctgtcaggcgccttctcaggagtgtccaacattttcagcttctggggggacagtcggggccgccagtaccaggagctccctcgatgccccgcccccacccccagcctcctcaacatccccctctccagcccgggtcggcggccccggggcgacgtggagagcaggctggatgccctccagcgccagctcaacaggctggagacccggctgagtgcagacatggccactgtcctgcagctgctacagaggcagatgacgctggtcccgcccgcctacagtgctgtgaccaccccggggcctggccccacttccacatccccgctgttgcccgtcagccccctccccaccctcaccttggactcgctttctcaggtttcccagttcatggcgtgtgaggagctgcccccgggggccccagagcttccccaagaaggccccacacgacgcctctccctaccgggccagctgggggccctcacctcccagcccctgcacagacacggctcggacccgggcagttagtggggctgcccagtgtggacacgtggctcacccagggatcaaggcgctgctgggccgctccccttggaggccctgctcaggaggccctgaccgtggaaggggagaggaactcgaaagcacagctcctcccccagcccttgggaccatcttctcctgcagtcccctgggccccagtgagaggggcaggggcagggccggcagtaggtggggcctgtggtccccccactgccctgagggcattagctggtctaactgcccggaggcacccggccctgggccttaggcacctcaaggacttttctgctatttactgctcttattgttaaggataataattaaggatcatatgaataattaatgaagatgctgatgactatgaataataaataattatcctgaggaga

SEQ ID NO: 197 - DNA, 3884 bp, Homo sapiens
  source 1..3884: mol_type = genomic DNA
  misc_feature 1..3884: note = cDNA of KCNH2 gene SNP c.1691T>A (p.Leu564Gln)
atgccggtgcggaggggccacgtcgcgccgcagaacaccttcctggacaccatcatccgcaagtttgagggccagagccgtaagttcatcatcgccaacgctcgggtggagaactgcgccgtcatctactgcaacgacggcttctgcgagctgtgcggctactcgcgggccgaggtgatgcagcgaccctgcacctgcgacttcctgcacgggccgcgcacgcagcgccgcgctgccgcgcagatcgcgcaggcactgctgggcgccgaggagcgcaaagtggaaatcgccttctaccggaaagatgggagctgcttcctatgtctggtggatgtggtgcccgtgaagaacgaggatggggctgtcatcatgttcatcctcaatttcgaggtggtgatggagaaggacatggtggggtccccggctcatgacaccaaccaccggggcccccccaccagctggctggccccaggccgcgccaagaccttccgcctgaagctgcccgcgctgctggcgctgacggcccgggagtcgtcggtgcggtcgggcggcgcgggcggcgcgggcgccccgggggccgtggtggtggacgtggacctgacgcccgcggcacccagcagcgagtcgctggccctggacgaagtgacagccatggacaaccacgtggcagggctcgggcccgcggaggagcggcgtgcgctggtgggtcccggctctccgccccgcagcgcgcccggccagctcccatcgccccgggcgcacagcctcaaccccgacgcctcgggctccagctgcagcctggcccggacgcgctcccgagaaagctgcgccagcgtgcgccgcgcctcgtcggccgacgacatcgaggccatgcgcgccggggtgctgcccccgccaccgcgccacgccagcaccggggccatgcacccactgcgcagcggcttgctcaactccacctcggactccgacctcgtgcgctaccgcaccattagcaagattccccaaatcaccctcaactttgtggacctcaagggcgaccccttcttggcttcgcccaccagtgaccgtgagatcatagcacctaagataaaggagcgaacccacaatgtcactgagaaggtcacccaggtcctgtccctgggcgccgacgtgctgcctgagtacaagctgcaggcaccgcgcatccaccgctggaccatcctgcattacagccccttcaaggccgtgtgggactggctcatcctgctgctggtcatctacacggctgtcttcacaccctactcggctgccttcctgctgaaggagacggaagaaggcccgcctgctaccgagtgtggctacgcctgccagccgctggctgtggtggacctcatcgtggacatcatgttcattgtggacatcctcatcaacttccgcaccacctacgtcaatgccaacgaggaggtggtcagccaccccggccgcatcgccgtccactacttcaagggctggttcctcatcgacatggtggccgccatccccttcgacctgctcatcttcggctctggctctgaggagctgatcgggctgctgaagactgcgcggctgctgcggctggtgcgcgtggcgcggaagctggatcgctactcagagtacggcgcggccgtgctgttcttgctcatgtgcacctttgcgctcatcgcgcactggcaagcctgcatctggtacgccatcggcaacatggagcagccacacatggactcacgcatcggctggctgcacaacctgggcgaccagataggcaaaccctacaacagcagcggcctgggcggcccctccatcaaggacaagtatgtgacggcgctctacttcaccttcagcagcctcaccagtgtgggcttcggcaacgtctctcccaacaccaactcagagaagatcttctccatctgcgtcatgctcattggctccctcatgtatgctagcatcttcggcaacgtgtcggccatcatccagcggctgtactcgggcacagcccgctaccacacacagatgctgcgggtgcgggagttcatccgcttccaccagatccccaatcccctgcgccagcgcctcgaggagtacttccagcacgcctggtcctacaccaacggcatcgacatgaacgcggtgctgaagggcttccctgagtgcctgcaggctgacatctgcctgcacctgaaccgctcactgctgcagcactgcaaacccttccgaggggccaccaagggctgccttcgggccctggccatgaagttcaagaccacacatgcaccgccaggggacacactggtgcatgctggggacctgctcaccgccctgtacttcatctcccggggctccatcgagatcctgcggggcgacgtcgtcgtggccatcctggggaagaatgacatctttggggagcctctgaacctgtatgcaaggcctggcaagtcgaacggggatgtgcgggccctcacctactgtgacctacacaagatccatcgggacgacctgctggaggtgctggacatgtaccctgagttctccgaccacttctggtccagcctggagatcaccttcaacctgcgagataccaacatgatcccgggctcccccggcagtacggagttagagggtggcttcagtcggcaacgcaagcgcaagttgtccttccgcaggcgcacggacaaggacacggagcagccaggggaggtgtcggccttggggccgggccgggcgggggcagggccgagtagccggggccggccgggggggccgtggggggagagcccgtccagtggcccctccagccctgagagcagtgaggatgagggcccaggccgcagctccagccccctccgcctggtgcccttctccagccccaggccccccggagagccgccgggtggggagcccctgatggaggactgcgagaagagcagcgacacttgcaaccccctgtcaggcgccttctcaggagtgtccaacattttcagcttctggggggacagtcggggccgccagtaccaggagctccctcgatgccccgcccccacccccagcctcctcaacatccccctctccagcccgggtcggcggccccggggcgacgtggagagcaggctggatgccctccagcgccagctcaacaggctggagacccggctgagtgcagacatggccactgtcctgcagctgctacagaggcagatgacgctggtcccgcccgcctacagtgctgtgaccaccccggggcctggccccacttccacatccccgctgttgcccgtcagccccctccccaccctcaccttggactcgctttctcaggtttcccagttcatggcgtgtgaggagctgcccccgggggccccagagcttccccaagaaggccccacacgacgcctctccctaccgggccagctgggggccctcacctcccagcccctgcacagacacggctcggacccgggcagttagtggggctgcccagtgtggacacgtggctcacccagggatcaaggcgctgctgggccgctccccttggaggccctgctcaggaggccctgaccgtggaaggggagaggaactcgaaagcacagctcctcccccagcccttgggaccatcttctcctgcagtcccctgggccccagtgagaggggcaggggcagggccggcagtaggtggggcctgtggtccccccactgccctgagggcattagctggtctaactgcccggaggcacccggccctgggccttaggcacctcaaggacttttctgctatttactgctcttattgttaaggataataattaaggatcatatgaataattaatgaagatgctgatgactatgaataataaataattatcctgaggaga

SEQ ID NO: 198 - DNA, 3884 bp, Homo sapiens
  source 1..3884: mol_type = genomic DNA
  misc_feature 1..3884: note = cDNA of KCNH2 gene SNP c.1691T>C (p.Leu564Pro)
atgccggtgcggaggggccacgtcgcgccgcagaacaccttcctggacaccatcatccgcaagtttgagggccagagccgtaagttcatcatcgccaacgctcgggtggagaactgcgccgtcatctactgcaacgacggcttctgcgagctgtgcggctactcgcgggccgaggtgatgcagcgaccctgcacctgcgacttcctgcacgggccgcgcacgcagcgccgcgctgccgcgcagatcgcgcaggcactgctgggcgccgaggagcgcaaagtggaaatcgccttctaccggaaagatgggagctgcttcctatgtctggtggatgtggtgcccgtgaagaacgaggatggggctgtcatcatgttcatcctcaatttcgaggtggtgatggagaaggacatggtggggtccccggctcatgacaccaaccaccggggcccccccaccagctggctggccccaggccgcgccaagaccttccgcctgaagctgcccgcgctgctggcgctgacggcccgggagtcgtcggtgcggtcgggcggcgcgggcggcgcgggcgccccgggggccgtggtggtggacgtggacctgacgcccgcggcacccagcagcgagtcgctggccctggacgaagtgacagccatggacaaccacgtggcagggctcgggcccgcggaggagcggcgtgcgctggtgggtcccggctctccgccccgcagcgcgcccggccagctcccatcgccccgggcgcacagcctcaaccccgacgcctcgggctccagctgcagcctggcccggacgcgctcccgagaaagctgcgccagcgtgcgccgcgcctcgtcggccgacgacatcgaggccatgcgcgccggggtgctgcccccgccaccgcgccacgccagcaccggggccatgcacccactgcgcagcggcttgctcaactccacctcggactccgacctcgtgcgctaccgcaccattagcaagattccccaaatcaccctcaactttgtggacctcaagggcgaccccttcttggcttcgcccaccagtgaccgtgagatcatagcacctaagataaaggagcgaacccacaatgtcactgagaaggtcacccaggtcctgtccctgggcgccgacgtgctgcctgagtacaagctgcaggcaccgcgcatccaccgctggaccatcctgcattacagccccttcaaggccgtgtgggactggctcatcctgctgctggtcatctacacggctgtcttcacaccctactcggctgccttcctgctgaaggagacggaagaaggcccgcctgctaccgagtgtggctacgcctgccagccgctggctgtggtggacctcatcgtggacatcatgttcattgtggacatcctcatcaacttccgcaccacctacgtcaatgccaacgaggaggtggtcagccaccccggccgcatcgccgtccactacttcaagggctggttcctcatcgacatggtggccgccatccccttcgacctgctcatcttcggctctggctctgaggagctgatcgggctgctgaagactgcgcggctgctgcggctggtgcgcgtggcgcggaagctggatcgctactcagagtacggcgcggccgtgctgttcttgctcatgtgcacctttgcgctcatcgcgcactggccagcctgcatctggtacgccatcggcaacatggagcagccacacatggactcacgcatcggctggctgcacaacctgggcgaccagataggcaaaccctacaacagcagcggcctgggcggcccctccatcaaggacaagtatgtgacggcgctctacttcaccttcagcagcctcaccagtgtgggcttcggcaacgtctctcccaacaccaactcagagaagatcttctccatctgcgtcatgctcattggctccctcatgtatgctagcatcttcggcaacgtgtcggccatcatccagcggctgtactcgggcacagcccgctaccacacacagatgctgcgggtgcgggagttcatccgcttccaccagatccccaatcccctgcgccagcgcctcgaggagtacttccagcacgcctggtcctacaccaacggcatcgacatgaacgcggtgctgaagggcttccctgagtgcctgcaggctgacatctgcctgcacctgaaccgctcactgctgcagcactgcaaacccttccgaggggccaccaagggctgccttcgggccctggccatgaagttcaagaccacacatgcaccgccaggggacacactggtgcatgctggggacctgctcaccgccctgtacttcatctcccggggctccatcgagatcctgcggggcgacgtcgtcgtggccatcctggggaagaatgacatctttggggagcctctgaacctgtatgcaaggcctggcaagtcgaacggggatgtgcgggccctcacctactgtgacctacacaagatccatcgggacgacctgctggaggtgctggacatgtaccctgagttctccgaccacttctggtccagcctggagatcaccttcaacctgcgagataccaacatgatcccgggctcccccggcagtacggagttagagggtggcttcagtcggcaacgcaagcgcaagttgtccttccgcaggcgcacggacaaggacacggagcagccaggggaggtgtcggccttggggccgggccgggcgggggcagggccgagtagccggggccggccgggggggccgtggggggagagcccgtccagtggcccctccagccctgagagcagtgaggatgagggcccaggccgcagctccagccccctccgcctggtgcccttctccagccccaggccccccggagagccgccgggtggggagcccctgatggaggactgcgagaagagcagcgacacttgcaaccccctgtcaggcgccttctcaggagtgtccaacattttcagcttctggggggacagtcggggccgccagtaccaggagctccctcgatgccccgcccccacccccagcctcctcaacatccccctctccagcccgggtcggcggccccggggcgacgtggagagcaggctggatgccctccagcgccagctcaacaggctggagacccggctgagtgcagacatggccactgtcctgcagctgctacagaggcagatgacgctggtcccgcccgcctacagtgctgtgaccaccccggggcctggccccacttccacatccccgctgttgcccgtcagccccctccccaccctcaccttggactcgctttctcaggtttcccagttcatggcgtgtgaggagctgcccccgggggccccagagcttccccaagaaggccccacacgacgcctctccctaccgggccagctgggggccctcacctcccagcccctgcacagacacggctcggacccgggcagttagtggggctgcccagtgtggacacgtggctcacccagggatcaaggcgctgctgggccgctccccttggaggccctgctcaggaggccctgaccgtggaaggggagaggaactcgaaagcacagctcctcccccagcccttgggaccatcttctcctgcagtcccctgggccccagtgagaggggcaggggcagggccggcagtaggtggggcctgtggtccccccactgccctgagggcattagctggtctaactgcccggaggcacccggccctgggccttaggcacctcaaggacttttctgctatttactgctcttattgttaaggataataattaaggatcatatgaataattaatgaagatgctgatgactatgaataataaataattatcctgaggaga

SEQ ID NO: 199 - DNA, 3884 bp, Homo sapiens
  source 1..3884: mol_type = genomic DNA
  misc_feature 1..3884: note = cDNA of KCNH2 gene SNP c.1693G>A (p.Ala565Thr)
atgccggtgcggaggggccacgtcgcgccgcagaacaccttcctggacaccatcatccgcaagtttgagggccagagccgtaagttcatcatcgccaacgctcgggtggagaactgcgccgtcatctactgcaacgacggcttctgcgagctgtgcggctactcgcgggccgaggtgatgcagcgaccctgcacctgcgacttcctgcacgggccgcgcacgcagcgccgcgctgccgcgcagatcgcgcaggcactgctgggcgccgaggagcgcaaagtggaaatcgccttctaccggaaagatgggagctgcttcctatgtctggtggatgtggtgcccgtgaagaacgaggatggggctgtcatcatgttcatcctcaatttcgaggtggtgatggagaaggacatggtggggtccccggctcatgacaccaaccaccggggcccccccaccagctggctggccccaggccgcgccaagaccttccgcctgaagctgcccgcgctgctggcgctgacggcccgggagtcgtcggtgcggtcgggcggcgcgggcggcgcgggcgccccgggggccgtggtggtggacgtggacctgacgcccgcggcacccagcagcgagtcgctggccctggacgaagtgacagccatggacaaccacgtggcagggctcgggcccgcggaggagcggcgtgcgctggtgggtcccggctctccgccccgcagcgcgcccggccagctcccatcgccccgggcgcacagcctcaaccccgacgcctcgggctccagctgcagcctggcccggacgcgctcccgagaaagctgcgccagcgtgcgccgcgcctcgtcggccgacgacatcgaggccatgcgcgccggggtgctgcccccgccaccgcgccacgccagcaccggggccatgcacccactgcgcagcggcttgctcaactccacctcggactccgacctcgtgcgctaccgcaccattagcaagattccccaaatcaccctcaactttgtggacctcaagggcgaccccttcttggcttcgcccaccagtgaccgtgagatcatagcacctaagataaaggagcgaacccacaatgtcactgagaaggtcacccaggtcctgtccctgggcgccgacgtgctgcctgagtacaagctgcaggcaccgcgcatccaccgctggaccatcctgcattacagccccttcaaggccgtgtgggactggctcatcctgctgctggtcatctacacggctgtcttcacaccctactcggctgccttcctgctgaaggagacggaagaaggcccgcctgctaccgagtgtggctacgcctgccagccgctggctgtggtggacctcatcgtggacatcatgttcattgtggacatcctcatcaacttccgcaccacctacgtcaatgccaacgaggaggtggtcagccaccccggccgcatcgccgtccactacttcaagggctggttcctcatcgacatggtggccgccatccccttcgacctgctcatcttcggctctggctctgaggagctgatcgggctgctgaagactgcgcggctgctgcggctggtgcgcgtggcgcggaagctggatcgctactcagagtacggcgcggccgtgctgttcttgctcatgtgcacctttgcgctcatcgcgcactggctaacctgcatctggtacgccatcggcaacatggagcagccacacatggactcacgcatcggctggctgcacaacctgggcgaccagataggcaaaccctacaacagcagcggcctgggcggcccctccatcaaggacaagtatgtgacggcgctctacttcaccttcagcagcctcaccagtgtgggcttcggcaacgtctctcccaacaccaactcagagaagatcttctccatctgcgtcatgctcattggctccctcatgtatgctagcatcttcggcaacgtgtcggccatcatccagcggctgtactcgggcacagcccgctaccacacacagatgctgcgggtgcgggagttcatccgcttccaccagatccccaatcccctgcgccagcgcctcgaggagtacttccagcacgcctggtcctacaccaacggcatcgacatgaacgcggtgctgaagggcttccctgagtgcctgcaggctgacatctgcctgcacctgaaccgctcactgctgcagcactgcaaacccttccgaggggccaccaagggctgccttcgggccctggccatgaagttcaagaccacacatgcaccgccaggggacacactggtgcatgctggggacctgctcaccgccctgtacttcatctcccggggctccatcgagatcctgcggggcgacgtcgtcgtggccatcctggggaagaatgacatctttggggagcctctgaacctgtatgcaaggcctggcaagtcgaacggggatgtgcgggccctcacctactgtgacctacacaagatccatcgggacgacctgctggaggtgctggacatgtaccctgagttctccgaccacttctggtccagcctggagatcaccttcaacctgcgagataccaacatgatcccgggctcccccggcagtacggagttagagggtggcttcagtcggcaacgcaagcgcaagttgtccttccgcaggcgcacggacaaggacacggagcagccaggggaggtgtcggccttggggccgggccgggcgggggcagggccgagtagccggggccggccgggggggccgtggggggagagcccgtccagtggcccctccagccctgagagcagtgaggatgagggcccaggccgcagctccagccccctccgcctggtgcccttctccagccccaggccccccggagagccgccgggtggggagcccctgatggaggactgcgagaagagcagcgacacttgcaaccccctgtcaggcgccttctcaggagtgtccaacattttcagcttctggggggacagtcggggccgccagtaccaggagctccctcgatgccccgcccccacccccagcctcctcaacatccccctctccagcccgggtcggcggccccggggcgacgtggagagcaggctggatgccctccagcgccagctcaacaggctggagacccggctgagtgcagacatggccactgtcctgcagctgctacagaggcagatgacgctggtcccgcccgcctacagtgctgtgaccaccccggggcctggccccacttccacatccccgctgttgcccgtcagccccctccccaccctcaccttggactcgctttctcaggtttcccagttcatggcgtgtgaggagctgcccccgggggccccagagcttccccaagaaggccccacacgacgcctctccctaccgggccagctgggggccctcacctcccagcccctgcacagacacggctcggacccgggcagttagtggggctgcccagtgtggacacgtggctcacccagggatcaaggcgctgctgggccgctccccttggaggccctgctcaggaggccctgaccgtggaaggggagaggaactcgaaagcacagctcctcccccagcccttgggaccatcttctcctgcagtcccctgggccccagtgagaggggcaggggcagggccggcagtaggtggggcctgtggtccccccactgccctgagggcattagctggtctaactgcccggaggcacccggccctgggccttaggcacctcaaggacttttctgctatttactgctcttattgttaaggataataattaaggatcatatgaataattaatgaagatgctgatgactatgaataataaataattatcctgaggaga

SEQ ID NO: 200 - DNA, 3884 bp, Homo sapiens
  source 1..3884: mol_type = genomic DNA
  misc_feature 1..3884: note = cDNA of KCNH2 gene SNP c.1693G>C (p.Ala565Pro)
atgccggtgcggaggggccacgtcgcgccgcagaacaccttcctggacaccatcatccgcaagtttgagggccagagccgtaagttcatcatcgccaacgctcgggtggagaactgcgccgtcatctactgcaacgacggcttctgcgagctgtgcggctactcgcgggccgaggtgatgcagcgaccctgcacctgcgacttcctgcacgggccgcgcacgcagcgccgcgctgccgcgcagatcgcgcaggcactgctgggcgccgaggagcgcaaagtggaaatcgccttctaccggaaagatgggagctgcttcctatgtctggtggatgtggtgcccgtgaagaacgaggatggggctgtcatcatgttcatcctcaatttcgaggtggtgatggagaaggacatggtggggtccccggctcatgacaccaaccaccggggcccccccaccagctggctggccccaggccgcgccaagaccttccgcctgaagctgcccgcgctgctggcgctgacggcccgggagtcgtcggtgcggtcgggcggcgcgggcggcgcgggcgccccgggggccgtggtggtggacgtggacctgacgcccgcggcacccagcagcgagtcgctggccctggacgaagtgacagccatggacaaccacgtggcagggctcgggcccgcggaggagcggcgtgcgctggtgggtcccggctctccgccccgcagcgcgcccggccagctcccatcgccccgggcgcacagcctcaaccccgacgcctcgggctccagctgcagcctggcccggacgcgctcccgagaaagctgcgccagcgtgcgccgcgcctcgtcggccgacgacatcgaggccatgcgcgccggggtgctgcccccgccaccgcgccacgccagcaccggggccatgcacccactgcgcagcggcttgctcaactccacctcggactccgacctcgtgcgctaccgcaccattagcaagattccccaaatcaccctcaactttgtggacctcaagggcgaccccttcttggcttcgcccaccagtgaccgtgagatcatagcacctaagataaaggagcgaacccacaatgtcactgagaaggtcacccaggtcctgtccctgggcgccgacgtgctgcctgagtacaagctgcaggcaccgcgcatccaccgctggaccatcctgcattacagccccttcaaggccgtgtgggactggctcatcctgctgctggtcatctacacggctgtcttcacaccctactcggctgccttcctgctgaaggagacggaagaaggcccgcctgctaccgagtgtggctacgcctgccagccgctggctgtggtggacctcatcgtggacatcatgttcattgtggacatcctcatcaacttccgcaccacctacgtcaatgccaacgaggaggtggtcagccaccccggccgcatcgccgtccactacttcaagggctggttcctcatcgacatggtggccgccatccccttcgacctgctcatcttcggctctggctctgaggagctgatcgggctgctgaagactgcgcggctgctgcggctggtgcgcgtggcgcggaagctggatcgctactcagagtacggcgcggccgtgctgttcttgctcatgtgcacctttgcgctcatcgcgcactggctaccctgcatctggtacgccatcggcaacatggagcagccacacatggactcacgcatcggctggctgcacaacctgggcgaccagataggcaaaccctacaacagcagcggcctgggcggcccctccatcaaggacaagtatgtgacggcgctctacttcaccttcagcagcctcaccagtgtgggcttcggcaacgtctctcccaacaccaactcagagaagatcttctccatctgcgtcatgctcattggctccctcatgtatgctagcatcttcggcaacgtgtcggccatcatccagcggctgtactcgggcacagcccgctaccacacacagatgctgcgggtgcgggagttcatccgcttccaccagatccccaatcccctgcgccagcgcctcgaggagtacttccagcacgcctggtcctacaccaacggcatcgacatgaacgcggtgctgaagggcttccctgagtgcctgcaggctgacatctgcctgcacctgaaccgctcactgctgcagcactgcaaacccttccgaggggccaccaagggctgccttcgggccctggccatgaagttcaagaccacacatgcaccgccaggggacacactggtgcatgctggggacctgctcaccgccctgtacttcatctcccggggctccatcgagatcctgcggggcgacgtcgtcgtggccatcctggggaagaatgacatctttggggagcctctgaacctgtatgcaaggcctggcaagtcgaacggggatgtgcgggccctcacctactgtgacctacacaagatccatcgggacgacctgctggaggtgctggacatgtaccctgagttctccgaccacttctggtccagcctggagatcaccttcaacctgcgagataccaacatgatcccgggctcccccggcagtacggagttagagggtggcttcagtcggcaacgcaagcgcaagttgtccttccgcaggcgcacggacaaggacacggagcagccaggggaggtgtcggccttggggccgggccgggcgggggcagggccgagtagccggggccggccgggggggccgtggggggagagcccgtccagtggcccctccagccctgagagcagtgaggatgagggcccaggccgcagctccagccccctccgcctggtgcccttctccagccccaggccccccggagagccgccgggtggggagcccctgatggaggactgcgagaagagcagcgacacttgcaaccccctgtcaggcgccttctcaggagtgtccaacattttcagcttctggggggacagtcggggccgccagtaccaggagctccctcgatgccccgcccccacccccagcctcctcaacatccccctctccagcccgggtcggcggccccggggcgacgtggagagcaggctggatgccctccagcgccagctcaacaggctggagacccggctgagtgcagacatggccactgtcctgcagctgctacagaggcagatgacgctggtcccgcccgcctacagtgctgtgaccaccccggggcctggccccacttccacatccccgctgttgcccgtcagccccctccccaccctcaccttggactcgctttctcaggtttcccagttcatggcgtgtgaggagctgcccccgggggccccagagcttccccaagaaggccccacacgacgcctctccctaccgggccagctgggggccctcacctcccagcccctgcacagacacggctcggacccgggcagttagtggggctgcccagtgtggacacgtggctcacccagggatcaaggcgctgctgggccgctccccttggaggccctgctcaggaggccctgaccgtggaaggggagaggaactcgaaagcacagctcctcccccagcccttgggaccatcttctcctgcagtcccctgggccccagtgagaggggcaggggcagggccggcagtaggtggggcctgtggtccccccactgccctgagggcattagctggtctaactgcccggaggcacccggccctgggccttaggcacctcaaggacttttctgctatttactgctcttattgttaaggataataattaaggatcatatgaataattaatgaagatgctgatgactatgaataataaataattatcctgaggaga

SEQ ID NO: 201 - DNA, 3884 bp, Homo sapiens
  source 1..3884: mol_type = genomic DNA
  misc_feature 1..3884: note = cDNA of KCNH2 gene SNP c.1693G>T (p.Ala565Ser)
atgccggtgcggaggggccacgtcgcgccgcagaacaccttcctggacaccatcatccgcaagtttgagggccagagccgtaagttcatcatcgccaacgctcgggtggagaactgcgccgtcatctactgcaacgacggcttctgcgagctgtgcggctactcgcgggccgaggtgatgcagcgaccctgcacctgcgacttcctgcacgggccgcgcacgcagcgccgcgctgccgcgcagatcgcgcaggcactgctgggcgccgaggagcgcaaagtggaaatcgccttctaccggaaagatgggagctgcttcctatgtctggtggatgtggtgcccgtgaagaacgaggatggggctgtcatcatgttcatcctcaatttcgaggtggtgatggagaaggacatggtggggtccccggctcatgacaccaaccaccggggcccccccaccagctggctggccccaggccgcgccaagaccttccgcctgaagctgcccgcgctgctggcgctgacggcccgggagtcgtcggtgcggtcgggcggcgcgggcggcgcgggcgccccgggggccgtggtggtggacgtggacctgacgcccgcggcacccagcagcgagtcgctggccctggacgaagtgacagccatggacaaccacgtggcagggctcgggcccgcggaggagcggcgtgcgctggtgggtcccggctctccgccccgcagcgcgcccggccagctcccatcgccccgggcgcacagcctcaaccccgacgcctcgggctccagctgcagcctggcccggacgcgctcccgagaaagctgcgccagcgtgcgccgcgcctcgtcggccgacgacatcgaggccatgcgcgccggggtgctgcccccgccaccgcgccacgccagcaccggggccatgcacccactgcgcagcggcttgctcaactccacctcggactccgacctcgtgcgctaccgcaccattagcaagattccccaaatcaccctcaactttgtggacctcaagggcgaccccttcttggcttcgcccaccagtgaccgtgagatcatagcacctaagataaaggagcgaacccacaatgtcactgagaaggtcacccaggtcctgtccctgggcgccgacgtgctgcctgagtacaagctgcaggcaccgcgcatccaccgctggaccatcctgcattacagccccttcaaggccgtgtgggactggctcatcctgctgctggtcatctacacggctgtcttcacaccctactcggctgccttcctgctgaaggagacggaagaaggcccgcctgctaccgagtgtggctacgcctgccagccgctggctgtggtggacctcatcgtggacatcatgttcattgtggacatcctcatcaacttccgcaccacctacgtcaatgccaacgaggaggtggtcagccaccccggccgcatcgccgtccactacttcaagggctggttcctcatcgacatggtggccgccatccccttcgacctgctcatcttcggctctggctctgaggagctgatcgggctgctgaagactgcgcggctgctgcggctggtgcgcgtggcgcggaagctggatcgctactcagagtacggcgcggccgtgctgttcttgctcatgtgcacctttgcgctcatcgcgcactggctatcctgcatctggtacgccatcggcaacatggagcagccacacatggactcacgcatcggctggctgcacaacctgggcgaccagataggcaaaccctacaacagcagcggcctgggcggcccctccatcaaggacaagtatgtgacggcgctctacttcaccttcagcagcctcaccagtgtgggcttcggcaacgtctctcccaacaccaactcagagaagatcttctccatctgcgtcatgctcattggctccctcatgtatgctagcatcttcggcaacgtgtcggccatcatccagcggctgtactcgggcacagcccgctaccacacacagatgctgcgggtgcgggagttcatccgcttccaccagatccccaatcccctgcgccagcgcctcgaggagtacttccagcacgcctggtcctacaccaacggcatcgacatgaacgcggtgctgaagggcttccctgagtgcctgcaggctgacatctgcctgcacctgaaccgctcactgctgcagcactgcaaacccttccgaggggccaccaagggctgccttcgggccctggccatgaagttcaagaccacacatgcaccgccaggggacacactggtgcatgctggggacctgctcaccgccctgtacttcatctcccggggctccatcgagatcctgcggggcgacgtcgtcgtggccatcctggggaagaatgacatctttggggagcctctgaacctgtatgcaaggcctggcaagtcgaacggggatgtgcgggccctcacctactgtgacctacacaagatccatcgggacgacctgctggaggtgctggacatgtaccctgagttctccgaccacttctggtccagcctggagatcaccttcaacctgcgagataccaacatgatcccgggctcccccggcagtacggagttagagggtggcttcagtcggcaacgcaagcgcaagttgtccttccgcaggcgcacggacaaggacacggagcagccaggggaggtgtcggccttggggccgggccgggcgggggcagggccgagtagccggggccggccgggggggccgtggggggagagcccgtccagtggcccctccagccctgagagcagtgaggatgagggcccaggccgcagctccagccccctccgcctggtgcccttctccagccccaggccccccggagagccgccgggtggggagcccctgatggaggactgcgagaagagcagcgacacttgcaaccccctgtcaggcgccttctcaggagtgtccaacattttcagcttctggggggacagtcggggccgccagtaccaggagctccctcgatgccccgcccccacccccagcctcctcaacatccccctctccagcccgggtcggcggccccggggcgacgtggagagcaggctggatgccctccagcgccagctcaacaggctggagacccggctgagtgcagacatggccactgtcctgcagctgctacagaggcagatgacgctggtcccgcccgcctacagtgctgtgaccaccccggggcctggccccacttccacatccccgctgttgcccgtcagccccctccccaccctcaccttggactcgctttctcaggtttcccagttcatggcgtgtgaggagctgcccccgggggccccagagcttccccaagaaggccccacacgacgcctctccctaccgggccagctgggggccctcacctcccagcccctgcacagacacggctcggacccgggcagttagtggggctgcccagtgtggacacgtggctcacccagggatcaaggcgctgctgggccgctccccttggaggccctgctcaggaggccctgaccgtggaaggggagaggaactcgaaagcacagctcctcccccagcccttgggaccatcttctcctgcagtcccctgggccccagtgagaggggcaggggcagggccggcagtaggtggggcctgtggtccccccactgccctgagggcattagctggtctaactgcccggaggcacccggccctgggccttaggcacctcaaggacttttctgctatttactgctcttattgttaaggataataattaaggatcatatgaataattaatgaagatgctgatgactatgaataataaataattatcctgaggaga

SEQ ID NO: 202 - DNA, 3884 bp, Homo sapiens
  source 1..3884: mol_type = genomic DNA
  misc_feature 1..3884: note = cDNA of KCNH2 gene SNP c.1694C>T (p.Ala565Val)
atgccggtgcggaggggccacgtcgcgccgcagaacaccttcctggacaccatcatccgcaagtttgagggccagagccgtaagttcatcatcgccaacgctcgggtggagaactgcgccgtcatctactgcaacgacggcttctgcgagctgtgcggctactcgcgggccgaggtgatgcagcgaccctgcacctgcgacttcctgcacgggccgcgcacgcagcgccgcgctgccgcgcagatcgcgcaggcactgctgggcgccgaggagcgcaaagtggaaatcgccttctaccggaaagatgggagctgcttcctatgtctggtggatgtggtgcccgtgaagaacgaggatggggctgtcatcatgttcatcctcaatttcgaggtggtgatggagaaggacatggtggggtccccggctcatgacaccaaccaccggggcccccccaccagctggctggccccaggccgcgccaagaccttccgcctgaagctgcccgcgctgctggcgctgacggcccgggagtcgtcggtgcggtcgggcggcgcgggcggcgcgggcgccccgggggccgtggtggtggacgtggacctgacgcccgcggcacccagcagcgagtcgctggccctggacgaagtgacagccatggacaaccacgtggcagggctcgggcccgcggaggagcggcgtgcgctggtgggtcccggctctccgccccgcagcgcgcccggccagctcccatcgccccgggcgcacagcctcaaccccgacgcctcgggctccagctgcagcctggcccggacgcgctcccgagaaagctgcgccagcgtgcgccgcgcctcgtcggccgacgacatcgaggccatgcgcgccggggtgctgcccccgccaccgcgccacgccagcaccggggccatgcacccactgcgcagcggcttgctcaactccacctcggactccgacctcgtgcgctaccgcaccattagcaagattccccaaatcaccctcaactttgtggacctcaagggcgaccccttcttggcttcgcccaccagtgaccgtgagatcatagcacctaagataaaggagcgaacccacaatgtcactgagaaggtcacccaggtcctgtccctgggcgccgacgtgctgcctgagtacaagctgcaggcaccgcgcatccaccgctggaccatcctgcattacagccccttcaaggccgtgtgggactggctcatcctgctgctggtcatctacacggctgtcttcacaccctactcggctgccttcctgctgaaggagacggaagaaggcccgcctgctaccgagtgtggctacgcctgccagccgctggctgtggtggacctcatcgtggacatcatgttcattgtggacatcctcatcaacttccgcaccacctacgtcaatgccaacgaggaggtggtcagccaccccggccgcatcgccgtccactacttcaagggctggttcctcatcgacatggtggccgccatccccttcgacctgctcatcttcggctctggctctgaggagctgatcgggctgctgaagactgcgcggctgctgcggctggtgcgcgtggcgcggaagctggatcgctactcagagtacggcgcggccgtgctgttcttgctcatgtgcacctttgcgctcatcgcgcactggctagtctgcatctggtacgccatcggcaacatggagcagccacacatggactcacgcatcggctggctgcacaacctgggcgaccagataggcaaaccctacaacagcagcggcctgggcggcccctccatcaaggacaagtatgtgacggcgctctacttcaccttcagcagcctcaccagtgtgggcttcggcaacgtctctcccaacaccaactcagagaagatcttctccatctgcgtcatgctcattggctccctcatgtatgctagcatcttcggcaacgtgtcggccatcatccagcggctgtactcgggcacagcccgctaccacacacagatgctgcgggtgcgggagttcatccgcttccaccagatccccaatcccctgcgccagcgcctcgaggagtacttccagcacgcctggtcctacaccaacggcatcgacatgaacgcggtgctgaagggcttccctgagtgcctgcaggctgacatctgcctgcacctgaaccgctcactgctgcagcactgcaaacccttccgaggggccaccaagggctgccttcgggccctggccatgaagttcaagaccacacatgcaccgccaggggacacactggtgcatgctggggacctgctcaccgccctgtacttcatctcccggggctccatcgagatcctgcggggcgacgtcgtcgtggccatcctggggaagaatgacatctttggggagcctctgaacctgtatgcaaggcctggcaagtcgaacggggatgtgcgggccctcacctactgtgacctacacaagatccatcgggacgacctgctggaggtgctggacatgtaccctgagttctccgaccacttctggtccagcctggagatcaccttcaacctgcgagataccaacatgatcccgggctcccccggcagtacggagttagagggtggcttcagtcggcaacgcaagcgcaagttgtccttccgcaggcgcacggacaaggacacggagcagccaggggaggtgtcggccttggggccgggccgggcgggggcagggccgagtagccggggccggccgggggggccgtggggggagagcccgtccagtggcccctccagccctgagagcagtgaggatgagggcccaggccgcagctccagccccctccgcctggtgcccttctccagccccaggccccccggagagccgccgggtggggagcccctgatggaggactgcgagaagagcagcgacacttgcaaccccctgtcaggcgccttctcaggagtgtccaacattttcagcttctggggggacagtcggggccgccagtaccaggagctccctcgatgccccgcccccacccccagcctcctcaacatccccctctccagcccgggtcggcggccccggggcgacgtggagagcaggctggatgccctccagcgccagctcaacaggctggagacccggctgagtgcagacatggccactgtcctgcagctgctacagaggcagatgacgctggtcccgcccgcctacagtgctgtgaccaccccggggcctggccccacttccacatccccgctgttgcccgtcagccccctccccaccctcaccttggactcgctttctcaggtttcccagttcatggcgtgtgaggagctgcccccgggggccccagagcttccccaagaaggccccacacgacgcctctccctaccgggccagctgggggccctcacctcccagcccctgcacagacacggctcggacccgggcagttagtggggctgcccagtgtggacacgtggctcacccagggatcaaggcgctgctgggccgctccccttggaggccctgctcaggaggccctgaccgtggaaggggagaggaactcgaaagcacagctcctcccccagcccttgggaccatcttctcctgcagtcccctgggccccagtgagaggggcaggggcagggccggcagtaggtggggcctgtggtccccccactgccctgagggcattagctggtctaactgcccggaggcacccggccctgggccttaggcacctcaaggacttttctgctatttactgctcttattgttaaggataataattaaggatcatatgaataattaatgaagatgctgatgactatgaataataaataattatcctgaggaga

SEQ ID NO: 203 - DNA, 3884 bp, Homo sapiens
  source 1..3884: mol_type = genomic DNA
  misc_feature 1..3884: note = cDNA of KCNH2 gene SNP c.1696T>G (p.Cys566Gly)
atgccggtgcggaggggccacgtcgcgccgcagaacaccttcctggacaccatcatccgcaagtttgagggccagagccgtaagttcatcatcgccaacgctcgggtggagaactgcgccgtcatctactgcaacgacggcttctgcgagctgtgcggctactcgcgggccgaggtgatgcagcgaccctgcacctgcgacttcctgcacgggccgcgcacgcagcgccgcgctgccgcgcagatcgcgcaggcactgctgggcgccgaggagcgcaaagtggaaatcgccttctaccggaaagatgggagctgcttcctatgtctggtggatgtggtgcccgtgaagaacgaggatggggctgtcatcatgttcatcctcaatttcgaggtggtgatggagaaggacatggtggggtccccggctcatgacaccaaccaccggggcccccccaccagctggctggccccaggccgcgccaagaccttccgcctgaagctgcccgcgctgctggcgctgacggcccgggagtcgtcggtgcggtcgggcggcgcgggcggcgcgggcgccccgggggccgtggtggtggacgtggacctgacgcccgcggcacccagcagcgagtcgctggccctggacgaagtgacagccatggacaaccacgtggcagggctcgggcccgcggaggagcggcgtgcgctggtgggtcccggctctccgccccgcagcgcgcccggccagctcccatcgccccgggcgcacagcctcaaccccgacgcctcgggctccagctgcagcctggcccggacgcgctcccgagaaagctgcgccagcgtgcgccgcgcctcgtcggccgacgacatcgaggccatgcgcgccggggtgctgcccccgccaccgcgccacgccagcaccggggccatgcacccactgcgcagcggcttgctcaactccacctcggactccgacctcgtgcgctaccgcaccattagcaagattccccaaatcaccctcaactttgtggacctcaagggcgaccccttcttggcttcgcccaccagtgaccgtgagatcatagcacctaagataaaggagcgaacccacaatgtcactgagaaggtcacccaggtcctgtccctgggcgccgacgtgctgcctgagtacaagctgcaggcaccgcgcatccaccgctggaccatcctgcattacagccccttcaaggccgtgtgggactggctcatcctgctgctggtcatctacacggctgtcttcacaccctactcggctgccttcctgctgaaggagacggaagaaggcccgcctgctaccgagtgtggctacgcctgccagccgctggctgtggtggacctcatcgtggacatcatgttcattgtggacatcctcatcaacttccgcaccacctacgtcaatgccaacgaggaggtggtcagccaccccggccgcatcgccgtccactacttcaagggctggttcctcatcgacatggtggccgccatccccttcgacctgctcatcttcggctctggctctgaggagctgatcgggctgctgaagactgcgcggctgctgcggctggtgcgcgtggcgcggaagctggatcgctactcagagtacggcgcggccgtgctgttcttgctcatgtgcacctttgcgctcatcgcgcactggctagccggcatctggtacgccatcggcaacatggagcagccacacatggactcacgcatcggctggctgcacaacctgggcgaccagataggcaaaccctacaacagcagcggcctgggcggcccctccatcaaggacaagtatgtgacggcgctctacttcaccttcagcagcctcaccagtgtgggcttcggcaacgtctctcccaacaccaactcagagaagatcttctccatctgcgtcatgctcattggctccctcatgtatgctagcatcttcggcaacgtgtcggccatcatccagcggctgtactcgggcacagcccgctaccacacacagatgctgcgggtgcgggagttcatccgcttccaccagatccccaatcccctgcgccagcgcctcgaggagtacttccagcacgcctggtcctacaccaacggcatcgacatgaacgcggtgctgaagggcttccctgagtgcctgcaggctgacatctgcctgcacctgaaccgctcactgctgcagcactgcaaacccttccgaggggccaccaagggctgccttcgggccctggccatgaagttcaagaccacacatgcaccgccaggggacacactggtgcatgctggggacctgctcaccgccctgtacttcatctcccggggctccatcgagatcctgcggggcgacgtcgtcgtggccatcctggggaagaatgacatctttggggagcctctgaacctgtatgcaaggcctggcaagtcgaacggggatgtgcgggccctcacctactgtgacctacacaagatccatcgggacgacctgctggaggtgctggacatgtaccctgagttctccgaccacttctggtccagcctggagatcaccttcaacctgcgagataccaacatgatcccgggctcccccggcagtacggagttagagggtggcttcagtcggcaacgcaagcgcaagttgtccttccgcaggcgcacggacaaggacacggagcagccaggggaggtgtcggccttggggccgggccgggcgggggcagggccgagtagccggggccggccgggggggccgtggggggagagcccgtccagtggcccctccagccctgagagcagtgaggatgagggcccaggccgcagctccagccccctccgcctggtgcccttctccagccccaggccccccggagagccgccgggtggggagcccctgatggaggactgcgagaagagcagcgacacttgcaaccccctgtcaggcgccttctcaggagtgtccaacattttcagcttctggggggacagtcggggccgccagtaccaggagctccctcgatgccccgcccccacccccagcctcctcaacatccccctctccagcccgggtcggcggccccggggcgacgtggagagcaggctggatgccctccagcgccagctcaacaggctggagacccggctgagtgcagacatggccactgtcctgcagctgctacagaggcagatgacgctggtcccgcccgcctacagtgctgtgaccaccccggggcctggccccacttccacatccccgctgttgcccgtcagccccctccccaccctcaccttggactcgctttctcaggtttcccagttcatggcgtgtgaggagctgcccccgggggccccagagcttccccaagaaggccccacacgacgcctctccctaccgggccagctgggggccctcacctcccagcccctgcacagacacggctcggacccgggcagttagtggggctgcccagtgtggacacgtggctcacccagggatcaaggcgctgctgggccgctccccttggaggccctgctcaggaggccctgaccgtggaaggggagaggaactcgaaagcacagctcctcccccagcccttgggaccatcttctcctgcagtcccctgggccccagtgagaggggcaggggcagggccggcagtaggtggggcctgtggtccccccactgccctgagggcattagctggtctaactgcccggaggcacccggccctgggccttaggcacctcaaggacttttctgctatttactgctcttattgttaaggataataattaaggatcatatgaataattaatgaagatgctgatgactatgaataataaataattatcctgaggaga

SEQ ID NO: 204 - DNA, 3884 bp, Homo sapiens
  source 1..3884: mol_type = genomic DNA
  misc_feature 1..3884: note = cDNA of KCNH2 gene SNP c.1697G>C (p.Cys566Ser)
atgccggtgcggaggggccacgtcgcgccgcagaacaccttcctggacaccatcatccgcaagtttgagggccagagccgtaagttcatcatcgccaacgctcgggtggagaactgcgccgtcatctactgcaacgacggcttctgcgagctgtgcggctactcgcgggccgaggtgatgcagcgaccctgcacctgcgacttcctgcacgggccgcgcacgcagcgccgcgctgccgcgcagatcgcgcaggcactgctgggcgccgaggagcgcaaagtggaaatcgccttctaccggaaagatgggagctgcttcctatgtctggtggatgtggtgcccgtgaagaacgaggatggggctgtcatcatgttcatcctcaatttcgaggtggtgatggagaaggacatggtggggtccccggctcatgacaccaaccaccggggcccccccaccagctggctggccccaggccgcgccaagaccttccgcctgaagctgcccgcgctgctggcgctgacggcccgggagtcgtcggtgcggtcgggcggcgcgggcggcgcgggcgccccgggggccgtggtggtggacgtggacctgacgcccgcggcacccagcagcgagtcgctggccctggacgaagtgacagccatggacaaccacgtggcagggctcgggcccgcggaggagcggcgtgcgctggtgggtcccggctctccgccccgcagcgcgcccggccagctcccatcgccccgggcgcacagcctcaaccccgacgcctcgggctccagctgcagcctggcccggacgcgctcccgagaaagctgcgccagcgtgcgccgcgcctcgtcggccgacgacatcgaggccatgcgcgccggggtgctgcccccgccaccgcgccacgccagcaccggggccatgcacccactgcgcagcggcttgctcaactccacctcggactccgacctcgtgcgctaccgcaccattagcaagattccccaaatcaccctcaactttgtggacctcaagggcgaccccttcttggcttcgcccaccagtgaccgtgagatcatagcacctaagataaaggagcgaacccacaatgtcactgagaaggtcacccaggtcctgtccctgggcgccgacgtgctgcctgagtacaagctgcaggcaccgcgcatccaccgctggaccatcctgcattacagccccttcaaggccgtgtgggactggctcatcctgctgctggtcatctacacggctgtcttcacaccctactcggctgccttcctgctgaaggagacggaagaaggcccgcctgctaccgagtgtggctacgcctgccagccgctggctgtggtggacctcatcgtggacatcatgttcattgtggacatcctcatcaacttccgcaccacctacgtcaatgccaacgaggaggtggtcagccaccccggccgcatcgccgtccactacttcaagggctggttcctcatcgacatggtggccgccatccccttcgacctgctcatcttcggctctggctctgaggagctgatcgggctgctgaagactgcgcggctgctgcggctggtgcgcgtggcgcggaagctggatcgctactcagagtacggcgcggccgtgctgttcttgctcatgtgcacctttgcgctcatcgcgcactggctagcctccatctggtacgccatcggcaacatggagcagccacacatggactcacgcatcggctggctgcacaacctgggcgaccagataggcaaaccctacaacagcagcggcctgggcggcccctccatcaaggacaagtatgtgacggcgctctacttcaccttcagcagcctcaccagtgtgggcttcggcaacgtctctcccaacaccaactcagagaagatcttctccatctgcgtcatgctcattggctccctcatgtatgctagcatcttcggcaacgtgtcggccatcatccagcggctgtactcgggcacagcccgctaccacacacagatgctgcgggtgcgggagttcatccgcttccaccagatccccaatcccctgcgccagcgcctcgaggagtacttccagcacgcctggtcctacaccaacggcatcgacatgaacgcggtgctgaagggcttccctgagtgcctgcaggctgacatctgcctgcacctgaaccgctcactgctgcagcactgcaaacccttccgaggggccaccaagggctgccttcgggccctggccatgaagttcaagaccacacatgcaccgccaggggacacactggtgcatgctggggacctgctcaccgccctgtacttcatctcccggggctccatcgagatcctgcggggcgacgtcgtcgtggccatcctggggaagaatgacatctttggggagcctctgaacctgtatgcaaggcctggcaagtcgaacggggatgtgcgggccctcacctactgtgacctacacaagatccatcgggacgacctgctggaggtgctggacatgtaccctgagttctccgaccacttctggtccagcctggagatcaccttcaacctgcgagataccaacatgatcccgggctcccccggcagtacggagttagagggtggcttcagtcggcaacgcaagcgcaagttgtccttccgcaggcgcacggacaaggacacggagcagccaggggaggtgtcggccttggggccgggccgggcgggggcagggccgagtagccggggccggccgggggggccgtggggggagagcccgtccagtggcccctccagccctgagagcagtgaggatgagggcccaggccgcagctccagccccctccgcctggtgcccttctccagccccaggccccccggagagccgccgggtggggagcccctgatggaggactgcgagaagagcagcgacacttgcaaccccctgtcaggcgccttctcaggagtgtccaacattttcagcttctggggggacagtcggggccgccagtaccaggagctccctcgatgccccgcccccacccccagcctcctcaacatccccctctccagcccgggtcggcggccccggggcgacgtggagagcaggctggatgccctccagcgccagctcaacaggctggagacccggctgagtgcagacatggccactgtcctgcagctgctacagaggcagatgacgctggtcccgcccgcctacagtgctgtgaccaccccggggcctggccccacttccacatccccgctgttgcccgtcagccccctccccaccctcaccttggactcgctttctcaggtttcccagttcatggcgtgtgaggagctgcccccgggggccccagagcttccccaagaaggccccacacgacgcctctccctaccgggccagctgggggccctcacctcccagcccctgcacagacacggctcggacccgggcagttagtggggctgcccagtgtggacacgtggctcacccagggatcaaggcgctgctgggccgctccccttggaggccctgctcaggaggccctgaccgtggaaggggagaggaactcgaaagcacagctcctcccccagcccttgggaccatcttctcctgcagtcccctgggccccagtgagaggggcaggggcagggccggcagtaggtggggcctgtggtccccccactgccctgagggcattagctggtctaactgcccggaggcacccggccctgggccttaggcacctcaaggacttttctgctatttactgctcttattgttaaggataataattaaggatcatatgaataattaatgaagatgctgatgactatgaataataaataattatcctgaggaga

SEQ ID NO: 205 - DNA, 3884 bp, Homo sapiens
  source 1..3884: mol_type = genomic DNA
  misc_feature 1..3884: note = cDNA of KCNH2 gene SNP c.1697G>T (p.Cys566Phe)
atgccggtgcggaggggccacgtcgcgccgcagaacaccttcctggacaccatcatccgcaagtttgagggccagagccgtaagttcatcatcgccaacgctcgggtggagaactgcgccgtcatctactgcaacgacggcttctgcgagctgtgcggctactcgcgggccgaggtgatgcagcgaccctgcacctgcgacttcctgcacgggccgcgcacgcagcgccgcgctgccgcgcagatcgcgcaggcactgctgggcgccgaggagcgcaaagtggaaatcgccttctaccggaaagatgggagctgcttcctatgtctggtggatgtggtgcccgtgaagaacgaggatggggctgtcatcatgttcatcctcaatttcgaggtggtgatggagaaggacatggtggggtccccggctcatgacaccaaccaccggggcccccccaccagctggctggccccaggccgcgccaagaccttccgcctgaagctgcccgcgctgctggcgctgacggcccgggagtcgtcggtgcggtcgggcggcgcgggcggcgcgggcgccccgggggccgtggtggtggacgtggacctgacgcccgcggcacccagcagcgagtcgctggccctggacgaagtgacagccatggacaaccacgtggcagggctcgggcccgcggaggagcggcgtgcgctggtgggtcccggctctccgccccgcagcgcgcccggccagctcccatcgccccgggcgcacagcctcaaccccgacgcctcgggctccagctgcagcctggcccggacgcgctcccgagaaagctgcgccagcgtgcgccgcgcctcgtcggccgacgacatcgaggccatgcgcgccggggtgctgcccccgccaccgcgccacgccagcaccggggccatgcacccactgcgcagcggcttgctcaactccacctcggactccgacctcgtgcgctaccgcaccattagcaagattccccaaatcaccctcaactttgtggacctcaagggcgaccccttcttggcttcgcccaccagtgaccgtgagatcatagcacctaagataaaggagcgaacccacaatgtcactgagaaggtcacccaggtcctgtccctgggcgccgacgtgctgcctgagtacaagctgcaggcaccgcgcatccaccgctggaccatcctgcattacagccccttcaaggccgtgtgggactggctcatcctgctgctggtcatctacacggctgtcttcacaccctactcggctgccttcctgctgaaggagacggaagaaggcccgcctgctaccgagtgtggctacgcctgccagccgctggctgtggtggacctcatcgtggacatcatgttcattgtggacatcctcatcaacttccgcaccacctacgtcaatgccaacgaggaggtggtcagccaccccggccgcatcgccgtccactacttcaagggctggttcctcatcgacatggtggccgccatccccttcgacctgctcatcttcggctctggctctgaggagctgatcgggctgctgaagactgcgcggctgctgcggctggtgcgcgtggcgcggaagctggatcgctactcagagtacggcgcggccgtgctgttcttgctcatgtgcacctttgcgctcatcgcgcactggctagccttcatctggtacgccatcggcaacatggagcagccacacatggactcacgcatcggctggctgcacaacctgggcgaccagataggcaaaccctacaacagcagcggcctgggcggcccctccatcaaggacaagtatgtgacggcgctctacttcaccttcagcagcctcaccagtgtgggcttcggcaacgtctctcccaacaccaactcagagaagatcttctccatctgcgtcatgctcattggctccctcatgtatgctagcatcttcggcaacgtgtcggccatcatccagcggctgtactcgggcacagcccgctaccacacacagatgctgcgggtgcgggagttcatccgcttccaccagatccccaatcccctgcgccagcgcctcgaggagtacttccagcacgcctggtcctacaccaacggcatcgacatgaacgcggtgctgaagggcttccctgagtgcctgcaggctgacatctgcctgcacctgaaccgctcactgctgcagcactgcaaacccttccgaggggccaccaagggctgccttcgggccctggccatgaagttcaagaccacacatgcaccgccaggggacacactggtgcatgctggggacctgctcaccgccctgtacttcatctcccggggctccatcgagatcctgcggggcgacgtcgtcgtggccatcctggggaagaatgacatctttggggagcctctgaacctgtatgcaaggcctggcaagtcgaacggggatgtgcgggccctcacctactgtgacctacacaagatccatcgggacgacctgctggaggtgctggacatgtaccctgagttctccgaccacttctggtccagcctggagatcaccttcaacctgcgagataccaacatgatcccgggctcccccggcagtacggagttagagggtggcttcagtcggcaacgcaagcgcaagttgtccttccgcaggcgcacggacaaggacacggagcagccaggggaggtgtcggccttggggccgggccgggcgggggcagggccgagtagccggggccggccgggggggccgtggggggagagcccgtccagtggcccctccagccctgagagcagtgaggatgagggcccaggccgcagctccagccccctccgcctggtgcccttctccagccccaggccccccggagagccgccgggtggggagcccctgatggaggactgcgagaagagcagcgacacttgcaaccccctgtcaggcgccttctcaggagtgtccaacattttcagcttctggggggacagtcggggccgccagtaccaggagctccctcgatgccccgcccccacccccagcctcctcaacatccccctctccagcccgggtcggcggccccggggcgacgtggagagcaggctggatgccctccagcgccagctcaacaggctggagacccggctgagtgcagacatggccactgtcctgcagctgctacagaggcagatgacgctggtcccgcccgcctacagtgctgtgaccaccccggggcctggccccacttccacatccccgctgttgcccgtcagccccctccccaccctcaccttggactcgctttctcaggtttcccagttcatggcgtgtgaggagctgcccccgggggccccagagcttccccaagaaggccccacacgacgcctctccctaccgggccagctgggggccctcacctcccagcccctgcacagacacggctcggacccgggcagttagtggggctgcccagtgtggacacgtggctcacccagggatcaaggcgctgctgggccgctccccttggaggccctgctcaggaggccctgaccgtggaaggggagaggaactcgaaagcacagctcctcccccagcccttgggaccatcttctcctgcagtcccctgggccccagtgagaggggcaggggcagggccggcagtaggtggggcctgtggtccccccactgccctgagggcattagctggtctaactgcccggaggcacccggccctgggccttaggcacctcaaggacttttctgctatttactgctcttattgttaaggataataattaaggatcatatgaataattaatgaagatgctgatgactatgaataataaataattatcctgaggaga

SEQ ID NO: 206 - DNA, 3884 bp, Homo sapiens
  source 1..3884: mol_type = genomic DNA
  misc_feature 1..3884: note = cDNA of KCNH2 gene SNP c.169G>A (p.Ala57Thr)
atgccggtgcggaggggccacgtcgcgccgcagaacaccttcctggacaccatcatccgcaagtttgagggccagagccgtaagttcatcatcgccaacgctcgggtggagaactgcgccgtcatctactgcaacgacggcttctgcgagctgtgcggctactcgcggaccgaggtgatgcagcgaccctgcacctgcgacttcctgcacgggccgcgcacgcagcgccgcgctgccgcgcagatcgcgcaggcactgctgggcgccgaggagcgcaaagtggaaatcgccttctaccggaaagatgggagctgcttcctatgtctggtggatgtggtgcccgtgaagaacgaggatggggctgtcatcatgttcatcctcaatttcgaggtggtgatggagaaggacatggtggggtccccggctcatgacaccaaccaccggggcccccccaccagctggctggccccaggccgcgccaagaccttccgcctgaagctgcccgcgctgctggcgctgacggcccgggagtcgtcggtgcggtcgggcggcgcgggcggcgcgggcgccccgggggccgtggtggtggacgtggacctgacgcccgcggcacccagcagcgagtcgctggccctggacgaagtgacagccatggacaaccacgtggcagggctcgggcccgcggaggagcggcgtgcgctggtgggtcccggctctccgccccgcagcgcgcccggccagctcccatcgccccgggcgcacagcctcaaccccgacgcctcgggctccagctgcagcctggcccggacgcgctcccgagaaagctgcgccagcgtgcgccgcgcctcgtcggccgacgacatcgaggccatgcgcgccggggtgctgcccccgccaccgcgccacgccagcaccggggccatgcacccactgcgcagcggcttgctcaactccacctcggactccgacctcgtgcgctaccgcaccattagcaagattccccaaatcaccctcaactttgtggacctcaagggcgaccccttcttggcttcgcccaccagtgaccgtgagatcatagcacctaagataaaggagcgaacccacaatgtcactgagaaggtcacccaggtcctgtccctgggcgccgacgtgctgcctgagtacaagctgcaggcaccgcgcatccaccgctggaccatcctgcattacagccccttcaaggccgtgtgggactggctcatcctgctgctggtcatctacacggctgtcttcacaccctactcggctgccttcctgctgaaggagacggaagaaggcccgcctgctaccgagtgtggctacgcctgccagccgctggctgtggtggacctcatcgtggacatcatgttcattgtggacatcctcatcaacttccgcaccacctacgtcaatgccaacgaggaggtggtcagccaccccggccgcatcgccgtccactacttcaagggctggttcctcatcgacatggtggccgccatccccttcgacctgctcatcttcggctctggctctgaggagctgatcgggctgctgaagactgcgcggctgctgcggctggtgcgcgtggcgcggaagctggatcgctactcagagtacggcgcggccgtgctgttcttgctcatgtgcacctttgcgctcatcgcgcactggctagcctgcatctggtacgccatcggcaacatggagcagccacacatggactcacgcatcggctggctgcacaacctgggcgaccagataggcaaaccctacaacagcagcggcctgggcggcccctccatcaaggacaagtatgtgacggcgctctacttcaccttcagcagcctcaccagtgtgggcttcggcaacgtctctcccaacaccaactcagagaagatcttctccatctgcgtcatgctcattggctccctcatgtatgctagcatcttcggcaacgtgtcggccatcatccagcggctgtactcgggcacagcccgctaccacacacagatgctgcgggtgcgggagttcatccgcttccaccagatccccaatcccctgcgccagcgcctcgaggagtacttccagcacgcctggtcctacaccaacggcatcgacatgaacgcggtgctgaagggcttccctgagtgcctgcaggctgacatctgcctgcacctgaaccgctcactgctgcagcactgcaaacccttccgaggggccaccaagggctgccttcgggccctggccatgaagttcaagaccacacatgcaccgccaggggacacactggtgcatgctggggacctgctcaccgccctgtacttcatctcccggggctccatcgagatcctgcggggcgacgtcgtcgtggccatcctggggaagaatgacatctttggggagcctctgaacctgtatgcaaggcctggcaagtcgaacggggatgtgcgggccctcacctactgtgacctacacaagatccatcgggacgacctgctggaggtgctggacatgtaccctgagttctccgaccacttctggtccagcctggagatcaccttcaacctgcgagataccaacatgatcccgggctcccccggcagtacggagttagagggtggcttcagtcggcaacgcaagcgcaagttgtccttccgcaggcgcacggacaaggacacggagcagccaggggaggtgtcggccttggggccgggccgggcgggggcagggccgagtagccggggccggccgggggggccgtggggggagagcccgtccagtggcccctccagccctgagagcagtgaggatgagggcccaggccgcagctccagccccctccgcctggtgcccttctccagccccaggccccccggagagccgccgggtggggagcccctgatggaggactgcgagaagagcagcgacacttgcaaccccctgtcaggcgccttctcaggagtgtccaacattttcagcttctggggggacagtcggggccgccagtaccaggagctccctcgatgccccgcccccacccccagcctcctcaacatccccctctccagcccgggtcggcggccccggggcgacgtggagagcaggctggatgccctccagcgccagctcaacaggctggagacccggctgagtgcagacatggccactgtcctgcagctgctacagaggcagatgacgctggtcccgcccgcctacagtgctgtgaccaccccggggcctggccccacttccacatccccgctgttgcccgtcagccccctccccaccctcaccttggactcgctttctcaggtttcccagttcatggcgtgtgaggagctgcccccgggggccccagagcttccccaagaaggccccacacgacgcctctccctaccgggccagctgggggccctcacctcccagcccctgcacagacacggctcggacccgggcagttagtggggctgcccagtgtggacacgtggctcacccagggatcaaggcgctgctgggccgctccccttggaggccctgctcaggaggccctgaccgtggaaggggagaggaactcgaaagcacagctcctcccccagcccttgggaccatcttctcctgcagtcccctgggccccagtgagaggggcaggggcagggccggcagtaggtggggcctgtggtccccccactgccctgagggcattagctggtctaactgcccggaggcacccggccctgggccttaggcacctcaaggacttttctgctatttactgctcttattgttaaggataataattaaggatcatatgaataattaatgaagatgctgatgactatgaataataaataattatcctgaggaga

SEQ ID NO: 207 - DNA, 3884 bp, Homo sapiens
  source 1..3884: mol_type = genomic DNA
  misc_feature 1..3884: note = cDNA of KCNH2 gene SNP c.169G>C (p.Ala57Pro)
atgccggtgcggaggggccacgtcgcgccgcagaacaccttcctggacaccatcatccgcaagtttgagggccagagccgtaagttcatcatcgccaacgctcgggtggagaactgcgccgtcatctactgcaacgacggcttctgcgagctgtgcggctactcgcggcccgaggtgatgcagcgaccctgcacctgcgacttcctgcacgggccgcgcacgcagcgccgcgctgccgcgcagatcgcgcaggcactgctgggcgccgaggagcgcaaagtggaaatcgccttctaccggaaagatgggagctgcttcctatgtctggtggatgtggtgcccgtgaagaacgaggatggggctgtcatcatgttcatcctcaatttcgaggtggtgatggagaaggacatggtggggtccccggctcatgacaccaaccaccggggcccccccaccagctggctggccccaggccgcgccaagaccttccgcctgaagctgcccgcgctgctggcgctgacggcccgggagtcgtcggtgcggtcgggcggcgcgggcggcgcgggcgccccgggggccgtggtggtggacgtggacctgacgcccgcggcacccagcagcgagtcgctggccctggacgaagtgacagccatggacaaccacgtggcagggctcgggcccgcggaggagcggcgtgcgctggtgggtcccggctctccgccccgcagcgcgcccggccagctcccatcgccccgggcgcacagcctcaaccccgacgcctcgggctccagctgcagcctggcccggacgcgctcccgagaaagctgcgccagcgtgcgccgcgcctcgtcggccgacgacatcgaggccatgcgcgccggggtgctgcccccgccaccgcgccacgccagcaccggggccatgcacccactgcgcagcggcttgctcaactccacctcggactccgacctcgtgcgctaccgcaccattagcaagattccccaaatcaccctcaactttgtggacctcaagggcgaccccttcttggcttcgcccaccagtgaccgtgagatcatagcacctaagataaaggagcgaacccacaatgtcactgagaaggtcacccaggtcctgtccctgggcgccgacgtgctgcctgagtacaagctgcaggcaccgcgcatccaccgctggaccatcctgcattacagccccttcaaggccgtgtgggactggctcatcctgctgctggtcatctacacggctgtcttcacaccctactcggctgccttcctgctgaaggagacggaagaaggcccgcctgctaccgagtgtggctacgcctgccagccgctggctgtggtggacctcatcgtggacatcatgttcattgtggacatcctcatcaacttccgcaccacctacgtcaatgccaacgaggaggtggtcagccaccccggccgcatcgccgtccactacttcaagggctggttcctcatcgacatggtggccgccatccccttcgacctgctcatcttcggctctggctctgaggagctgatcgggctgctgaagactgcgcggctgctgcggctggtgcgcgtggcgcggaagctggatcgctactcagagtacggcgcggccgtgctgttcttgctcatgtgcacctttgcgctcatcgcgcactggctagcctgcatctggtacgccatcggcaacatggagcagccacacatggactcacgcatcggctggctgcacaacctgggcgaccagataggcaaaccctacaacagcagcggcctgggcggcccctccatcaaggacaagtatgtgacggcgctctacttcaccttcagcagcctcaccagtgtgggcttcggcaacgtctctcccaacaccaactcagagaagatcttctccatctgcgtcatgctcattggctccctcatgtatgctagcatcttcggcaacgtgtcggccatcatccagcggctgtactcgggcacagcccgctaccacacacagatgctgcgggtgcgggagttcatccgcttccaccagatccccaatcccctgcgccagcgcctcgaggagtacttccagcacgcctggtcctacaccaacggcatcgacatgaacgcggtgctgaagggcttccctgagtgcctgcaggctgacatctgcctgcacctgaaccgctcactgctgcagcactgcaaacccttccgaggggccaccaagggctgccttcgggccctggccatgaagttcaagaccacacatgcaccgccaggggacacactggtgcatgctggggacctgctcaccgccctgtacttcatctcccggggctccatcgagatcctgcggggcgacgtcgtcgtggccatcctggggaagaatgacatctttggggagcctctgaacctgtatgcaaggcctggcaagtcgaacggggatgtgcgggccctcacctactgtgacctacacaagatccatcgggacgacctgctggaggtgctggacatgtaccctgagttctccgaccacttctggtccagcctggagatcaccttcaacctgcgagataccaacatgatcccgggctcccccggcagtacggagttagagggtggcttcagtcggcaacgcaagcgcaagttgtccttccgcaggcgcacggacaaggacacggagcagccaggggaggtgtcggccttggggccgggccgggcgggggcagggccgagtagccggggccggccgggggggccgtggggggagagcccgtccagtggcccctccagccctgagagcagtgaggatgagggcccaggccgcagctccagccccctccgcctggtgcccttctccagccccaggccccccggagagccgccgggtggggagcccctgatggaggactgcgagaagagcagcgacacttgcaaccccctgtcaggcgccttctcaggagtgtccaacattttcagcttctggggggacagtcggggccgccagtaccaggagctccctcgatgccccgcccccacccccagcctcctcaacatccccctctccagcccgggtcggcggccccggggcgacgtggagagcaggctggatgccctccagcgccagctcaacaggctggagacccggctgagtgcagacatggccactgtcctgcagctgctacagaggcagatgacgctggtcccgcccgcctacagtgctgtgaccaccccggggcctggccccacttccacatccccgctgttgcccgtcagccccctccccaccctcaccttggactcgctttctcaggtttcccagttcatggcgtgtgaggagctgcccccgggggccccagagcttccccaagaaggccccacacgacgcctctccctaccgggccagctgggggccctcacctcccagcccctgcacagacacggctcggacccgggcagttagtggggctgcccagtgtggacacgtggctcacccagggatcaaggcgctgctgggccgctccccttggaggccctgctcaggaggccctgaccgtggaaggggagaggaactcgaaagcacagctcctcccccagcccttgggaccatcttctcctgcagtcccctgggccccagtgagaggggcaggggcagggccggcagtaggtggggcctgtggtccccccactgccctgagggcattagctggtctaactgcccggaggcacccggccctgggccttaggcacctcaaggacttttctgctatttactgctcttattgttaaggataataattaaggatcatatgaataattaatgaagatgctgatgactatgaataataaataattatcctgaggaga

SEQ ID NO: 208 - DNA, 3884 bp, Homo sapiens
  source 1..3884: mol_type = genomic DNA
  misc_feature 1..3884: note = cDNA of KCNH2 gene SNP c.1700T>C (p.Ile567Thr)
atgccggtgcggaggggccacgtcgcgccgcagaacaccttcctggacaccatcatccgcaagtttgagggccagagccgtaagttcatcatcgccaacgctcgggtggagaactgcgccgtcatctactgcaacgacggcttctgcgagctgtgcggctactcgcgggccgaggtgatgcagcgaccctgcacctgcgacttcctgcacgggccgcgcacgcagcgccgcgctgccgcgcagatcgcgcaggcactgctgggcgccgaggagcgcaaagtggaaatcgccttctaccggaaagatgggagctgcttcctatgtctggtggatgtggtgcccgtgaagaacgaggatggggctgtcatcatgttcatcctcaatttcgaggtggtgatggagaaggacatggtggggtccccggctcatgacaccaaccaccggggcccccccaccagctggctggccccaggccgcgccaagaccttccgcctgaagctgcccgcgctgctggcgctgacggcccgggagtcgtcggtgcggtcgggcggcgcgggcggcgcgggcgccccgggggccgtggtggtggacgtggacctgacgcccgcggcacccagcagcgagtcgctggccctggacgaagtgacagccatggacaaccacgtggcagggctcgggcccgcggaggagcggcgtgcgctggtgggtcccggctctccgccccgcagcgcgcccggccagctcccatcgccccgggcgcacagcctcaaccccgacgcctcgggctccagctgcagcctggcccggacgcgctcccgagaaagctgcgccagcgtgcgccgcgcctcgtcggccgacgacatcgaggccatgcgcgccggggtgctgcccccgccaccgcgccacgccagcaccggggccatgcacccactgcgcagcggcttgctcaactccacctcggactccgacctcgtgcgctaccgcaccattagcaagattccccaaatcaccctcaactttgtggacctcaagggcgaccccttcttggcttcgcccaccagtgaccgtgagatcatagcacctaagataaaggagcgaacccacaatgtcactgagaaggtcacccaggtcctgtccctgggcgccgacgtgctgcctgagtacaagctgcaggcaccgcgcatccaccgctggaccatcctgcattacagccccttcaaggccgtgtgggactggctcatcctgctgctggtcatctacacggctgtcttcacaccctactcggctgccttcctgctgaaggagacggaagaaggcccgcctgctaccgagtgtggctacgcctgccagccgctggctgtggtggacctcatcgtggacatcatgttcattgtggacatcctcatcaacttccgcaccacctacgtcaatgccaacgaggaggtggtcagccaccccggccgcatcgccgtccactacttcaagggctggttcctcatcgacatggtggccgccatccccttcgacctgctcatcttcggctctggctctgaggagctgatcgggctgctgaagactgcgcggctgctgcggctggtgcgcgtggcgcggaagctggatcgctactcagagtacggcgcggccgtgctgttcttgctcatgtgcacctttgcgctcatcgcgcactggctagcctgcacctggtacgccatcggcaacatggagcagccacacatggactcacgcatcggctggctgcacaacctgggcgaccagataggcaaaccctacaacagcagcggcctgggcggcccctccatcaaggacaagtatgtgacggcgctctacttcaccttcagcagcctcaccagtgtgggcttcggcaacgtctctcccaacaccaactcagagaagatcttctccatctgcgtcatgctcattggctccctcatgtatgctagcatcttcggcaacgtgtcggccatcatccagcggctgtactcgggcacagcccgctaccacacacagatgctgcgggtgcgggagttcatccgcttccaccagatccccaatcccctgcgccagcgcctcgaggagtacttccagcacgcctggtcctacaccaacggcatcgacatgaacgcggtgctgaagggcttccctgagtgcctgcaggctgacatctgcctgcacctgaaccgctcactgctgcagcactgcaaacccttccgaggggccaccaagggctgccttcgggccctggccatgaagttcaagaccacacatgcaccgccaggggacacactggtgcatgctggggacctgctcaccgccctgtacttcatctcccggggctccatcgagatcctgcggggcgacgtcgtcgtggccatcctggggaagaatgacatctttggggagcctctgaacctgtatgcaaggcctggcaagtcgaacggggatgtgcgggccctcacctactgtgacctacacaagatccatcgggacgacctgctggaggtgctggacatgtaccctgagttctccgaccacttctggtccagcctggagatcaccttcaacctgcgagataccaacatgatcccgggctcccccggcagtacggagttagagggtggcttcagtcggcaacgcaagcgcaagttgtccttccgcaggcgcacggacaaggacacggagcagccaggggaggtgtcggccttggggccgggccgggcgggggcagggccgagtagccggggccggccgggggggccgtggggggagagcccgtccagtggcccctccagccctgagagcagtgaggatgagggcccaggccgcagctccagccccctccgcctggtgcccttctccagccccaggccccccggagagccgccgggtggggagcccctgatggaggactgcgagaagagcagcgacacttgcaaccccctgtcaggcgccttctcaggagtgtccaacattttcagcttctggggggacagtcggggccgccagtaccaggagctccctcgatgccccgcccccacccccagcctcctcaacatccccctctccagcccgggtcggcggccccggggcgacgtggagagcaggctggatgccctccagcgccagctcaacaggctggagacccggctgagtgcagacatggccactgtcctgcagctgctacagaggcagatgacgctggtcccgcccgcctacagtgctgtgaccaccccggggcctggccccacttccacatccccgctgttgcccgtcagccccctccccaccctcaccttggactcgctttctcaggtttcccagttcatggcgtgtgaggagctgcccccgggggccccagagcttccccaagaaggccccacacgacgcctctccctaccgggccagctgggggccctcacctcccagcccctgcacagacacggctcggacccgggcagttagtggggctgcccagtgtggacacgtggctcacccagggatcaaggcgctgctgggccgctccccttggaggccctgctcaggaggccctgaccgtggaaggggagaggaactcgaaagcacagctcctcccccagcccttgggaccatcttctcctgcagtcccctgggccccagtgagaggggcaggggcagggccggcagtaggtggggcctgtggtccccccactgccctgagggcattagctggtctaactgcccggaggcacccggccctgggccttaggcacctcaaggacttttctgctatttactgctcttattgttaaggataataattaaggatcatatgaataattaatgaagatgctgatgactatgaataataaataattatcctgaggaga

SEQ ID NO: 209 - DNA, 3884 bp, Homo sapiens
  source 1..3884: mol_type = genomic DNA
  misc_feature 1..3884: note = cDNA of KCNH2 gene SNP c.1702T>C (p.Trp568Arg)
atgccggtgcggaggggccacgtcgcgccgcagaacaccttcctggacaccatcatccgcaagtttgagggccagagccgtaagttcatcatcgccaacgctcgggtggagaactgcgccgtcatctactgcaacgacggcttctgcgagctgtgcggctactcgcgggccgaggtgatgcagcgaccctgcacctgcgacttcctgcacgggccgcgcacgcagcgccgcgctgccgcgcagatcgcgcaggcactgctgggcgccgaggagcgcaaagtggaaatcgccttctaccggaaagatgggagctgcttcctatgtctggtggatgtggtgcccgtgaagaacgaggatggggctgtcatcatgttcatcctcaatttcgaggtggtgatggagaaggacatggtggggtccccggctcatgacaccaaccaccggggcccccccaccagctggctggccccaggccgcgccaagaccttccgcctgaagctgcccgcgctgctggcgctgacggcccgggagtcgtcggtgcggtcgggcggcgcgggcggcgcgggcgccccgggggccgtggtggtggacgtggacctgacgcccgcggcacccagcagcgagtcgctggccctggacgaagtgacagccatggacaaccacgtggcagggctcgggcccgcggaggagcggcgtgcgctggtgggtcccggctctccgccccgcagcgcgcccggccagctcccatcgccccgggcgcacagcctcaaccccgacgcctcgggctccagctgcagcctggcccggacgcgctcccgagaaagctgcgccagcgtgcgccgcgcctcgtcggccgacgacatcgaggccatgcgcgccggggtgctgcccccgccaccgcgccacgccagcaccggggccatgcacccactgcgcagcggcttgctcaactccacctcggactccgacctcgtgcgctaccgcaccattagcaagattccccaaatcaccctcaactttgtggacctcaagggcgaccccttcttggcttcgcccaccagtgaccgtgagatcatagcacctaagataaaggagcgaacccacaatgtcactgagaaggtcacccaggtcctgtccctgggcgccgacgtgctgcctgagtacaagctgcaggcaccgcgcatccaccgctggaccatcctgcattacagccccttcaaggccgtgtgggactggctcatcctgctgctggtcatctacacggctgtcttcacaccctactcggctgccttcctgctgaaggagacggaagaaggcccgcctgctaccgagtgtggctacgcctgccagccgctggctgtggtggacctcatcgtggacatcatgttcattgtggacatcctcatcaacttccgcaccacctacgtcaatgccaacgaggaggtggtcagccaccccggccgcatcgccgtccactacttcaagggctggttcctcatcgacatggtggccgccatccccttcgacctgctcatcttcggctctggctctgaggagctgatcgggctgctgaagactgcgcggctgctgcggctggtgcgcgtggcgcggaagctggatcgctactcagagtacggcgcggccgtgctgttcttgctcatgtgcacctttgcgctcatcgcgcactggctagcctgcatccggtacgccatcggcaacatggagcagccacacatggactcacgcatcggctggctgcacaacctgggcgaccagataggcaaaccctacaacagcagcggcctgggcggcccctccatcaaggacaagtatgtgacggcgctctacttcaccttcagcagcctcaccagtgtgggcttcggcaacgtctctcccaacaccaactcagagaagatcttctccatctgcgtcatgctcattggctccctcatgtatgctagcatcttcggcaacgtgtcggccatcatccagcggctgtactcgggcacagcccgctaccacacacagatgctgcgggtgcgggagttcatccgcttccaccagatccccaatcccctgcgccagcgcctcgaggagtacttccagcacgcctggtcctacaccaacggcatcgacatgaacgcggtgctgaagggcttccctgagtgcctgcaggctgacatctgcctgcacctgaaccgctcactgctgcagcactgcaaacccttccgaggggccaccaagggctgccttcgggccctggccatgaagttcaagaccacacatgcaccgccaggggacacactggtgcatgctggggacctgctcaccgccctgtacttcatctcccggggctccatcgagatcctgcggggcgacgtcgtcgtggccatcctggggaagaatgacatctttggggagcctctgaacctgtatgcaaggcctggcaagtcgaacggggatgtgcgggccctcacctactgtgacctacacaagatccatcgggacgacctgctggaggtgctggacatgtaccctgagttctccgaccacttctggtccagcctggagatcaccttcaacctgcgagataccaacatgatcccgggctcccccggcagtacggagttagagggtggcttcagtcggcaacgcaagcgcaagttgtccttccgcaggcgcacggacaaggacacggagcagccaggggaggtgtcggccttggggccgggccgggcgggggcagggccgagtagccggggccggccgggggggccgtggggggagagcccgtccagtggcccctccagccctgagagcagtgaggatgagggcccaggccgcagctccagccccctccgcctggtgcccttctccagccccaggccccccggagagccgccgggtggggagcccctgatggaggactgcgagaagagcagcgacacttgcaaccccctgtcaggcgccttctcaggagtgtccaacattttcagcttctggggggacagtcggggccgccagtaccaggagctccctcgatgccccgcccccacccccagcctcctcaacatccccctctccagcccgggtcggcggccccggggcgacgtggagagcaggctggatgccctccagcgccagctcaacaggctggagacccggctgagtgcagacatggccactgtcctgcagctgctacagaggcagatgacgctggtcccgcccgcctacagtgctgtgaccaccccggggcctggccccacttccacatccccgctgttgcccgtcagccccctccccaccctcaccttggactcgctttctcaggtttcccagttcatggcgtgtgaggagctgcccccgggggccccagagcttccccaagaaggccccacacgacgcctctccctaccgggccagctgggggccctcacctcccagcccctgcacagacacggctcggacccgggcagttagtggggctgcccagtgtggacacgtggctcacccagggatcaaggcgctgctgggccgctccccttggaggccctgctcaggaggccctgaccgtggaaggggagaggaactcgaaagcacagctcctcccccagcccttgggaccatcttctcctgcagtcccctgggccccagtgagaggggcaggggcagggccggcagtaggtggggcctgtggtccccccactgccctgagggcattagctggtctaactgcccggaggcacccggccctgggccttaggcacctcaaggacttttctgctatttactgctcttattgttaaggataataattaaggatcatatgaataattaatgaagatgctgatgactatgaataataaataattatcctgaggaga

SEQ ID NO: 210 - DNA, 3884 bp, Homo sapiens
  source 1..3884: mol_type = genomic DNA
  misc_feature 1..3884: note = cDNA of KCNH2 gene SNP c.1703G>C (p.Trp568Ser)
atgccggtgcggaggggccacgtcgcgccgcagaacaccttcctggacaccatcatccgcaagtttgagggccagagccgtaagttcatcatcgccaacgctcgggtggagaactgcgccgtcatctactgcaacgacggcttctgcgagctgtgcggctactcgcgggccgaggtgatgcagcgaccctgcacctgcgacttcctgcacgggccgcgcacgcagcgccgcgctgccgcgcagatcgcgcaggcactgctgggcgccgaggagcgcaaagtggaaatcgccttctaccggaaagatgggagctgcttcctatgtctggtggatgtggtgcccgtgaagaacgaggatggggctgtcatcatgttcatcctcaatttcgaggtggtgatggagaaggacatggtggggtccccggctcatgacaccaaccaccggggcccccccaccagctggctggccccaggccgcgccaagaccttccgcctgaagctgcccgcgctgctggcgctgacggcccgggagtcgtcggtgcggtcgggcggcgcgggcggcgcgggcgccccgggggccgtggtggtggacgtggacctgacgcccgcggcacccagcagcgagtcgctggccctggacgaagtgacagccatggacaaccacgtggcagggctcgggcccgcggaggagcggcgtgcgctggtgggtcccggctctccgccccgcagcgcgcccggccagctcccatcgccccgggcgcacagcctcaaccccgacgcctcgggctccagctgcagcctggcccggacgcgctcccgagaaagctgcgccagcgtgcgccgcgcctcgtcggccgacgacatcgaggccatgcgcgccggggtgctgcccccgccaccgcgccacgccagcaccggggccatgcacccactgcgcagcggcttgctcaactccacctcggactccgacctcgtgcgctaccgcaccattagcaagattccccaaatcaccctcaactttgtggacctcaagggcgaccccttcttggcttcgcccaccagtgaccgtgagatcatagcacctaagataaaggagcgaacccacaatgtcactgagaaggtcacccaggtcctgtccctgggcgccgacgtgctgcctgagtacaagctgcaggcaccgcgcatccaccgctggaccatcctgcattacagccccttcaaggccgtgtgggactggctcatcctgctgctggtcatctacacggctgtcttcacaccctactcggctgccttcctgctgaaggagacggaagaaggcccgcctgctaccgagtgtggctacgcctgccagccgctggctgtggtggacctcatcgtggacatcatgttcattgtggacatcctcatcaacttccgcaccacctacgtcaatgccaacgaggaggtggtcagccaccccggccgcatcgccgtccactacttcaagggctggttcctcatcgacatggtggccgccatccccttcgacctgctcatcttcggctctggctctgaggagctgatcgggctgctgaagactgcgcggctgctgcggctggtgcgcgtggcgcggaagctggatcgctactcagagtacggcgcggccgtgctgttcttgctcatgtgcacctttgcgctcatcgcgcactggctagcctgcatctcgtacgccatcggcaacatggagcagccacacatggactcacgcatcggctggctgcacaacctgggcgaccagataggcaaaccctacaacagcagcggcctgggcggcccctccatcaaggacaagtatgtgacggcgctctacttcaccttcagcagcctcaccagtgtgggcttcggcaacgtctctcccaacaccaactcagagaagatcttctccatctgcgtcatgctcattggctccctcatgtatgctagcatcttcggcaacgtgtcggccatcatccagcggctgtactcgggcacagcccgctaccacacacagatgctgcgggtgcgggagttcatccgcttccaccagatccccaatcccctgcgccagcgcctcgaggagtacttccagcacgcctggtcctacaccaacggcatcgacatgaacgcggtgctgaagggcttccctgagtgcctgcaggctgacatctgcctgcacctgaaccgctcactgctgcagcactgcaaacccttccgaggggccaccaagggctgccttcgggccctggccatgaagttcaagaccacacatgcaccgccaggggacacactggtgcatgctggggacctgctcaccgccctgtacttcatctcccggggctccatcgagatcctgcggggcgacgtcgtcgtggccatcctggggaagaatgacatctttggggagcctctgaacctgtatgcaaggcctggcaagtcgaacggggatgtgcgggccctcacctactgtgacctacacaagatccatcgggacgacctgctggaggtgctggacatgtaccctgagttctccgaccacttctggtccagcctggagatcaccttcaacctgcgagataccaacatgatcccgggctcccccggcagtacggagttagagggtggcttcagtcggcaacgcaagcgcaagttgtccttccgcaggcgcacggacaaggacacggagcagccaggggaggtgtcggccttggggccgggccgggcgggggcagggccgagtagccggggccggccgggggggccgtggggggagagcccgtccagtggcccctccagccctgagagcagtgaggatgagggcccaggccgcagctccagccccctccgcctggtgcccttctccagccccaggccccccggagagccgccgggtggggagcccctgatggaggactgcgagaagagcagcgacacttgcaaccccctgtcaggcgccttctcaggagtgtccaacattttcagcttctggggggacagtcggggccgccagtaccaggagctccctcgatgccccgcccccacccccagcctcctcaacatccccctctccagcccgggtcggcggccccggggcgacgtggagagcaggctggatgccctccagcgccagctcaacaggctggagacccggctgagtgcagacatggccactgtcctgcagctgctacagaggcagatgacgctggtcccgcccgcctacagtgctgtgaccaccccggggcctggccccacttccacatccccgctgttgcccgtcagccccctccccaccctcaccttggactcgctttctcaggtttcccagttcatggcgtgtgaggagctgcccccgggggccccagagcttccccaagaaggccccacacgacgcctctccctaccgggccagctgggggccctcacctcccagcccctgcacagacacggctcggacccgggcagttagtggggctgcccagtgtggacacgtggctcacccagggatcaaggcgctgctgggccgctccccttggaggccctgctcaggaggccctgaccgtggaaggggagaggaactcgaaagcacagctcctcccccagcccttgggaccatcttctcctgcagtcccctgggccccagtgagaggggcaggggcagggccggcagtaggtggggcctgtggtccccccactgccctgagggcattagctggtctaactgcccggaggcacccggccctgggccttaggcacctcaaggacttttctgctatttactgctcttattgttaaggataataattaaggatcatatgaataattaatgaagatgctgatgactatgaataataaataattatcctgaggaga

SEQ ID NO: 211 - DNA, 3884 bp, Homo sapiens
  source 1..3884: mol_type = genomic DNA
  misc_feature 1..3884: note = cDNA of KCNH2 gene SNP c.1704G>A (p.Trp568Ter)
atgccggtgcggaggggccacgtcgcgccgcagaacaccttcctggacaccatcatccgcaagtttgagggccagagccgtaagttcatcatcgccaacgctcgggtggagaactgcgccgtcatctactgcaacgacggcttctgcgagctgtgcggctactcgcgggccgaggtgatgcagcgaccctgcacctgcgacttcctgcacgggccgcgcacgcagcgccgcgctgccgcgcagatcgcgcaggcactgctgggcgccgaggagcgcaaagtggaaatcgccttctaccggaaagatgggagctgcttcctatgtctggtggatgtggtgcccgtgaagaacgaggatggggctgtcatcatgttcatcctcaatttcgaggtggtgatggagaaggacatggtggggtccccggctcatgacaccaaccaccggggcccccccaccagctggctggccccaggccgcgccaagaccttccgcctgaagctgcccgcgctgctggcgctgacggcccgggagtcgtcggtgcggtcgggcggcgcgggcggcgcgggcgccccgggggccgtggtggtggacgtggacctgacgcccgcggcacccagcagcgagtcgctggccctggacgaagtgacagccatggacaaccacgtggcagggctcgggcccgcggaggagcggcgtgcgctggtgggtcccggctctccgccccgcagcgcgcccggccagctcccatcgccccgggcgcacagcctcaaccccgacgcctcgggctccagctgcagcctggcccggacgcgctcccgagaaagctgcgccagcgtgcgccgcgcctcgtcggccgacgacatcgaggccatgcgcgccggggtgctgcccccgccaccgcgccacgccagcaccggggccatgcacccactgcgcagcggcttgctcaactccacctcggactccgacctcgtgcgctaccgcaccattagcaagattccccaaatcaccctcaactttgtggacctcaagggcgaccccttcttggcttcgcccaccagtgaccgtgagatcatagcacctaagataaaggagcgaacccacaatgtcactgagaaggtcacccaggtcctgtccctgggcgccgacgtgctgcctgagtacaagctgcaggcaccgcgcatccaccgctggaccatcctgcattacagccccttcaaggccgtgtgggactggctcatcctgctgctggtcatctacacggctgtcttcacaccctactcggctgccttcctgctgaaggagacggaagaaggcccgcctgctaccgagtgtggctacgcctgccagccgctggctgtggtggacctcatcgtggacatcatgttcattgtggacatcctcatcaacttccgcaccacctacgtcaatgccaacgaggaggtggtcagccaccccggccgcatcgccgtccactacttcaagggctggttcctcatcgacatggtggccgccatccccttcgacctgctcatcttcggctctggctctgaggagctgatcgggctgctgaagactgcgcggctgctgcggctggtgcgcgtggcgcggaagctggatcgctactcagagtacggcgcggccgtgctgttcttgctcatgtgcacctttgcgctcatcgcgcactggctagcctgcatctgatacgccatcggcaacatggagcagccacacatggactcacgcatcggctggctgcacaacctgggcgaccagataggcaaaccctacaacagcagcggcctgggcggcccctccatcaaggacaagtatgtgacggcgctctacttcaccttcagcagcctcaccagtgtgggcttcggcaacgtctctcccaacaccaactcagagaagatcttctccatctgcgtcatgctcattggctccctcatgtatgctagcatcttcggcaacgtgtcggccatcatccagcggctgtactcgggcacagcccgctaccacacacagatgctgcgggtgcgggagttcatccgcttccaccagatccccaatcccctgcgccagcgcctcgaggagtacttccagcacgcctggtcctacaccaacggcatcgacatgaacgcggtgctgaagggcttccctgagtgcctgcaggctgacatctgcctgcacctgaaccgctcactgctgcagcactgcaaacccttccgaggggccaccaagggctgccttcgggccctggccatgaagttcaagaccacacatgcaccgccaggggacacactggtgcatgctggggacctgctcaccgccctgtacttcatctcccggggctccatcgagatcctgcggggcgacgtcgtcgtggccatcctggggaagaatgacatctttggggagcctctgaacctgtatgcaaggcctggcaagtcgaacggggatgtgcgggccctcacctactgtgacctacacaagatccatcgggacgacctgctggaggtgctggacatgtaccctgagttctccgaccacttctggtccagcctggagatcaccttcaacctgcgagataccaacatgatcccgggctcccccggcagtacggagttagagggtggcttcagtcggcaacgcaagcgcaagttgtccttccgcaggcgcacggacaaggacacggagcagccaggggaggtgtcggccttggggccgggccgggcgggggcagggccgagtagccggggccggccgggggggccgtggggggagagcccgtccagtggcccctccagccctgagagcagtgaggatgagggcccaggccgcagctccagccccctccgcctggtgcccttctccagccccaggccccccggagagccgccgggtggggagcccctgatggaggactgcgagaagagcagcgacacttgcaaccccctgtcaggcgccttctcaggagtgtccaacattttcagcttctggggggacagtcggggccgccagtaccaggagctccctcgatgccccgcccccacccccagcctcctcaacatccccctctccagcccgggtcggcggccccggggcgacgtggagagcaggctggatgccctccagcgccagctcaacaggctggagacccggctgagtgcagacatggccactgtcctgcagctgctacagaggcagatgacgctggtcccgcccgcctacagtgctgtgaccaccccggggcctggccccacttccacatccccgctgttgcccgtcagccccctccccaccctcaccttggactcgctttctcaggtttcccagttcatggcgtgtgaggagctgcccccgggggccccagagcttccccaagaaggccccacacgacgcctctccctaccgggccagctgggggccctcacctcccagcccctgcacagacacggctcggacccgggcagttagtggggctgcccagtgtggacacgtggctcacccagggatcaaggcgctgctgggccgctccccttggaggccctgctcaggaggccctgaccgtggaaggggagaggaactcgaaagcacagctcctcccccagcccttgggaccatcttctcctgcagtcccctgggccccagtgagaggggcaggggcagggccggcagtaggtggggcctgtggtccccccactgccctgagggcattagctggtctaactgcccggaggcacccggccctgggccttaggcacctcaaggacttttctgctatttactgctcttattgttaaggataataattaaggatcatatgaataattaatgaagatgctgatgactatgaataataaataattatcctgaggaga

SEQ ID NO: 212 - DNA, 3884 bp, Homo sapiens
  source 1..3884: mol_type = genomic DNA
  misc_feature 1..3884: note = cDNA of KCNH2 gene SNP c.1704G>C (p.Trp568Cys)
atgccggtgcggaggggccacgtcgcgccgcagaacaccttcctggacaccatcatccgcaagtttgagggccagagccgtaagttcatcatcgccaacgctcgggtggagaactgcgccgtcatctactgcaacgacggcttctgcgagctgtgcggctactcgcgggccgaggtgatgcagcgaccctgcacctgcgacttcctgcacgggccgcgcacgcagcgccgcgctgccgcgcagatcgcgcaggcactgctgggcgccgaggagcgcaaagtggaaatcgccttctaccggaaagatgggagctgcttcctatgtctggtggatgtggtgcccgtgaagaacgaggatggggctgtcatcatgttcatcctcaatttcgaggtggtgatggagaaggacatggtggggtccccggctcatgacaccaaccaccggggcccccccaccagctggctggccccaggccgcgccaagaccttccgcctgaagctgcccgcgctgctggcgctgacggcccgggagtcgtcggtgcggtcgggcggcgcgggcggcgcgggcgccccgggggccgtggtggtggacgtggacctgacgcccgcggcacccagcagcgagtcgctggccctggacgaagtgacagccatggacaaccacgtggcagggctcgggcccgcggaggagcggcgtgcgctggtgggtcccggctctccgccccgcagcgcgcccggccagctcccatcgccccgggcgcacagcctcaaccccgacgcctcgggctccagctgcagcctggcccggacgcgctcccgagaaagctgcgccagcgtgcgccgcgcctcgtcggccgacgacatcgaggccatgcgcgccggggtgctgcccccgccaccgcgccacgccagcaccggggccatgcacccactgcgcagcggcttgctcaactccacctcggactccgacctcgtgcgctaccgcaccattagcaagattccccaaatcaccctcaactttgtggacctcaagggcgaccccttcttggcttcgcccaccagtgaccgtgagatcatagcacctaagataaaggagcgaacccacaatgtcactgagaaggtcacccaggtcctgtccctgggcgccgacgtgctgcctgagtacaagctgcaggcaccgcgcatccaccgctggaccatcctgcattacagccccttcaaggccgtgtgggactggctcatcctgctgctggtcatctacacggctgtcttcacaccctactcggctgccttcctgctgaaggagacggaagaaggcccgcctgctaccgagtgtggctacgcctgccagccgctggctgtggtggacctcatcgtggacatcatgttcattgtggacatcctcatcaacttccgcaccacctacgtcaatgccaacgaggaggtggtcagccaccccggccgcatcgccgtccactacttcaagggctggttcctcatcgacatggtggccgccatccccttcgacctgctcatcttcggctctggctctgaggagctgatcgggctgctgaagactgcgcggctgctgcggctggtgcgcgtggcgcggaagctggatcgctactcagagtacggcgcggccgtgctgttcttgctcatgtgcacctttgcgctcatcgcgcactggctagcctgcatctgctacgccatcggcaacatggagcagccacacatggactcacgcatcggctggctgcacaacctgggcgaccagataggcaaaccctacaacagcagcggcctgggcggcccctccatcaaggacaagtatgtgacggcgctctacttcaccttcagcagcctcaccagtgtgggcttcggcaacgtctctcccaacaccaactcagagaagatcttctccatctgcgtcatgctcattggctccctcatgtatgctagcatcttcggcaacgtgtcggccatcatccagcggctgtactcgggcacagcccgctaccacacacagatgctgcgggtgcgggagttcatccgcttccaccagatccccaatcccctgcgccagcgcctcgaggagtacttccagcacgcctggtcctacaccaacggcatcgacatgaacgcggtgctgaagggcttccctgagtgcctgcaggctgacatctgcctgcacctgaaccgctcactgctgcagcactgcaaacccttccgaggggccaccaagggctgccttcgggccctggccatgaagttcaagaccacacatgcaccgccaggggacacactggtgcatgctggggacctgctcaccgccctgtacttcatctcccggggctccatcgagatcctgcggggcgacgtcgtcgtggccatcctggggaagaatgacatctttggggagcctctgaacctgtatgcaaggcctggcaagtcgaacggggatgtgcgggccctcacctactgtgacctacacaagatccatcgggacgacctgctggaggtgctggacatgtaccctgagttctccgaccacttctggtccagcctggagatcaccttcaacctgcgagataccaacatgatcccgggctcccccggcagtacggagttagagggtggcttcagtcggcaacgcaagcgcaagttgtccttccgcaggcgcacggacaaggacacggagcagccaggggaggtgtcggccttggggccgggccgggcgggggcagggccgagtagccggggccggccgggggggccgtggggggagagcccgtccagtggcccctccagccctgagagcagtgaggatgagggcccaggccgcagctccagccccctccgcctggtgcccttctccagccccaggccccccggagagccgccgggtggggagcccctgatggaggactgcgagaagagcagcgacacttgcaaccccctgtcaggcgccttctcaggagtgtccaacattttcagcttctggggggacagtcggggccgccagtaccaggagctccctcgatgccccgcccccacccccagcctcctcaacatccccctctccagcccgggtcggcggccccggggcgacgtggagagcaggctggatgccctccagcgccagctcaacaggctggagacccggctgagtgcagacatggccactgtcctgcagctgctacagaggcagatgacgctggtcccgcccgcctacagtgctgtgaccaccccggggcctggccccacttccacatccccgctgttgcccgtcagccccctccccaccctcaccttggactcgctttctcaggtttcccagttcatggcgtgtgaggagctgcccccgggggccccagagcttccccaagaaggccccacacgacgcctctccctaccgggccagctgggggccctcacctcccagcccctgcacagacacggctcggacccgggcagttagtggggctgcccagtgtggacacgtggctcacccagggatcaaggcgctgctgggccgctccccttggaggccctgctcaggaggccctgaccgtggaaggggagaggaactcgaaagcacagctcctcccccagcccttgggaccatcttctcctgcagtcccctgggccccagtgagaggggcaggggcagggccggcagtaggtggggcctgtggtccccccactgccctgagggcattagctggtctaactgcccggaggcacccggccctgggccttaggcacctcaaggacttttctgctatttactgctcttattgttaaggataataattaaggatcatatgaataattaatgaagatgctgatgactatgaataataaataattatcctgaggaga

SEQ ID NO: 213 - DNA, 3884 bp, Homo sapiens
  source 1..3884: mol_type = genomic DNA
  misc_feature 1..3884: note = cDNA of KCNH2 gene SNP c.1704G>T (p.Trp568Cys)
atgccggtgcggaggggccacgtcgcgccgcagaacaccttcctggacaccatcatccgcaagtttgagggccagagccgtaagttcatcatcgccaacgctcgggtggagaactgcgccgtcatctactgcaacgacggcttctgcgagctgtgcggctactcgcgggccgaggtgatgcagcgaccctgcacctgcgacttcctgcacgggccgcgcacgcagcgccgcgctgccgcgcagatcgcgcaggcactgctgggcgccgaggagcgcaaagtggaaatcgccttctaccggaaagatgggagctgcttcctatgtctggtggatgtggtgcccgtgaagaacgaggatggggctgtcatcatgttcatcctcaatttcgaggtggtgatggagaaggacatggtggggtccccggctcatgacaccaaccaccggggcccccccaccagctggctggccccaggccgcgccaagaccttccgcctgaagctgcccgcgctgctggcgctgacggcccgggagtcgtcggtgcggtcgggcggcgcgggcggcgcgggcgccccgggggccgtggtggtggacgtggacctgacgcccgcggcacccagcagcgagtcgctggccctggacgaagtgacagccatggacaaccacgtggcagggctcgggcccgcggaggagcggcgtgcgctggtgggtcccggctctccgccccgcagcgcgcccggccagctcccatcgccccgggcgcacagcctcaaccccgacgcctcgggctccagctgcagcctggcccggacgcgctcccgagaaagctgcgccagcgtgcgccgcgcctcgtcggccgacgacatcgaggccatgcgcgccggggtgctgcccccgccaccgcgccacgccagcaccggggccatgcacccactgcgcagcggcttgctcaactccacctcggactccgacctcgtgcgctaccgcaccattagcaagattccccaaatcaccctcaactttgtggacctcaagggcgaccccttcttggcttcgcccaccagtgaccgtgagatcatagcacctaagataaaggagcgaacccacaatgtcactgagaaggtcacccaggtcctgtccctgggcgccgacgtgctgcctgagtacaagctgcaggcaccgcgcatccaccgctggaccatcctgcattacagccccttcaaggccgtgtgggactggctcatcctgctgctggtcatctacacggctgtcttcacaccctactcggctgccttcctgctgaaggagacggaagaaggcccgcctgctaccgagtgtggctacgcctgccagccgctggctgtggtggacctcatcgtggacatcatgttcattgtggacatcctcatcaacttccgcaccacctacgtcaatgccaacgaggaggtggtcagccaccccggccgcatcgccgtccactacttcaagggctggttcctcatcgacatggtggccgccatccccttcgacctgctcatcttcggctctggctctgaggagctgatcgggctgctgaagactgcgcggctgctgcggctggtgcgcgtggcgcggaagctggatcgctactcagagtacggcgcggccgtgctgttcttgctcatgtgcacctttgcgctcatcgcgcactggctagcctgcatctgttacgccatcggcaacatggagcagccacacatggactcacgcatcggctggctgcacaacctgggcgaccagataggcaaaccctacaacagcagcggcctgggcggcccctccatcaaggacaagtatgtgacggcgctctacttcaccttcagcagcctcaccagtgtgggcttcggcaacgtctctcccaacaccaactcagagaagatcttctccatctgcgtcatgctcattggctccctcatgtatgctagcatcttcggcaacgtgtcggccatcatccagcggctgtactcgggcacagcccgctaccacacacagatgctgcgggtgcgggagttcatccgcttccaccagatccccaatcccctgcgccagcgcctcgaggagtacttccagcacgcctggtcctacaccaacggcatcgacatgaacgcggtgctgaagggcttccctgagtgcctgcaggctgacatctgcctgcacctgaaccgctcactgctgcagcactgcaaacccttccgaggggccaccaagggctgccttcgggccctggccatgaagttcaagaccacacatgcaccgccaggggacacactggtgcatgctggggacctgctcaccgccctgtacttcatctcccggggctccatcgagatcctgcggggcgacgtcgtcgtggccatcctggggaagaatgacatctttggggagcctctgaacctgtatgcaaggcctggcaagtcgaacggggatgtgcgggccctcacctactgtgacctacacaagatccatcgggacgacctgctggaggtgctggacatgtaccctgagttctccgaccacttctggtccagcctggagatcaccttcaacctgcgagataccaacatgatcccgggctcccccggcagtacggagttagagggtggcttcagtcggcaacgcaagcgcaagttgtccttccgcaggcgcacggacaaggacacggagcagccaggggaggtgtcggccttggggccgggccgggcgggggcagggccgagtagccggggccggccgggggggccgtggggggagagcccgtccagtggcccctccagccctgagagcagtgaggatgagggcccaggccgcagctccagccccctccgcctggtgcccttctccagccccaggccccccggagagccgccgggtggggagcccctgatggaggactgcgagaagagcagcgacacttgcaaccccctgtcaggcgccttctcaggagtgtccaacattttcagcttctggggggacagtcggggccgccagtaccaggagctccctcgatgccccgcccccacccccagcctcctcaacatccccctctccagcccgggtcggcggccccggggcgacgtggagagcaggctggatgccctccagcgccagctcaacaggctggagacccggctgagtgcagacatggccactgtcctgcagctgctacagaggcagatgacgctggtcccgcccgcctacagtgctgtgaccaccccggggcctggccccacttccacatccccgctgttgcccgtcagccccctccccaccctcaccttggactcgctttctcaggtttcccagttcatggcgtgtgaggagctgcccccgggggccccagagcttccccaagaaggccccacacgacgcctctccctaccgggccagctgggggccctcacctcccagcccctgcacagacacggctcggacccgggcagttagtggggctgcccagtgtggacacgtggctcacccagggatcaaggcgctgctgggccgctccccttggaggccctgctcaggaggccctgaccgtggaaggggagaggaactcgaaagcacagctcctcccccagcccttgggaccatcttctcctgcagtcccctgggccccagtgagaggggcaggggcagggccggcagtaggtggggcctgtggtccccccactgccctgagggcattagctggtctaactgcccggaggcacccggccctgggccttaggcacctcaaggacttttctgctatttactgctcttattgttaaggataataattaaggatcatatgaataattaatgaagatgctgatgactatgaataataaataattatcctgaggaga

SEQ ID NO: 214 - DNA, 3884 bp, Homo sapiens
  source 1..3884: mol_type = genomic DNA
  misc_feature 1..3884: note = cDNA of KCNH2 gene SNP c.1705T>C (p.Tyr569His)
atgccggtgcggaggggccacgtcgcgccgcagaacaccttcctggacaccatcatccgcaagtttgagggccagagccgtaagttcatcatcgccaacgctcgggtggagaactgcgccgtcatctactgcaacgacggcttctgcgagctgtgcggctactcgcgggccgaggtgatgcagcgaccctgcacctgcgacttcctgcacgggccgcgcacgcagcgccgcgctgccgcgcagatcgcgcaggcactgctgggcgccgaggagcgcaaagtggaaatcgccttctaccggaaagatgggagctgcttcctatgtctggtggatgtggtgcccgtgaagaacgaggatggggctgtcatcatgttcatcctcaatttcgaggtggtgatggagaaggacatggtggggtccccggctcatgacaccaaccaccggggcccccccaccagctggctggccccaggccgcgccaagaccttccgcctgaagctgcccgcgctgctggcgctgacggcccgggagtcgtcggtgcggtcgggcggcgcgggcggcgcgggcgccccgggggccgtggtggtggacgtggacctgacgcccgcggcacccagcagcgagtcgctggccctggacgaagtgacagccatggacaaccacgtggcagggctcgggcccgcggaggagcggcgtgcgctggtgggtcccggctctccgccccgcagcgcgcccggccagctcccatcgccccgggcgcacagcctcaaccccgacgcctcgggctccagctgcagcctggcccggacgcgctcccgagaaagctgcgccagcgtgcgccgcgcctcgtcggccgacgacatcgaggccatgcgcgccggggtgctgcccccgccaccgcgccacgccagcaccggggccatgcacccactgcgcagcggcttgctcaactccacctcggactccgacctcgtgcgctaccgcaccattagcaagattccccaaatcaccctcaactttgtggacctcaagggcgaccccttcttggcttcgcccaccagtgaccgtgagatcatagcacctaagataaaggagcgaacccacaatgtcactgagaaggtcacccaggtcctgtccctgggcgccgacgtgctgcctgagtacaagctgcaggcaccgcgcatccaccgctggaccatcctgcattacagccccttcaaggccgtgtgggactggctcatcctgctgctggtcatctacacggctgtcttcacaccctactcggctgccttcctgctgaaggagacggaagaaggcccgcctgctaccgagtgtggctacgcctgccagccgctggctgtggtggacctcatcgtggacatcatgttcattgtggacatcctcatcaacttccgcaccacctacgtcaatgccaacgaggaggtggtcagccaccccggccgcatcgccgtccactacttcaagggctggttcctcatcgacatggtggccgccatccccttcgacctgctcatcttcggctctggctctgaggagctgatcgggctgctgaagactgcgcggctgctgcggctggtgcgcgtggcgcggaagctggatcgctactcagagtacggcgcggccgtgctgttcttgctcatgtgcacctttgcgctcatcgcgcactggctagcctgcatctggcacgccatcggcaacatggagcagccacacatggactcacgcatcggctggctgcacaacctgggcgaccagataggcaaaccctacaacagcagcggcctgggcggcccctccatcaaggacaagtatgtgacggcgctctacttcaccttcagcagcctcaccagtgtgggcttcggcaacgtctctcccaacaccaactcagagaagatcttctccatctgcgtcatgctcattggctccctcatgtatgctagcatcttcggcaacgtgtcggccatcatccagcggctgtactcgggcacagcccgctaccacacacagatgctgcgggtgcgggagttcatccgcttccaccagatccccaatcccctgcgccagcgcctcgaggagtacttccagcacgcctggtcctacaccaacggcatcgacatgaacgcggtgctgaagggcttccctgagtgcctgcaggctgacatctgcctgcacctgaaccgctcactgctgcagcactgcaaacccttccgaggggccaccaagggctgccttcgggccctggccatgaagttcaagaccacacatgcaccgccaggggacacactggtgcatgctggggacctgctcaccgccctgtacttcatctcccggggctccatcgagatcctgcggggcgacgtcgtcgtggccatcctggggaagaatgacatctttggggagcctctgaacctgtatgcaaggcctggcaagtcgaacggggatgtgcgggccctcacctactgtgacctacacaagatccatcgggacgacctgctggaggtgctggacatgtaccctgagttctccgaccacttctggtccagcctggagatcaccttcaacctgcgagataccaacatgatcccgggctcccccggcagtacggagttagagggtggcttcagtcggcaacgcaagcgcaagttgtccttccgcaggcgcacggacaaggacacggagcagccaggggaggtgtcggccttggggccgggccgggcgggggcagggccgagtagccggggccggccgggggggccgtggggggagagcccgtccagtggcccctccagccctgagagcagtgaggatgagggcccaggccgcagctccagccccctccgcctggtgcccttctccagccccaggccccccggagagccgccgggtggggagcccctgatggaggactgcgagaagagcagcgacacttgcaaccccctgtcaggcgccttctcaggagtgtccaacattttcagcttctggggggacagtcggggccgccagtaccaggagctccctcgatgccccgcccccacccccagcctcctcaacatccccctctccagcccgggtcggcggccccggggcgacgtggagagcaggctggatgccctccagcgccagctcaacaggctggagacccggctgagtgcagacatggccactgtcctgcagctgctacagaggcagatgacgctggtcccgcccgcctacagtgctgtgaccaccccggggcctggccccacttccacatccccgctgttgcccgtcagccccctccccaccctcaccttggactcgctttctcaggtttcccagttcatggcgtgtgaggagctgcccccgggggccccagagcttccccaagaaggccccacacgacgcctctccctaccgggccagctgggggccctcacctcccagcccctgcacagacacggctcggacccgggcagttagtggggctgcccagtgtggacacgtggctcacccagggatcaaggcgctgctgggccgctccccttggaggccctgctcaggaggccctgaccgtggaaggggagaggaactcgaaagcacagctcctcccccagcccttgggaccatcttctcctgcagtcccctgggccccagtgagaggggcaggggcagggccggcagtaggtggggcctgtggtccccccactgccctgagggcattagctggtctaactgcccggaggcacccggccctgggccttaggcacctcaaggacttttctgctatttactgctcttattgttaaggataataattaaggatcatatgaataattaatgaagatgctgatgactatgaataataaataattatcctgaggaga

SEQ ID NO: 215 - DNA, 3884 bp, Homo sapiens
  source 1..3884: mol_type = genomic DNA
  misc_feature 1..3884: note = cDNA of KCNH2 gene SNP c.1707C>G (p.Tyr569Ter)
atgccggtgcggaggggccacgtcgcgccgcagaacaccttcctggacaccatcatccgcaagtttgagggccagagccgtaagttcatcatcgccaacgctcgggtggagaactgcgccgtcatctactgcaacgacggcttctgcgagctgtgcggctactcgcgggccgaggtgatgcagcgaccctgcacctgcgacttcctgcacgggccgcgcacgcagcgccgcgctgccgcgcagatcgcgcaggcactgctgggcgccgaggagcgcaaagtggaaatcgccttctaccggaaagatgggagctgcttcctatgtctggtggatgtggtgcccgtgaagaacgaggatggggctgtcatcatgttcatcctcaatttcgaggtggtgatggagaaggacatggtggggtccccggctcatgacaccaaccaccggggcccccccaccagctggctggccccaggccgcgccaagaccttccgcctgaagctgcccgcgctgctggcgctgacggcccgggagtcgtcggtgcggtcgggcggcgcgggcggcgcgggcgccccgggggccgtggtggtggacgtggacctgacgcccgcggcacccagcagcgagtcgctggccctggacgaagtgacagccatggacaaccacgtggcagggctcgggcccgcggaggagcggcgtgcgctggtgggtcccggctctccgccccgcagcgcgcccggccagctcccatcgccccgggcgcacagcctcaaccccgacgcctcgggctccagctgcagcctggcccggacgcgctcccgagaaagctgcgccagcgtgcgccgcgcctcgtcggccgacgacatcgaggccatgcgcgccggggtgctgcccccgccaccgcgccacgccagcaccggggccatgcacccactgcgcagcggcttgctcaactccacctcggactccgacctcgtgcgctaccgcaccattagcaagattccccaaatcaccctcaactttgtggacctcaagggcgaccccttcttggcttcgcccaccagtgaccgtgagatcatagcacctaagataaaggagcgaacccacaatgtcactgagaaggtcacccaggtcctgtccctgggcgccgacgtgctgcctgagtacaagctgcaggcaccgcgcatccaccgctggaccatcctgcattacagccccttcaaggccgtgtgggactggctcatcctgctgctggtcatctacacggctgtcttcacaccctactcggctgccttcctgctgaaggagacggaagaaggcccgcctgctaccgagtgtggctacgcctgccagccgctggctgtggtggacctcatcgtggacatcatgttcattgtggacatcctcatcaacttccgcaccacctacgtcaatgccaacgaggaggtggtcagccaccccggccgcatcgccgtccactacttcaagggctggttcctcatcgacatggtggccgccatccccttcgacctgctcatcttcggctctggctctgaggagctgatcgggctgctgaagactgcgcggctgctgcggctggtgcgcgtggcgcggaagctggatcgctactcagagtacggcgcggccgtgctgttcttgctcatgtgcacctttgcgctcatcgcgcactggctagcctgcatctggtaggccatcggcaacatggagcagccacacatggactcacgcatcggctggctgcacaacctgggcgaccagataggcaaaccctacaacagcagcggcctgggcggcccctccatcaaggacaagtatgtgacggcgctctacttcaccttcagcagcctcaccagtgtgggcttcggcaacgtctctcccaacaccaactcagagaagatcttctccatctgcgtcatgctcattggctccctcatgtatgctagcatcttcggcaacgtgtcggccatcatccagcggctgtactcgggcacagcccgctaccacacacagatgctgcgggtgcgggagttcatccgcttccaccagatccccaatcccctgcgccagcgcctcgaggagtacttccagcacgcctggtcctacaccaacggcatcgacatgaacgcggtgctgaagggcttccctgagtgcctgcaggctgacatctgcctgcacctgaaccgctcactgctgcagcactgcaaacccttccgaggggccaccaagggctgccttcgggccctggccatgaagttcaagaccacacatgcaccgccaggggacacactggtgcatgctggggacctgctcaccgccctgtacttcatctcccggggctccatcgagatcctgcggggcgacgtcgtcgtggccatcctggggaagaatgacatctttggggagcctctgaacctgtatgcaaggcctggcaagtcgaacggggatgtgcgggccctcacctactgtgacctacacaagatccatcgggacgacctgctggaggtgctggacatgtaccctgagttctccgaccacttctggtccagcctggagatcaccttcaacctgcgagataccaacatgatcccgggctcccccggcagtacggagttagagggtggcttcagtcggcaacgcaagcgcaagttgtccttccgcaggcgcacggacaaggacacggagcagccaggggaggtgtcggccttggggccgggccgggcgggggcagggccgagtagccggggccggccgggggggccgtggggggagagcccgtccagtggcccctccagccctgagagcagtgaggatgagggcccaggccgcagctccagccccctccgcctggtgcccttctccagccccaggccccccggagagccgccgggtggggagcccctgatggaggactgcgagaagagcagcgacacttgcaaccccctgtcaggcgccttctcaggagtgtccaacattttcagcttctggggggacagtcggggccgccagtaccaggagctccctcgatgccccgcccccacccccagcctcctcaacatccccctctccagcccgggtcggcggccccggggcgacgtggagagcaggctggatgccctccagcgccagctcaacaggctggagacccggctgagtgcagacatggccactgtcctgcagctgctacagaggcagatgacgctggtcccgcccgcctacagtgctgtgaccaccccggggcctggccccacttccacatccccgctgttgcccgtcagccccctccccaccctcaccttggactcgctttctcaggtttcccagttcatggcgtgtgaggagctgcccccgggggccccagagcttccccaagaaggccccacacgacgcctctccctaccgggccagctgggggccctcacctcccagcccctgcacagacacggctcggacccgggcagttagtggggctgcccagtgtggacacgtggctcacccagggatcaaggcgctgctgggccgctccccttggaggccctgctcaggaggccctgaccgtggaaggggagaggaactcgaaagcacagctcctcccccagcccttgggaccatcttctcctgcagtcccctgggccccagtgagaggggcaggggcagggccggcagtaggtggggcctgtggtccccccactgccctgagggcattagctggtctaactgcccggaggcacccggccctgggccttaggcacctcaaggacttttctgctatttactgctcttattgttaaggataataattaaggatcatatgaataattaatgaagatgctgatgactatgaataataaataattatcctgaggaga

SEQ ID NO: 216 - DNA, 3884 bp, Homo sapiens
  source 1..3884: mol_type = genomic DNA
  misc_feature 1..3884: note = cDNA of KCNH2 gene SNP c.1708G>A (p.Ala570Thr)
atgccggtgcggaggggccacgtcgcgccgcagaacaccttcctggacaccatcatccgcaagtttgagggccagagccgtaagttcatcatcgccaacgctcgggtggagaactgcgccgtcatctactgcaacgacggcttctgcgagctgtgcggctactcgcgggccgaggtgatgcagcgaccctgcacctgcgacttcctgcacgggccgcgcacgcagcgccgcgctgccgcgcagatcgcgcaggcactgctgggcgccgaggagcgcaaagtggaaatcgccttctaccggaaagatgggagctgcttcctatgtctggtggatgtggtgcccgtgaagaacgaggatggggctgtcatcatgttcatcctcaatttcgaggtggtgatggagaaggacatggtggggtccccggctcatgacaccaaccaccggggcccccccaccagctggctggccccaggccgcgccaagaccttccgcctgaagctgcccgcgctgctggcgctgacggcccgggagtcgtcggtgcggtcgggcggcgcgggcggcgcgggcgccccgggggccgtggtggtggacgtggacctgacgcccgcggcacccagcagcgagtcgctggccctggacgaagtgacagccatggacaaccacgtggcagggctcgggcccgcggaggagcggcgtgcgctggtgggtcccggctctccgccccgcagcgcgcccggccagctcccatcgccccgggcgcacagcctcaaccccgacgcctcgggctccagctgcagcctggcccggacgcgctcccgagaaagctgcgccagcgtgcgccgcgcctcgtcggccgacgacatcgaggccatgcgcgccggggtgctgcccccgccaccgcgccacgccagcaccggggccatgcacccactgcgcagcggcttgctcaactccacctcggactccgacctcgtgcgctaccgcaccattagcaagattccccaaatcaccctcaactttgtggacctcaagggcgaccccttcttggcttcgcccaccagtgaccgtgagatcatagcacctaagataaaggagcgaacccacaatgtcactgagaaggtcacccaggtcctgtccctgggcgccgacgtgctgcctgagtacaagctgcaggcaccgcgcatccaccgctggaccatcctgcattacagccccttcaaggccgtgtgggactggctcatcctgctgctggtcatctacacggctgtcttcacaccctactcggctgccttcctgctgaaggagacggaagaaggcccgcctgctaccgagtgtggctacgcctgccagccgctggctgtggtggacctcatcgtggacatcatgttcattgtggacatcctcatcaacttccgcaccacctacgtcaatgccaacgaggaggtggtcagccaccccggccgcatcgccgtccactacttcaagggctggttcctcatcgacatggtggccgccatccccttcgacctgctcatcttcggctctggctctgaggagctgatcgggctgctgaagactgcgcggctgctgcggctggtgcgcgtggcgcggaagctggatcgctactcagagtacggcgcggccgtgctgttcttgctcatgtgcacctttgcgctcatcgcgcactggctagcctgcatctggtacaccatcggcaacatggagcagccacacatggactcacgcatcggctggctgcacaacctgggcgaccagataggcaaaccctacaacagcagcggcctgggcggcccctccatcaaggacaagtatgtgacggcgctctacttcaccttcagcagcctcaccagtgtgggcttcggcaacgtctctcccaacaccaactcagagaagatcttctccatctgcgtcatgctcattggctccctcatgtatgctagcatcttcggcaacgtgtcggccatcatccagcggctgtactcgggcacagcccgctaccacacacagatgctgcgggtgcgggagttcatccgcttccaccagatccccaatcccctgcgccagcgcctcgaggagtacttccagcacgcctggtcctacaccaacggcatcgacatgaacgcggtgctgaagggcttccctgagtgcctgcaggctgacatctgcctgcacctgaaccgctcactgctgcagcactgcaaacccttccgaggggccaccaagggctgccttcgggccctggccatgaagttcaagaccacacatgcaccgccaggggacacactggtgcatgctggggacctgctcaccgccctgtacttcatctcccggggctccatcgagatcctgcggggcgacgtcgtcgtggccatcctggggaagaatgacatctttggggagcctctgaacctgtatgcaaggcctggcaagtcgaacggggatgtgcgggccctcacctactgtgacctacacaagatccatcgggacgacctgctggaggtgctggacatgtaccctgagttctccgaccacttctggtccagcctggagatcaccttcaacctgcgagataccaacatgatcccgggctcccccggcagtacggagttagagggtggcttcagtcggcaacgcaagcgcaagttgtccttccgcaggcgcacggacaaggacacggagcagccaggggaggtgtcggccttggggccgggccgggcgggggcagggccgagtagccggggccggccgggggggccgtggggggagagcccgtccagtggcccctccagccctgagagcagtgaggatgagggcccaggccgcagctccagccccctccgcctggtgcccttctccagccccaggccccccggagagccgccgggtggggagcccctgatggaggactgcgagaagagcagcgacacttgcaaccccctgtcaggcgccttctcaggagtgtccaacattttcagcttctggggggacagtcggggccgccagtaccaggagctccctcgatgccccgcccccacccccagcctcctcaacatccccctctccagcccgggtcggcggccccggggcgacgtggagagcaggctggatgccctccagcgccagctcaacaggctggagacccggctgagtgcagacatggccactgtcctgcagctgctacagaggcagatgacgctggtcccgcccgcctacagtgctgtgaccaccccggggcctggccccacttccacatccccgctgttgcccgtcagccccctccccaccctcaccttggactcgctttctcaggtttcccagttcatggcgtgtgaggagctgcccccgggggccccagagcttccccaagaaggccccacacgacgcctctccctaccgggccagctgggggccctcacctcccagcccctgcacagacacggctcggacccgggcagttagtggggctgcccagtgtggacacgtggctcacccagggatcaaggcgctgctgggccgctccccttggaggccctgctcaggaggccctgaccgtggaaggggagaggaactcgaaagcacagctcctcccccagcccttgggaccatcttctcctgcagtcccctgggccccagtgagaggggcaggggcagggccggcagtaggtggggcctgtggtccccccactgccctgagggcattagctggtctaactgcccggaggcacccggccctgggccttaggcacctcaaggacttttctgctatttactgctcttattgttaaggataataattaaggatcatatgaataattaatgaagatgctgatgactatgaataataaataattatcctgaggaga

SEQ ID NO: 217 - DNA, 3884 bp, Homo sapiens
  source 1..3884: mol_type = genomic DNA
  misc_feature 1..3884: note = cDNA of KCNH2 gene SNP c.1708G>T (p.Ala570Ser)
atgccggtgcggaggggccacgtcgcgccgcagaacaccttcctggacaccatcatccgcaagtttgagggccagagccgtaagttcatcatcgccaacgctcgggtggagaactgcgccgtcatctactgcaacgacggcttctgcgagctgtgcggctactcgcgggccgaggtgatgcagcgaccctgcacctgcgacttcctgcacgggccgcgcacgcagcgccgcgctgccgcgcagatcgcgcaggcactgctgggcgccgaggagcgcaaagtggaaatcgccttctaccggaaagatgggagctgcttcctatgtctggtggatgtggtgcccgtgaagaacgaggatggggctgtcatcatgttcatcctcaatttcgaggtggtgatggagaaggacatggtggggtccccggctcatgacaccaaccaccggggcccccccaccagctggctggccccaggccgcgccaagaccttccgcctgaagctgcccgcgctgctggcgctgacggcccgggagtcgtcggtgcggtcgggcggcgcgggcggcgcgggcgccccgggggccgtggtggtggacgtggacctgacgcccgcggcacccagcagcgagtcgctggccctggacgaagtgacagccatggacaaccacgtggcagggctcgggcccgcggaggagcggcgtgcgctggtgggtcccggctctccgccccgcagcgcgcccggccagctcccatcgccccgggcgcacagcctcaaccccgacgcctcgggctccagctgcagcctggcccggacgcgctcccgagaaagctgcgccagcgtgcgccgcgcctcgtcggccgacgacatcgaggccatgcgcgccggggtgctgcccccgccaccgcgccacgccagcaccggggccatgcacccactgcgcagcggcttgctcaactccacctcggactccgacctcgtgcgctaccgcaccattagcaagattccccaaatcaccctcaactttgtggacctcaagggcgaccccttcttggcttcgcccaccagtgaccgtgagatcatagcacctaagataaaggagcgaacccacaatgtcactgagaaggtcacccaggtcctgtccctgggcgccgacgtgctgcctgagtacaagctgcaggcaccgcgcatccaccgctggaccatcctgcattacagccccttcaaggccgtgtgggactggctcatcctgctgctggtcatctacacggctgtcttcacaccctactcggctgccttcctgctgaaggagacggaagaaggcccgcctgctaccgagtgtggctacgcctgccagccgctggctgtggtggacctcatcgtggacatcatgttcattgtggacatcctcatcaacttccgcaccacctacgtcaatgccaacgaggaggtggtcagccaccccggccgcatcgccgtccactacttcaagggctggttcctcatcgacatggtggccgccatccccttcgacctgctcatcttcggctctggctctgaggagctgatcgggctgctgaagactgcgcggctgctgcggctggtgcgcgtggcgcggaagctggatcgctactcagagtacggcgcggccgtgctgttcttgctcatgtgcacctttgcgctcatcgcgcactggctagcctgcatctggtactccatcggcaacatggagcagccacacatggactcacgcatcggctggctgcacaacctgggcgaccagataggcaaaccctacaacagcagcggcctgggcggcccctccatcaaggacaagtatgtgacggcgctctacttcaccttcagcagcctcaccagtgtgggcttcggcaacgtctctcccaacaccaactcagagaagatcttctccatctgcgtcatgctcattggctccctcatgtatgctagcatcttcggcaacgtgtcggccatcatccagcggctgtactcgggcacagcccgctaccacacacagatgctgcgggtgcgggagttcatccgcttccaccagatccccaatcccctgcgccagcgcctcgaggagtacttccagcacgcctggtcctacaccaacggcatcgacatgaacgcggtgctgaagggcttccctgagtgcctgcaggctgacatctgcctgcacctgaaccgctcactgctgcagcactgcaaacccttccgaggggccaccaagggctgccttcgggccctggccatgaagttcaagaccacacatgcaccgccaggggacacactggtgcatgctggggacctgctcaccgccctgtacttcatctcccggggctccatcgagatcctgcggggcgacgtcgtcgtggccatcctggggaagaatgacatctttggggagcctctgaacctgtatgcaaggcctggcaagtcgaacggggatgtgcgggccctcacctactgtgacctacacaagatccatcgggacgacctgctggaggtgctggacatgtaccctgagttctccgaccacttctggtccagcctggagatcaccttcaacctgcgagataccaacatgatcccgggctcccccggcagtacggagttagagggtggcttcagtcggcaacgcaagcgcaagttgtccttccgcaggcgcacggacaaggacacggagcagccaggggaggtgtcggccttggggccgggccgggcgggggcagggccgagtagccggggccggccgggggggccgtggggggagagcccgtccagtggcccctccagccctgagagcagtgaggatgagggcccaggccgcagctccagccccctccgcctggtgcccttctccagccccaggccccccggagagccgccgggtggggagcccctgatggaggactgcgagaagagcagcgacacttgcaaccccctgtcaggcgccttctcaggagtgtccaacattttcagcttctggggggacagtcggggccgccagtaccaggagctccctcgatgccccgcccccacccccagcctcctcaacatccccctctccagcccgggtcggcggccccggggcgacgtggagagcaggctggatgccctccagcgccagctcaacaggctggagacccggctgagtgcagacatggccactgtcctgcagctgctacagaggcagatgacgctggtcccgcccgcctacagtgctgtgaccaccccggggcctggccccacttccacatccccgctgttgcccgtcagccccctccccaccctcaccttggactcgctttctcaggtttcccagttcatggcgtgtgaggagctgcccccgggggccccagagcttccccaagaaggccccacacgacgcctctccctaccgggccagctgggggccctcacctcccagcccctgcacagacacggctcggacccgggcagttagtggggctgcccagtgtggacacgtggctcacccagggatcaaggcgctgctgggccgctccccttggaggccctgctcaggaggccctgaccgtggaaggggagaggaactcgaaagcacagctcctcccccagcccttgggaccatcttctcctgcagtcccctgggccccagtgagaggggcaggggcagggccggcagtaggtggggcctgtggtccccccactgccctgagggcattagctggtctaactgcccggaggcacccggccctgggccttaggcacctcaaggacttttctgctatttactgctcttattgttaaggataataattaaggatcatatgaataattaatgaagatgctgatgactatgaataataaataattatcctgaggaga

SEQ ID NO: 218 - DNA, 3884 bp, Homo sapiens
  source 1..3884: mol_type = genomic DNA
  misc_feature 1..3884: note = cDNA of KCNH2 gene SNP c.170C>T (p.Ala57Val)
atgccggtgcggaggggccacgtcgcgccgcagaacaccttcctggacaccatcatccgcaagtttgagggccagagccgtaagttcatcatcgccaacgctcgggtggagaactgcgccgtcatctactgcaacgacggcttctgcgagctgtgcggctactcgcgggtcgaggtgatgcagcgaccctgcacctgcgacttcctgcacgggccgcgcacgcagcgccgcgctgccgcgcagatcgcgcaggcactgctgggcgccgaggagcgcaaagtggaaatcgccttctaccggaaagatgggagctgcttcctatgtctggtggatgtggtgcccgtgaagaacgaggatggggctgtcatcatgttcatcctcaatttcgaggtggtgatggagaaggacatggtggggtccccggctcatgacaccaaccaccggggcccccccaccagctggctggccccaggccgcgccaagaccttccgcctgaagctgcccgcgctgctggcgctgacggcccgggagtcgtcggtgcggtcgggcggcgcgggcggcgcgggcgccccgggggccgtggtggtggacgtggacctgacgcccgcggcacccagcagcgagtcgctggccctggacgaagtgacagccatggacaaccacgtggcagggctcgggcccgcggaggagcggcgtgcgctggtgggtcccggctctccgccccgcagcgcgcccggccagctcccatcgccccgggcgcacagcctcaaccccgacgcctcgggctccagctgcagcctggcccggacgcgctcccgagaaagctgcgccagcgtgcgccgcgcctcgtcggccgacgacatcgaggccatgcgcgccggggtgctgcccccgccaccgcgccacgccagcaccggggccatgcacccactgcgcagcggcttgctcaactccacctcggactccgacctcgtgcgctaccgcaccattagcaagattccccaaatcaccctcaactttgtggacctcaagggcgaccccttcttggcttcgcccaccagtgaccgtgagatcatagcacctaagataaaggagcgaacccacaatgtcactgagaaggtcacccaggtcctgtccctgggcgccgacgtgctgcctgagtacaagctgcaggcaccgcgcatccaccgctggaccatcctgcattacagccccttcaaggccgtgtgggactggctcatcctgctgctggtcatctacacggctgtcttcacaccctactcggctgccttcctgctgaaggagacggaagaaggcccgcctgctaccgagtgtggctacgcctgccagccgctggctgtggtggacctcatcgtggacatcatgttcattgtggacatcctcatcaacttccgcaccacctacgtcaatgccaacgaggaggtggtcagccaccccggccgcatcgccgtccactacttcaagggctggttcctcatcgacatggtggccgccatccccttcgacctgctcatcttcggctctggctctgaggagctgatcgggctgctgaagactgcgcggctgctgcggctggtgcgcgtggcgcggaagctggatcgctactcagagtacggcgcggccgtgctgttcttgctcatgtgcacctttgcgctcatcgcgcactggctagcctgcatctggtacgccatcggcaacatggagcagccacacatggactcacgcatcggctggctgcacaacctgggcgaccagataggcaaaccctacaacagcagcggcctgggcggcccctccatcaaggacaagtatgtgacggcgctctacttcaccttcagcagcctcaccagtgtgggcttcggcaacgtctctcccaacaccaactcagagaagatcttctccatctgcgtcatgctcattggctccctcatgtatgctagcatcttcggcaacgtgtcggccatcatccagcggctgtactcgggcacagcccgctaccacacacagatgctgcgggtgcgggagttcatccgcttccaccagatccccaatcccctgcgccagcgcctcgaggagtacttccagcacgcctggtcctacaccaacggcatcgacatgaacgcggtgctgaagggcttccctgagtgcctgcaggctgacatctgcctgcacctgaaccgctcactgctgcagcactgcaaacccttccgaggggccaccaagggctgccttcgggccctggccatgaagttcaagaccacacatgcaccgccaggggacacactggtgcatgctggggacctgctcaccgccctgtacttcatctcccggggctccatcgagatcctgcggggcgacgtcgtcgtggccatcctggggaagaatgacatctttggggagcctctgaacctgtatgcaaggcctggcaagtcgaacggggatgtgcgggccctcacctactgtgacctacacaagatccatcgggacgacctgctggaggtgctggacatgtaccctgagttctccgaccacttctggtccagcctggagatcaccttcaacctgcgagataccaacatgatcccgggctcccccggcagtacggagttagagggtggcttcagtcggcaacgcaagcgcaagttgtccttccgcaggcgcacggacaaggacacggagcagccaggggaggtgtcggccttggggccgggccgggcgggggcagggccgagtagccggggccggccgggggggccgtggggggagagcccgtccagtggcccctccagccctgagagcagtgaggatgagggcccaggccgcagctccagccccctccgcctggtgcccttctccagccccaggccccccggagagccgccgggtggggagcccctgatggaggactgcgagaagagcagcgacacttgcaaccccctgtcaggcgccttctcaggagtgtccaacattttcagcttctggggggacagtcggggccgccagtaccaggagctccctcgatgccccgcccccacccccagcctcctcaacatccccctctccagcccgggtcggcggccccggggcgacgtggagagcaggctggatgccctccagcgccagctcaacaggctggagacccggctgagtgcagacatggccactgtcctgcagctgctacagaggcagatgacgctggtcccgcccgcctacagtgctgtgaccaccccggggcctggccccacttccacatccccgctgttgcccgtcagccccctccccaccctcaccttggactcgctttctcaggtttcccagttcatggcgtgtgaggagctgcccccgggggccccagagcttccccaagaaggccccacacgacgcctctccctaccgggccagctgggggccctcacctcccagcccctgcacagacacggctcggacccgggcagttagtggggctgcccagtgtggacacgtggctcacccagggatcaaggcgctgctgggccgctccccttggaggccctgctcaggaggccctgaccgtggaaggggagaggaactcgaaagcacagctcctcccccagcccttgggaccatcttctcctgcagtcccctgggccccagtgagaggggcaggggcagggccggcagtaggtggggcctgtggtccccccactgccctgagggcattagctggtctaactgcccggaggcacccggccctgggccttaggcacctcaaggacttttctgctatttactgctcttattgttaaggataataattaaggatcatatgaataattaatgaagatgctgatgactatgaataataaataattatcctgaggaga

SEQ ID NO: 219 - DNA, 3884 bp, Homo sapiens
  source 1..3884: mol_type = genomic DNA
  misc_feature 1..3884: note = cDNA of KCNH2 gene SNP c.1711A>C (p.Ile571Leu)
atgccggtgcggaggggccacgtcgcgccgcagaacaccttcctggacaccatcatccgcaagtttgagggccagagccgtaagttcatcatcgccaacgctcgggtggagaactgcgccgtcatctactgcaacgacggcttctgcgagctgtgcggctactcgcgggccgaggtgatgcagcgaccctgcacctgcgacttcctgcacgggccgcgcacgcagcgccgcgctgccgcgcagatcgcgcaggcactgctgggcgccgaggagcgcaaagtggaaatcgccttctaccggaaagatgggagctgcttcctatgtctggtggatgtggtgcccgtgaagaacgaggatggggctgtcatcatgttcatcctcaatttcgaggtggtgatggagaaggacatggtggggtccccggctcatgacaccaaccaccggggcccccccaccagctggctggccccaggccgcgccaagaccttccgcctgaagctgcccgcgctgctggcgctgacggcccgggagtcgtcggtgcggtcgggcggcgcgggcggcgcgggcgccccgggggccgtggtggtggacgtggacctgacgcccgcggcacccagcagcgagtcgctggccctggacgaagtgacagccatggacaaccacgtggcagggctcgggcccgcggaggagcggcgtgcgctggtgggtcccggctctccgccccgcagcgcgcccggccagctcccatcgccccgggcgcacagcctcaaccccgacgcctcgggctccagctgcagcctggcccggacgcgctcccgagaaagctgcgccagcgtgcgccgcgcctcgtcggccgacgacatcgaggccatgcgcgccggggtgctgcccccgccaccgcgccacgccagcaccggggccatgcacccactgcgcagcggcttgctcaactccacctcggactccgacctcgtgcgctaccgcaccattagcaagattccccaaatcaccctcaactttgtggacctcaagggcgaccccttcttggcttcgcccaccagtgaccgtgagatcatagcacctaagataaaggagcgaacccacaatgtcactgagaaggtcacccaggtcctgtccctgggcgccgacgtgctgcctgagtacaagctgcaggcaccgcgcatccaccgctggaccatcctgcattacagccccttcaaggccgtgtgggactggctcatcctgctgctggtcatctacacggctgtcttcacaccctactcggctgccttcctgctgaaggagacggaagaaggcccgcctgctaccgagtgtggctacgcctgccagccgctggctgtggtggacctcatcgtggacatcatgttcattgtggacatcctcatcaacttccgcaccacctacgtcaatgccaacgaggaggtggtcagccaccccggccgcatcgccgtccactacttcaagggctggttcctcatcgacatggtggccgccatccccttcgacctgctcatcttcggctctggctctgaggagctgatcgggctgctgaagactgcgcggctgctgcggctggtgcgcgtggcgcggaagctggatcgctactcagagtacggcgcggccgtgctgttcttgctcatgtgcacctttgcgctcatcgcgcactggctagcctgcatctggtacgccctcggcaacatggagcagccacacatggactcacgcatcggctggctgcacaacctgggcgaccagataggcaaaccctacaacagcagcggcctgggcggcccctccatcaaggacaagtatgtgacggcgctctacttcaccttcagcagcctcaccagtgtgggcttcggcaacgtctctcccaacaccaactcagagaagatcttctccatctgcgtcatgctcattggctccctcatgtatgctagcatcttcggcaacgtgtcggccatcatccagcggctgtactcgggcacagcccgctaccacacacagatgctgcgggtgcgggagttcatccgcttccaccagatccccaatcccctgcgccagcgcctcgaggagtacttccagcacgcctggtcctacaccaacggcatcgacatgaacgcggtgctgaagggcttccctgagtgcctgcaggctgacatctgcctgcacctgaaccgctcactgctgcagcactgcaaacccttccgaggggccaccaagggctgccttcgggccctggccatgaagttcaagaccacacatgcaccgccaggggacacactggtgcatgctggggacctgctcaccgccctgtacttcatctcccggggctccatcgagatcctgcggggcgacgtcgtcgtggccatcctggggaagaatgacatctttggggagcctctgaacctgtatgcaaggcctggcaagtcgaacggggatgtgcgggccctcacctactgtgacctacacaagatccatcgggacgacctgctggaggtgctggacatgtaccctgagttctccgaccacttctggtccagcctggagatcaccttcaacctgcgagataccaacatgatcccgggctcccccggcagtacggagttagagggtggcttcagtcggcaacgcaagcgcaagttgtccttccgcaggcgcacggacaaggacacggagcagccaggggaggtgtcggccttggggccgggccgggcgggggcagggccgagtagccggggccggccgggggggccgtggggggagagcccgtccagtggcccctccagccctgagagcagtgaggatgagggcccaggccgcagctccagccccctccgcctggtgcccttctccagccccaggccccccggagagccgccgggtggggagcccctgatggaggactgcgagaagagcagcgacacttgcaaccccctgtcaggcgccttctcaggagtgtccaacattttcagcttctggggggacagtcggggccgccagtaccaggagctccctcgatgccccgcccccacccccagcctcctcaacatccccctctccagcccgggtcggcggccccggggcgacgtggagagcaggctggatgccctccagcgccagctcaacaggctggagacccggctgagtgcagacatggccactgtcctgcagctgctacagaggcagatgacgctggtcccgcccgcctacagtgctgtgaccaccccggggcctggccccacttccacatccccgctgttgcccgtcagccccctccccaccctcaccttggactcgctttctcaggtttcccagttcatggcgtgtgaggagctgcccccgggggccccagagcttccccaagaaggccccacacgacgcctctccctaccgggccagctgggggccctcacctcccagcccctgcacagacacggctcggacccgggcagttagtggggctgcccagtgtggacacgtggctcacccagggatcaaggcgctgctgggccgctccccttggaggccctgctcaggaggccctgaccgtggaaggggagaggaactcgaaagcacagctcctcccccagcccttgggaccatcttctcctgcagtcccctgggccccagtgagaggggcaggggcagggccggcagtaggtggggcctgtggtccccccactgccctgagggcattagctggtctaactgcccggaggcacccggccctgggccttaggcacctcaaggacttttctgctatttactgctcttattgttaaggataataattaaggatcatatgaataattaatgaagatgctgatgactatgaataataaataattatcctgaggaga

SEQ ID NO: 220 - DNA, 3884 bp, Homo sapiens
  source 1..3884: mol_type = genomic DNA
  misc_feature 1..3884: note = cDNA of KCNH2 gene SNP c.1711A>G (p.Ile571Val)
atgccggtgcggaggggccacgtcgcgccgcagaacaccttcctggacaccatcatccgcaagtttgagggccagagccgtaagttcatcatcgccaacgctcgggtggagaactgcgccgtcatctactgcaacgacggcttctgcgagctgtgcggctactcgcgggccgaggtgatgcagcgaccctgcacctgcgacttcctgcacgggccgcgcacgcagcgccgcgctgccgcgcagatcgcgcaggcactgctgggcgccgaggagcgcaaagtggaaatcgccttctaccggaaagatgggagctgcttcctatgtctggtggatgtggtgcccgtgaagaacgaggatggggctgtcatcatgttcatcctcaatttcgaggtggtgatggagaaggacatggtggggtccccggctcatgacaccaaccaccggggcccccccaccagctggctggccccaggccgcgccaagaccttccgcctgaagctgcccgcgctgctggcgctgacggcccgggagtcgtcggtgcggtcgggcggcgcgggcggcgcgggcgccccgggggccgtggtggtggacgtggacctgacgcccgcggcacccagcagcgagtcgctggccctggacgaagtgacagccatggacaaccacgtggcagggctcgggcccgcggaggagcggcgtgcgctggtgggtcccggctctccgccccgcagcgcgcccggccagctcccatcgccccgggcgcacagcctcaaccccgacgcctcgggctccagctgcagcctggcccggacgcgctcccgagaaagctgcgccagcgtgcgccgcgcctcgtcggccgacgacatcgaggccatgcgcgccggggtgctgcccccgccaccgcgccacgccagcaccggggccatgcacccactgcgcagcggcttgctcaactccacctcggactccgacctcgtgcgctaccgcaccattagcaagattccccaaatcaccctcaactttgtggacctcaagggcgaccccttcttggcttcgcccaccagtgaccgtgagatcatagcacctaagataaaggagcgaacccacaatgtcactgagaaggtcacccaggtcctgtccctgggcgccgacgtgctgcctgagtacaagctgcaggcaccgcgcatccaccgctggaccatcctgcattacagccccttcaaggccgtgtgggactggctcatcctgctgctggtcatctacacggctgtcttcacaccctactcggctgccttcctgctgaaggagacggaagaaggcccgcctgctaccgagtgtggctacgcctgccagccgctggctgtggtggacctcatcgtggacatcatgttcattgtggacatcctcatcaacttccgcaccacctacgtcaatgccaacgaggaggtggtcagccaccccggccgcatcgccgtccactacttcaagggctggttcctcatcgacatggtggccgccatccccttcgacctgctcatcttcggctctggctctgaggagctgatcgggctgctgaagactgcgcggctgctgcggctggtgcgcgtggcgcggaagctggatcgctactcagagtacggcgcggccgtgctgttcttgctcatgtgcacctttgcgctcatcgcgcactggctagcctgcatctggtacgccgtcggcaacatggagcagccacacatggactcacgcatcggctggctgcacaacctgggcgaccagataggcaaaccctacaacagcagcggcctgggcggcccctccatcaaggacaagtatgtgacggcgctctacttcaccttcagcagcctcaccagtgtgggcttcggcaacgtctctcccaacaccaactcagagaagatcttctccatctgcgtcatgctcattggctccctcatgtatgctagcatcttcggcaacgtgtcggccatcatccagcggctgtactcgggcacagcccgctaccacacacagatgctgcgggtgcgggagttcatccgcttccaccagatccccaatcccctgcgccagcgcctcgaggagtacttccagcacgcctggtcctacaccaacggcatcgacatgaacgcggtgctgaagggcttccctgagtgcctgcaggctgacatctgcctgcacctgaaccgctcactgctgcagcactgcaaacccttccgaggggccaccaagggctgccttcgggccctggccatgaagttcaagaccacacatgcaccgccaggggacacactggtgcatgctggggacctgctcaccgccctgtacttcatctcccggggctccatcgagatcctgcggggcgacgtcgtcgtggccatcctggggaagaatgacatctttggggagcctctgaacctgtatgcaaggcctggcaagtcgaacggggatgtgcgggccctcacctactgtgacctacacaagatccatcgggacgacctgctggaggtgctggacatgtaccctgagttctccgaccacttctggtccagcctggagatcaccttcaacctgcgagataccaacatgatcccgggctcccccggcagtacggagttagagggtggcttcagtcggcaacgcaagcgcaagttgtccttccgcaggcgcacggacaaggacacggagcagccaggggaggtgtcggccttggggccgggccgggcgggggcagggccgagtagccggggccggccgggggggccgtggggggagagcccgtccagtggcccctccagccctgagagcagtgaggatgagggcccaggccgcagctccagccccctccgcctggtgcccttctccagccccaggccccccggagagccgccgggtggggagcccctgatggaggactgcgagaagagcagcgacacttgcaaccccctgtcaggcgccttctcaggagtgtccaacattttcagcttctggggggacagtcggggccgccagtaccaggagctccctcgatgccccgcccccacccccagcctcctcaacatccccctctccagcccgggtcggcggccccggggcgacgtggagagcaggctggatgccctccagcgccagctcaacaggctggagacccggctgagtgcagacatggccactgtcctgcagctgctacagaggcagatgacgctggtcccgcccgcctacagtgctgtgaccaccccggggcctggccccacttccacatccccgctgttgcccgtcagccccctccccaccctcaccttggactcgctttctcaggtttcccagttcatggcgtgtgaggagctgcccccgggggccccagagcttccccaagaaggccccacacgacgcctctccctaccgggccagctgggggccctcacctcccagcccctgcacagacacggctcggacccgggcagttagtggggctgcccagtgtggacacgtggctcacccagggatcaaggcgctgctgggccgctccccttggaggccctgctcaggaggccctgaccgtggaaggggagaggaactcgaaagcacagctcctcccccagcccttgggaccatcttctcctgcagtcccctgggccccagtgagaggggcaggggcagggccggcagtaggtggggcctgtggtccccccactgccctgagggcattagctggtctaactgcccggaggcacccggccctgggccttaggcacctcaaggacttttctgctatttactgctcttattgttaaggataataattaaggatcatatgaataattaatgaagatgctgatgactatgaataataaataattatcctgaggaga

SEQ ID NO: 221 - DNA, 3884 bp, Homo sapiens
  source 1..3884: mol_type = genomic DNA
  misc_feature 1..3884: note = cDNA of KCNH2 gene SNP c.1714G>A (p.Gly572Ser)
atgccggtgcggaggggccacgtcgcgccgcagaacaccttcctggacaccatcatccgcaagtttgagggccagagccgtaagttcatcatcgccaacgctcgggtggagaactgcgccgtcatctactgcaacgacggcttctgcgagctgtgcggctactcgcgggccgaggtgatgcagcgaccctgcacctgcgacttcctgcacgggccgcgcacgcagcgccgcgctgccgcgcagatcgcgcaggcactgctgggcgccgaggagcgcaaagtggaaatcgccttctaccggaaagatgggagctgcttcctatgtctggtggatgtggtgcccgtgaagaacgaggatggggctgtcatcatgttcatcctcaatttcgaggtggtgatggagaaggacatggtggggtccccggctcatgacaccaaccaccggggcccccccaccagctggctggccccaggccgcgccaagaccttccgcctgaagctgcccgcgctgctggcgctgacggcccgggagtcgtcggtgcggtcgggcggcgcgggcggcgcgggcgccccgggggccgtggtggtggacgtggacctgacgcccgcggcacccagcagcgagtcgctggccctggacgaagtgacagccatggacaaccacgtggcagggctcgggcccgcggaggagcggcgtgcgctggtgggtcccggctctccgccccgcagcgcgcccggccagctcccatcgccccgggcgcacagcctcaaccccgacgcctcgggctccagctgcagcctggcccggacgcgctcccgagaaagctgcgccagcgtgcgccgcgcctcgtcggccgacgacatcgaggccatgcgcgccggggtgctgcccccgccaccgcgccacgccagcaccggggccatgcacccactgcgcagcggcttgctcaactccacctcggactccgacctcgtgcgctaccgcaccattagcaagattccccaaatcaccctcaactttgtggacctcaagggcgaccccttcttggcttcgcccaccagtgaccgtgagatcatagcacctaagataaaggagcgaacccacaatgtcactgagaaggtcacccaggtcctgtccctgggcgccgacgtgctgcctgagtacaagctgcaggcaccgcgcatccaccgctggaccatcctgcattacagccccttcaaggccgtgtgggactggctcatcctgctgctggtcatctacacggctgtcttcacaccctactcggctgccttcctgctgaaggagacggaagaaggcccgcctgctaccgagtgtggctacgcctgccagccgctggctgtggtggacctcatcgtggacatcatgttcattgtggacatcctcatcaacttccgcaccacctacgtcaatgccaacgaggaggtggtcagccaccccggccgcatcgccgtccactacttcaagggctggttcctcatcgacatggtggccgccatccccttcgacctgctcatcttcggctctggctctgaggagctgatcgggctgctgaagactgcgcggctgctgcggctggtgcgcgtggcgcggaagctggatcgctactcagagtacggcgcggccgtgctgttcttgctcatgtgcacctttgcgctcatcgcgcactggctagcctgcatctggtacgccatcagcaacatggagcagccacacatggactcacgcatcggctggctgcacaacctgggcgaccagataggcaaaccctacaacagcagcggcctgggcggcccctccatcaaggacaagtatgtgacggcgctctacttcaccttcagcagcctcaccagtgtgggcttcggcaacgtctctcccaacaccaactcagagaagatcttctccatctgcgtcatgctcattggctccctcatgtatgctagcatcttcggcaacgtgtcggccatcatccagcggctgtactcgggcacagcccgctaccacacacagatgctgcgggtgcgggagttcatccgcttccaccagatccccaatcccctgcgccagcgcctcgaggagtacttccagcacgcctggtcctacaccaacggcatcgacatgaacgcggtgctgaagggcttccctgagtgcctgcaggctgacatctgcctgcacctgaaccgctcactgctgcagcactgcaaacccttccgaggggccaccaagggctgccttcgggccctggccatgaagttcaagaccacacatgcaccgccaggggacacactggtgcatgctggggacctgctcaccgccctgtacttcatctcccggggctccatcgagatcctgcggggcgacgtcgtcgtggccatcctggggaagaatgacatctttggggagcctctgaacctgtatgcaaggcctggcaagtcgaacggggatgtgcgggccctcacctactgtgacctacacaagatccatcgggacgacctgctggaggtgctggacatgtaccctgagttctccgaccacttctggtccagcctggagatcaccttcaacctgcgagataccaacatgatcccgggctcccccggcagtacggagttagagggtggcttcagtcggcaacgcaagcgcaagttgtccttccgcaggcgcacggacaaggacacggagcagccaggggaggtgtcggccttggggccgggccgggcgggggcagggccgagtagccggggccggccgggggggccgtggggggagagcccgtccagtggcccctccagccctgagagcagtgaggatgagggcccaggccgcagctccagccccctccgcctggtgcccttctccagccccaggccccccggagagccgccgggtggggagcccctgatggaggactgcgagaagagcagcgacacttgcaaccccctgtcaggcgccttctcaggagtgtccaacattttcagcttctggggggacagtcggggccgccagtaccaggagctccctcgatgccccgcccccacccccagcctcctcaacatccccctctccagcccgggtcggcggccccggggcgacgtggagagcaggctggatgccctccagcgccagctcaacaggctggagacccggctgagtgcagacatggccactgtcctgcagctgctacagaggcagatgacgctggtcccgcccgcctacagtgctgtgaccaccccggggcctggccccacttccacatccccgctgttgcccgtcagccccctccccaccctcaccttggactcgctttctcaggtttcccagttcatggcgtgtgaggagctgcccccgggggccccagagcttccccaagaaggccccacacgacgcctctccctaccgggccagctgggggccctcacctcccagcccctgcacagacacggctcggacccgggcagttagtggggctgcccagtgtggacacgtggctcacccagggatcaaggcgctgctgggccgctccccttggaggccctgctcaggaggccctgaccgtggaaggggagaggaactcgaaagcacagctcctcccccagcccttgggaccatcttctcctgcagtcccctgggccccagtgagaggggcaggggcagggccggcagtaggtggggcctgtggtccccccactgccctgagggcattagctggtctaactgcccggaggcacccggccctgggccttaggcacctcaaggacttttctgctatttactgctcttattgttaaggataataattaaggatcatatgaataattaatgaagatgctgatgactatgaataataaataattatcctgaggaga

SEQ ID NO: 222 - DNA, 3884 bp, Homo sapiens
  source 1..3884: mol_type = genomic DNA
  misc_feature 1..3884: note = cDNA of KCNH2 gene SNP c.1714G>C (p.Gly572Arg)
atgccggtgcggaggggccacgtcgcgccgcagaacaccttcctggacaccatcatccgcaagtttgagggccagagccgtaagttcatcatcgccaacgctcgggtggagaactgcgccgtcatctactgcaacgacggcttctgcgagctgtgcggctactcgcgggccgaggtgatgcagcgaccctgcacctgcgacttcctgcacgggccgcgcacgcagcgccgcgctgccgcgcagatcgcgcaggcactgctgggcgccgaggagcgcaaagtggaaatcgccttctaccggaaagatgggagctgcttcctatgtctggtggatgtggtgcccgtgaagaacgaggatggggctgtcatcatgttcatcctcaatttcgaggtggtgatggagaaggacatggtggggtccccggctcatgacaccaaccaccggggcccccccaccagctggctggccccaggccgcgccaagaccttccgcctgaagctgcccgcgctgctggcgctgacggcccgggagtcgtcggtgcggtcgggcggcgcgggcggcgcgggcgccccgggggccgtggtggtggacgtggacctgacgcccgcggcacccagcagcgagtcgctggccctggacgaagtgacagccatggacaaccacgtggcagggctcgggcccgcggaggagcggcgtgcgctggtgggtcccggctctccgccccgcagcgcgcccggccagctcccatcgccccgggcgcacagcctcaaccccgacgcctcgggctccagctgcagcctggcccggacgcgctcccgagaaagctgcgccagcgtgcgccgcgcctcgtcggccgacgacatcgaggccatgcgcgccggggtgctgcccccgccaccgcgccacgccagcaccggggccatgcacccactgcgcagcggcttgctcaactccacctcggactccgacctcgtgcgctaccgcaccattagcaagattccccaaatcaccctcaactttgtggacctcaagggcgaccccttcttggcttcgcccaccagtgaccgtgagatcatagcacctaagataaaggagcgaacccacaatgtcactgagaaggtcacccaggtcctgtccctgggcgccgacgtgctgcctgagtacaagctgcaggcaccgcgcatccaccgctggaccatcctgcattacagccccttcaaggccgtgtgggactggctcatcctgctgctggtcatctacacggctgtcttcacaccctactcggctgccttcctgctgaaggagacggaagaaggcccgcctgctaccgagtgtggctacgcctgccagccgctggctgtggtggacctcatcgtggacatcatgttcattgtggacatcctcatcaacttccgcaccacctacgtcaatgccaacgaggaggtggtcagccaccccggccgcatcgccgtccactacttcaagggctggttcctcatcgacatggtggccgccatccccttcgacctgctcatcttcggctctggctctgaggagctgatcgggctgctgaagactgcgcggctgctgcggctggtgcgcgtggcgcggaagctggatcgctactcagagtacggcgcggccgtgctgttcttgctcatgtgcacctttgcgctcatcgcgcactggctagcctgcatctggtacgccatccgcaacatggagcagccacacatggactcacgcatcggctggctgcacaacctgggcgaccagataggcaaaccctacaacagcagcggcctgggcggcccctccatcaaggacaagtatgtgacggcgctctacttcaccttcagcagcctcaccagtgtgggcttcggcaacgtctctcccaacaccaactcagagaagatcttctccatctgcgtcatgctcattggctccctcatgtatgctagcatcttcggcaacgtgtcggccatcatccagcggctgtactcgggcacagcccgctaccacacacagatgctgcgggtgcgggagttcatccgcttccaccagatccccaatcccctgcgccagcgcctcgaggagtacttccagcacgcctggtcctacaccaacggcatcgacatgaacgcggtgctgaagggcttccctgagtgcctgcaggctgacatctgcctgcacctgaaccgctcactgctgcagcactgcaaacccttccgaggggccaccaagggctgccttcgggccctggccatgaagttcaagaccacacatgcaccgccaggggacacactggtgcatgctggggacctgctcaccgccctgtacttcatctcccggggctccatcgagatcctgcggggcgacgtcgtcgtggccatcctggggaagaatgacatctttggggagcctctgaacctgtatgcaaggcctggcaagtcgaacggggatgtgcgggccctcacctactgtgacctacacaagatccatcgggacgacctgctggaggtgctggacatgtaccctgagttctccgaccacttctggtccagcctggagatcaccttcaacctgcgagataccaacatgatcccgggctcccccggcagtacggagttagagggtggcttcagtcggcaacgcaagcgcaagttgtccttccgcaggcgcacggacaaggacacggagcagccaggggaggtgtcggccttggggccgggccgggcgggggcagggccgagtagccggggccggccgggggggccgtggggggagagcccgtccagtggcccctccagccctgagagcagtgaggatgagggcccaggccgcagctccagccccctccgcctggtgcccttctccagccccaggccccccggagagccgccgggtggggagcccctgatggaggactgcgagaagagcagcgacacttgcaaccccctgtcaggcgccttctcaggagtgtccaacattttcagcttctggggggacagtcggggccgccagtaccaggagctccctcgatgccccgcccccacccccagcctcctcaacatccccctctccagcccgggtcggcggccccggggcgacgtggagagcaggctggatgccctccagcgccagctcaacaggctggagacccggctgagtgcagacatggccactgtcctgcagctgctacagaggcagatgacgctggtcccgcccgcctacagtgctgtgaccaccccggggcctggccccacttccacatccccgctgttgcccgtcagccccctccccaccctcaccttggactcgctttctcaggtttcccagttcatggcgtgtgaggagctgcccccgggggccccagagcttccccaagaaggccccacacgacgcctctccctaccgggccagctgggggccctcacctcccagcccctgcacagacacggctcggacccgggcagttagtggggctgcccagtgtggacacgtggctcacccagggatcaaggcgctgctgggccgctccccttggaggccctgctcaggaggccctgaccgtggaaggggagaggaactcgaaagcacagctcctcccccagcccttgggaccatcttctcctgcagtcccctgggccccagtgagaggggcaggggcagggccggcagtaggtggggcctgtggtccccccactgccctgagggcattagctggtctaactgcccggaggcacccggccctgggccttaggcacctcaaggacttttctgctatttactgctcttattgttaaggataataattaaggatcatatgaataattaatgaagatgctgatgactatgaataataaataattatcctgaggaga

SEQ ID NO: 223 - DNA, 3884 bp, Homo sapiens
  source 1..3884: mol_type = genomic DNA
  misc_feature 1..3884: note = cDNA of KCNH2 gene SNP c.1714G>T (p.Gly572Cys)
atgccggtgcggaggggccacgtcgcgccgcagaacaccttcctggacaccatcatccgcaagtttgagggccagagccgtaagttcatcatcgccaacgctcgggtggagaactgcgccgtcatctactgcaacgacggcttctgcgagctgtgcggctactcgcgggccgaggtgatgcagcgaccctgcacctgcgacttcctgcacgggccgcgcacgcagcgccgcgctgccgcgcagatcgcgcaggcactgctgggcgccgaggagcgcaaagtggaaatcgccttctaccggaaagatgggagctgcttcctatgtctggtggatgtggtgcccgtgaagaacgaggatggggctgtcatcatgttcatcctcaatttcgaggtggtgatggagaaggacatggtggggtccccggctcatgacaccaaccaccggggcccccccaccagctggctggccccaggccgcgccaagaccttccgcctgaagctgcccgcgctgctggcgctgacggcccgggagtcgtcggtgcggtcgggcggcgcgggcggcgcgggcgccccgggggccgtggtggtggacgtggacctgacgcccgcggcacccagcagcgagtcgctggccctggacgaagtgacagccatggacaaccacgtggcagggctcgggcccgcggaggagcggcgtgcgctggtgggtcccggctctccgccccgcagcgcgcccggccagctcccatcgccccgggcgcacagcctcaaccccgacgcctcgggctccagctgcagcctggcccggacgcgctcccgagaaagctgcgccagcgtgcgccgcgcctcgtcggccgacgacatcgaggccatgcgcgccggggtgctgcccccgccaccgcgccacgccagcaccggggccatgcacccactgcgcagcggcttgctcaactccacctcggactccgacctcgtgcgctaccgcaccattagcaagattccccaaatcaccctcaactttgtggacctcaagggcgaccccttcttggcttcgcccaccagtgaccgtgagatcatagcacctaagataaaggagcgaacccacaatgtcactgagaaggtcacccaggtcctgtccctgggcgccgacgtgctgcctgagtacaagctgcaggcaccgcgcatccaccgctggaccatcctgcattacagccccttcaaggccgtgtgggactggctcatcctgctgctggtcatctacacggctgtcttcacaccctactcggctgccttcctgctgaaggagacggaagaaggcccgcctgctaccgagtgtggctacgcctgccagccgctggctgtggtggacctcatcgtggacatcatgttcattgtggacatcctcatcaacttccgcaccacctacgtcaatgccaacgaggaggtggtcagccaccccggccgcatcgccgtccactacttcaagggctggttcctcatcgacatggtggccgccatccccttcgacctgctcatcttcggctctggctctgaggagctgatcgggctgctgaagactgcgcggctgctgcggctggtgcgcgtggcgcggaagctggatcgctactcagagtacggcgcggccgtgctgttcttgctcatgtgcacctttgcgctcatcgcgcactggctagcctgcatctggtacgccatctgcaacatggagcagccacacatggactcacgcatcggctggctgcacaacctgggcgaccagataggcaaaccctacaacagcagcggcctgggcggcccctccatcaaggacaagtatgtgacggcgctctacttcaccttcagcagcctcaccagtgtgggcttcggcaacgtctctcccaacaccaactcagagaagatcttctccatctgcgtcatgctcattggctccctcatgtatgctagcatcttcggcaacgtgtcggccatcatccagcggctgtactcgggcacagcccgctaccacacacagatgctgcgggtgcgggagttcatccgcttccaccagatccccaatcccctgcgccagcgcctcgaggagtacttccagcacgcctggtcctacaccaacggcatcgacatgaacgcggtgctgaagggcttccctgagtgcctgcaggctgacatctgcctgcacctgaaccgctcactgctgcagcactgcaaacccttccgaggggccaccaagggctgccttcgggccctggccatgaagttcaagaccacacatgcaccgccaggggacacactggtgcatgctggggacctgctcaccgccctgtacttcatctcccggggctccatcgagatcctgcggggcgacgtcgtcgtggccatcctggggaagaatgacatctttggggagcctctgaacctgtatgcaaggcctggcaagtcgaacggggatgtgcgggccctcacctactgtgacctacacaagatccatcgggacgacctgctggaggtgctggacatgtaccctgagttctccgaccacttctggtccagcctggagatcaccttcaacctgcgagataccaacatgatcccgggctcccccggcagtacggagttagagggtggcttcagtcggcaacgcaagcgcaagttgtccttccgcaggcgcacggacaaggacacggagcagccaggggaggtgtcggccttggggccgggccgggcgggggcagggccgagtagccggggccggccgggggggccgtggggggagagcccgtccagtggcccctccagccctgagagcagtgaggatgagggcccaggccgcagctccagccccctccgcctggtgcccttctccagccccaggccccccggagagccgccgggtggggagcccctgatggaggactgcgagaagagcagcgacacttgcaaccccctgtcaggcgccttctcaggagtgtccaacattttcagcttctggggggacagtcggggccgccagtaccaggagctccctcgatgccccgcccccacccccagcctcctcaacatccccctctccagcccgggtcggcggccccggggcgacgtggagagcaggctggatgccctccagcgccagctcaacaggctggagacccggctgagtgcagacatggccactgtcctgcagctgctacagaggcagatgacgctggtcccgcccgcctacagtgctgtgaccaccccggggcctggccccacttccacatccccgctgttgcccgtcagccccctccccaccctcaccttggactcgctttctcaggtttcccagttcatggcgtgtgaggagctgcccccgggggccccagagcttccccaagaaggccccacacgacgcctctccctaccgggccagctgggggccctcacctcccagcccctgcacagacacggctcggacccgggcagttagtggggctgcccagtgtggacacgtggctcacccagggatcaaggcgctgctgggccgctccccttggaggccctgctcaggaggccctgaccgtggaaggggagaggaactcgaaagcacagctcctcccccagcccttgggaccatcttctcctgcagtcccctgggccccagtgagaggggcaggggcagggccggcagtaggtggggcctgtggtccccccactgccctgagggcattagctggtctaactgcccggaggcacccggccctgggccttaggcacctcaaggacttttctgctatttactgctcttattgttaaggataataattaaggatcatatgaataattaatgaagatgctgatgactatgaataataaataattatcctgaggaga

SEQ ID NO: 224 - DNA, 3884 bp, Homo sapiens
  source 1..3884: mol_type = genomic DNA
  misc_feature 1..3884: note = cDNA of KCNH2 gene SNP c.1715G>A (p.Gly572Asp)
atgccggtgcggaggggccacgtcgcgccgcagaacaccttcctggacaccatcatccgcaagtttgagggccagagccgtaagttcatcatcgccaacgctcgggtggagaactgcgccgtcatctactgcaacgacggcttctgcgagctgtgcggctactcgcgggccgaggtgatgcagcgaccctgcacctgcgacttcctgcacgggccgcgcacgcagcgccgcgctgccgcgcagatcgcgcaggcactgctgggcgccgaggagcgcaaagtggaaatcgccttctaccggaaagatgggagctgcttcctatgtctggtggatgtggtgcccgtgaagaacgaggatggggctgtcatcatgttcatcctcaatttcgaggtggtgatggagaaggacatggtggggtccccggctcatgacaccaaccaccggggcccccccaccagctggctggccccaggccgcgccaagaccttccgcctgaagctgcccgcgctgctggcgctgacggcccgggagtcgtcggtgcggtcgggcggcgcgggcggcgcgggcgccccgggggccgtggtggtggacgtggacctgacgcccgcggcacccagcagcgagtcgctggccctggacgaagtgacagccatggacaaccacgtggcagggctcgggcccgcggaggagcggcgtgcgctggtgggtcccggctctccgccccgcagcgcgcccggccagctcccatcgccccgggcgcacagcctcaaccccgacgcctcgggctccagctgcagcctggcccggacgcgctcccgagaaagctgcgccagcgtgcgccgcgcctcgtcggccgacgacatcgaggccatgcgcgccggggtgctgcccccgccaccgcgccacgccagcaccggggccatgcacccactgcgcagcggcttgctcaactccacctcggactccgacctcgtgcgctaccgcaccattagcaagattccccaaatcaccctcaactttgtggacctcaagggcgaccccttcttggcttcgcccaccagtgaccgtgagatcatagcacctaagataaaggagcgaacccacaatgtcactgagaaggtcacccaggtcctgtccctgggcgccgacgtgctgcctgagtacaagctgcaggcaccgcgcatccaccgctggaccatcctgcattacagccccttcaaggccgtgtgggactggctcatcctgctgctggtcatctacacggctgtcttcacaccctactcggctgccttcctgctgaaggagacggaagaaggcccgcctgctaccgagtgtggctacgcctgccagccgctggctgtggtggacctcatcgtggacatcatgttcattgtggacatcctcatcaacttccgcaccacctacgtcaatgccaacgaggaggtggtcagccaccccggccgcatcgccgtccactacttcaagggctggttcctcatcgacatggtggccgccatccccttcgacctgctcatcttcggctctggctctgaggagctgatcgggctgctgaagactgcgcggctgctgcggctggtgcgcgtggcgcggaagctggatcgctactcagagtacggcgcggccgtgctgttcttgctcatgtgcacctttgcgctcatcgcgcactggctagcctgcatctggtacgccatcgacaacatggagcagccacacatggactcacgcatcggctggctgcacaacctgggcgaccagataggcaaaccctacaacagcagcggcctgggcggcccctccatcaaggacaagtatgtgacggcgctctacttcaccttcagcagcctcaccagtgtgggcttcggcaacgtctctcccaacaccaactcagagaagatcttctccatctgcgtcatgctcattggctccctcatgtatgctagcatcttcggcaacgtgtcggccatcatccagcggctgtactcgggcacagcccgctaccacacacagatgctgcgggtgcgggagttcatccgcttccaccagatccccaatcccctgcgccagcgcctcgaggagtacttccagcacgcctggtcctacaccaacggcatcgacatgaacgcggtgctgaagggcttccctgagtgcctgcaggctgacatctgcctgcacctgaaccgctcactgctgcagcactgcaaacccttccgaggggccaccaagggctgccttcgggccctggccatgaagttcaagaccacacatgcaccgccaggggacacactggtgcatgctggggacctgctcaccgccctgtacttcatctcccggggctccatcgagatcctgcggggcgacgtcgtcgtggccatcctggggaagaatgacatctttggggagcctctgaacctgtatgcaaggcctggcaagtcgaacggggatgtgcgggccctcacctactgtgacctacacaagatccatcgggacgacctgctggaggtgctggacatgtaccctgagttctccgaccacttctggtccagcctggagatcaccttcaacctgcgagataccaacatgatcccgggctcccccggcagtacggagttagagggtggcttcagtcggcaacgcaagcgcaagttgtccttccgcaggcgcacggacaaggacacggagcagccaggggaggtgtcggccttggggccgggccgggcgggggcagggccgagtagccggggccggccgggggggccgtggggggagagcccgtccagtggcccctccagccctgagagcagtgaggatgagggcccaggccgcagctccagccccctccgcctggtgcccttctccagccccaggccccccggagagccgccgggtggggagcccctgatggaggactgcgagaagagcagcgacacttgcaaccccctgtcaggcgccttctcaggagtgtccaacattttcagcttctggggggacagtcggggccgccagtaccaggagctccctcgatgccccgcccccacccccagcctcctcaacatccccctctccagcccgggtcggcggccccggggcgacgtggagagcaggctggatgccctccagcgccagctcaacaggctggagacccggctgagtgcagacatggccactgtcctgcagctgctacagaggcagatgacgctggtcccgcccgcctacagtgctgtgaccaccccggggcctggccccacttccacatccccgctgttgcccgtcagccccctccccaccctcaccttggactcgctttctcaggtttcccagttcatggcgtgtgaggagctgcccccgggggccccagagcttccccaagaaggccccacacgacgcctctccctaccgggccagctgggggccctcacctcccagcccctgcacagacacggctcggacccgggcagttagtggggctgcccagtgtggacacgtggctcacccagggatcaaggcgctgctgggccgctccccttggaggccctgctcaggaggccctgaccgtggaaggggagaggaactcgaaagcacagctcctcccccagcccttgggaccatcttctcctgcagtcccctgggccccagtgagaggggcaggggcagggccggcagtaggtggggcctgtggtccccccactgccctgagggcattagctggtctaactgcccggaggcacccggccctgggccttaggcacctcaaggacttttctgctatttactgctcttattgttaaggataataattaaggatcatatgaataattaatgaagatgctgatgactatgaataataaataattatcctgaggaga

SEQ ID NO: 225 - DNA, 3884 bp, Homo sapiens
  source 1..3884: mol_type = genomic DNA
  misc_feature 1..3884: note = cDNA of KCNH2 gene SNP c.1715G>C (p.Gly572Ala)
atgccggtgcggaggggccacgtcgcgccgcagaacaccttcctggacaccatcatccgcaagtttgagggccagagccgtaagttcatcatcgccaacgctcgggtggagaactgcgccgtcatctactgcaacgacggcttctgcgagctgtgcggctactcgcgggccgaggtgatgcagcgaccctgcacctgcgacttcctgcacgggccgcgcacgcagcgccgcgctgccgcgcagatcgcgcaggcactgctgggcgccgaggagcgcaaagtggaaatcgccttctaccggaaagatgggagctgcttcctatgtctggtggatgtggtgcccgtgaagaacgaggatggggctgtcatcatgttcatcctcaatttcgaggtggtgatggagaaggacatggtggggtccccggctcatgacaccaaccaccggggcccccccaccagctggctggccccaggccgcgccaagaccttccgcctgaagctgcccgcgctgctggcgctgacggcccgggagtcgtcggtgcggtcgggcggcgcgggcggcgcgggcgccccgggggccgtggtggtggacgtggacctgacgcccgcggcacccagcagcgagtcgctggccctggacgaagtgacagccatggacaaccacgtggcagggctcgggcccgcggaggagcggcgtgcgctggtgggtcccggctctccgccccgcagcgcgcccggccagctcccatcgccccgggcgcacagcctcaaccccgacgcctcgggctccagctgcagcctggcccggacgcgctcccgagaaagctgcgccagcgtgcgccgcgcctcgtcggccgacgacatcgaggccatgcgcgccggggtgctgcccccgccaccgcgccacgccagcaccggggccatgcacccactgcgcagcggcttgctcaactccacctcggactccgacctcgtgcgctaccgcaccattagcaagattccccaaatcaccctcaactttgtggacctcaagggcgaccccttcttggcttcgcccaccagtgaccgtgagatcatagcacctaagataaaggagcgaacccacaatgtcactgagaaggtcacccaggtcctgtccctgggcgccgacgtgctgcctgagtacaagctgcaggcaccgcgcatccaccgctggaccatcctgcattacagccccttcaaggccgtgtgggactggctcatcctgctgctggtcatctacacggctgtcttcacaccctactcggctgccttcctgctgaaggagacggaagaaggcccgcctgctaccgagtgtggctacgcctgccagccgctggctgtggtggacctcatcgtggacatcatgttcattgtggacatcctcatcaacttccgcaccacctacgtcaatgccaacgaggaggtggtcagccaccccggccgcatcgccgtccactacttcaagggctggttcctcatcgacatggtggccgccatccccttcgacctgctcatcttcggctctggctctgaggagctgatcgggctgctgaagactgcgcggctgctgcggctggtgcgcgtggcgcggaagctggatcgctactcagagtacggcgcggccgtgctgttcttgctcatgtgcacctttgcgctcatcgcgcactggctagcctgcatctggtacgccatcgccaacatggagcagccacacatggactcacgcatcggctggctgcacaacctgggcgaccagataggcaaaccctacaacagcagcggcctgggcggcccctccatcaaggacaagtatgtgacggcgctctacttcaccttcagcagcctcaccagtgtgggcttcggcaacgtctctcccaacaccaactcagagaagatcttctccatctgcgtcatgctcattggctccctcatgtatgctagcatcttcggcaacgtgtcggccatcatccagcggctgtactcgggcacagcccgctaccacacacagatgctgcgggtgcgggagttcatccgcttccaccagatccccaatcccctgcgccagcgcctcgaggagtacttccagcacgcctggtcctacaccaacggcatcgacatgaacgcggtgctgaagggcttccctgagtgcctgcaggctgacatctgcctgcacctgaaccgctcactgctgcagcactgcaaacccttccgaggggccaccaagggctgccttcgggccctggccatgaagttcaagaccacacatgcaccgccaggggacacactggtgcatgctggggacctgctcaccgccctgtacttcatctcccggggctccatcgagatcctgcggggcgacgtcgtcgtggccatcctggggaagaatgacatctttggggagcctctgaacctgtatgcaaggcctggcaagtcgaacggggatgtgcgggccctcacctactgtgacctacacaagatccatcgggacgacctgctggaggtgctggacatgtaccctgagttctccgaccacttctggtccagcctggagatcaccttcaacctgcgagataccaacatgatcccgggctcccccggcagtacggagttagagggtggcttcagtcggcaacgcaagcgcaagttgtccttccgcaggcgcacggacaaggacacggagcagccaggggaggtgtcggccttggggccgggccgggcgggggcagggccgagtagccggggccggccgggggggccgtggggggagagcccgtccagtggcccctccagccctgagagcagtgaggatgagggcccaggccgcagctccagccccctccgcctggtgcccttctccagccccaggccccccggagagccgccgggtggggagcccctgatggaggactgcgagaagagcagcgacacttgcaaccccctgtcaggcgccttctcaggagtgtccaacattttcagcttctggggggacagtcggggccgccagtaccaggagctccctcgatgccccgcccccacccccagcctcctcaacatccccctctccagcccgggtcggcggccccggggcgacgtggagagcaggctggatgccctccagcgccagctcaacaggctggagacccggctgagtgcagacatggccactgtcctgcagctgctacagaggcagatgacgctggtcccgcccgcctacagtgctgtgaccaccccggggcctggccccacttccacatccccgctgttgcccgtcagccccctccccaccctcaccttggactcgctttctcaggtttcccagttcatggcgtgtgaggagctgcccccgggggccccagagcttccccaagaaggccccacacgacgcctctccctaccgggccagctgggggccctcacctcccagcccctgcacagacacggctcggacccgggcagttagtggggctgcccagtgtggacacgtggctcacccagggatcaaggcgctgctgggccgctccccttggaggccctgctcaggaggccctgaccgtggaaggggagaggaactcgaaagcacagctcctcccccagcccttgggaccatcttctcctgcagtcccctgggccccagtgagaggggcaggggcagggccggcagtaggtggggcctgtggtccccccactgccctgagggcattagctggtctaactgcccggaggcacccggccctgggccttaggcacctcaaggacttttctgctatttactgctcttattgttaaggataataattaaggatcatatgaataattaatgaagatgctgatgactatgaataataaataattatcctgaggaga

SEQ ID NO: 226 - DNA, 3884 bp, Homo sapiens
  source 1..3884: mol_type = genomic DNA
  misc_feature 1..3884: note = cDNA of KCNH2 gene SNP c.1715G>T (p.Gly572Val)
atgccggtgcggaggggccacgtcgcgccgcagaacaccttcctggacaccatcatccgcaagtttgagggccagagccgtaagttcatcatcgccaacgctcgggtggagaactgcgccgtcatctactgcaacgacggcttctgcgagctgtgcggctactcgcgggccgaggtgatgcagcgaccctgcacctgcgacttcctgcacgggccgcgcacgcagcgccgcgctgccgcgcagatcgcgcaggcactgctgggcgccgaggagcgcaaagtggaaatcgccttctaccggaaagatgggagctgcttcctatgtctggtggatgtggtgcccgtgaagaacgaggatggggctgtcatcatgttcatcctcaatttcgaggtggtgatggagaaggacatggtggggtccccggctcatgacaccaaccaccggggcccccccaccagctggctggccccaggccgcgccaagaccttccgcctgaagctgcccgcgctgctggcgctgacggcccgggagtcgtcggtgcggtcgggcggcgcgggcggcgcgggcgccccgggggccgtggtggtggacgtggacctgacgcccgcggcacccagcagcgagtcgctggccctggacgaagtgacagccatggacaaccacgtggcagggctcgggcccgcggaggagcggcgtgcgctggtgggtcccggctctccgccccgcagcgcgcccggccagctcccatcgccccgggcgcacagcctcaaccccgacgcctcgggctccagctgcagcctggcccggacgcgctcccgagaaagctgcgccagcgtgcgccgcgcctcgtcggccgacgacatcgaggccatgcgcgccggggtgctgcccccgccaccgcgccacgccagcaccggggccatgcacccactgcgcagcggcttgctcaactccacctcggactccgacctcgtgcgctaccgcaccattagcaagattccccaaatcaccctcaactttgtggacctcaagggcgaccccttcttggcttcgcccaccagtgaccgtgagatcatagcacctaagataaaggagcgaacccacaatgtcactgagaaggtcacccaggtcctgtccctgggcgccgacgtgctgcctgagtacaagctgcaggcaccgcgcatccaccgctggaccatcctgcattacagccccttcaaggccgtgtgggactggctcatcctgctgctggtcatctacacggctgtcttcacaccctactcggctgccttcctgctgaaggagacggaagaaggcccgcctgctaccgagtgtggctacgcctgccagccgctggctgtggtggacctcatcgtggacatcatgttcattgtggacatcctcatcaacttccgcaccacctacgtcaatgccaacgaggaggtggtcagccaccccggccgcatcgccgtccactacttcaagggctggttcctcatcgacatggtggccgccatccccttcgacctgctcatcttcggctctggctctgaggagctgatcgggctgctgaagactgcgcggctgctgcggctggtgcgcgtggcgcggaagctggatcgctactcagagtacggcgcggccgtgctgttcttgctcatgtgcacctttgcgctcatcgcgcactggctagcctgcatctggtacgccatcgtcaacatggagcagccacacatggactcacgcatcggctggctgcacaacctgggcgaccagataggcaaaccctacaacagcagcggcctgggcggcccctccatcaaggacaagtatgtgacggcgctctacttcaccttcagcagcctcaccagtgtgggcttcggcaacgtctctcccaacaccaactcagagaagatcttctccatctgcgtcatgctcattggctccctcatgtatgctagcatcttcggcaacgtgtcggccatcatccagcggctgtactcgggcacagcccgctaccacacacagatgctgcgggtgcgggagttcatccgcttccaccagatccccaatcccctgcgccagcgcctcgaggagtacttccagcacgcctggtcctacaccaacggcatcgacatgaacgcggtgctgaagggcttccctgagtgcctgcaggctgacatctgcctgcacctgaaccgctcactgctgcagcactgcaaacccttccgaggggccaccaagggctgccttcgggccctggccatgaagttcaagaccacacatgcaccgccaggggacacactggtgcatgctggggacctgctcaccgccctgtacttcatctcccggggctccatcgagatcctgcggggcgacgtcgtcgtggccatcctggggaagaatgacatctttggggagcctctgaacctgtatgcaaggcctggcaagtcgaacggggatgtgcgggccctcacctactgtgacctacacaagatccatcgggacgacctgctggaggtgctggacatgtaccctgagttctccgaccacttctggtccagcctggagatcaccttcaacctgcgagataccaacatgatcccgggctcccccggcagtacggagttagagggtggcttcagtcggcaacgcaagcgcaagttgtccttccgcaggcgcacggacaaggacacggagcagccaggggaggtgtcggccttggggccgggccgggcgggggcagggccgagtagccggggccggccgggggggccgtggggggagagcccgtccagtggcccctccagccctgagagcagtgaggatgagggcccaggccgcagctccagccccctccgcctggtgcccttctccagccccaggccccccggagagccgccgggtggggagcccctgatggaggactgcgagaagagcagcgacacttgcaaccccctgtcaggcgccttctcaggagtgtccaacattttcagcttctggggggacagtcggggccgccagtaccaggagctccctcgatgccccgcccccacccccagcctcctcaacatccccctctccagcccgggtcggcggccccggggcgacgtggagagcaggctggatgccctccagcgccagctcaacaggctggagacccggctgagtgcagacatggccactgtcctgcagctgctacagaggcagatgacgctggtcccgcccgcctacagtgctgtgaccaccccggggcctggccccacttccacatccccgctgttgcccgtcagccccctccccaccctcaccttggactcgctttctcaggtttcccagttcatggcgtgtgaggagctgcccccgggggccccagagcttccccaagaaggccccacacgacgcctctccctaccgggccagctgggggccctcacctcccagcccctgcacagacacggctcggacccgggcagttagtggggctgcccagtgtggacacgtggctcacccagggatcaaggcgctgctgggccgctccccttggaggccctgctcaggaggccctgaccgtggaaggggagaggaactcgaaagcacagctcctcccccagcccttgggaccatcttctcctgcagtcccctgggccccagtgagaggggcaggggcagggccggcagtaggtggggcctgtggtccccccactgccctgagggcattagctggtctaactgcccggaggcacccggccctgggccttaggcacctcaaggacttttctgctatttactgctcttattgttaaggataataattaaggatcatatgaataattaatgaagatgctgatgactatgaataataaataattatcctgaggaga

SEQ ID NO: 227 - DNA, 3884 bp, Homo sapiens
  source 1..3884: mol_type = genomic DNA
  misc_feature 1..3884: note = cDNA of KCNH2 gene SNP c.1720A>G (p.Met574Val)
atgccggtgcggaggggccacgtcgcgccgcagaacaccttcctggacaccatcatccgcaagtttgagggccagagccgtaagttcatcatcgccaacgctcgggtggagaactgcgccgtcatctactgcaacgacggcttctgcgagctgtgcggctactcgcgggccgaggtgatgcagcgaccctgcacctgcgacttcctgcacgggccgcgcacgcagcgccgcgctgccgcgcagatcgcgcaggcactgctgggcgccgaggagcgcaaagtggaaatcgccttctaccggaaagatgggagctgcttcctatgtctggtggatgtggtgcccgtgaagaacgaggatggggctgtcatcatgttcatcctcaatttcgaggtggtgatggagaaggacatggtggggtccccggctcatgacaccaaccaccggggcccccccaccagctggctggccccaggccgcgccaagaccttccgcctgaagctgcccgcgctgctggcgctgacggcccgggagtcgtcggtgcggtcgggcggcgcgggcggcgcgggcgccccgggggccgtggtggtggacgtggacctgacgcccgcggcacccagcagcgagtcgctggccctggacgaagtgacagccatggacaaccacgtggcagggctcgggcccgcggaggagcggcgtgcgctggtgggtcccggctctccgccccgcagcgcgcccggccagctcccatcgccccgggcgcacagcctcaaccccgacgcctcgggctccagctgcagcctggcccggacgcgctcccgagaaagctgcgccagcgtgcgccgcgcctcgtcggccgacgacatcgaggccatgcgcgccggggtgctgcccccgccaccgcgccacgccagcaccggggccatgcacccactgcgcagcggcttgctcaactccacctcggactccgacctcgtgcgctaccgcaccattagcaagattccccaaatcaccctcaactttgtggacctcaagggcgaccccttcttggcttcgcccaccagtgaccgtgagatcatagcacctaagataaaggagcgaacccacaatgtcactgagaaggtcacccaggtcctgtccctgggcgccgacgtgctgcctgagtacaagctgcaggcaccgcgcatccaccgctggaccatcctgcattacagccccttcaaggccgtgtgggactggctcatcctgctgctggtcatctacacggctgtcttcacaccctactcggctgccttcctgctgaaggagacggaagaaggcccgcctgctaccgagtgtggctacgcctgccagccgctggctgtggtggacctcatcgtggacatcatgttcattgtggacatcctcatcaacttccgcaccacctacgtcaatgccaacgaggaggtggtcagccaccccggccgcatcgccgtccactacttcaagggctggttcctcatcgacatggtggccgccatccccttcgacctgctcatcttcggctctggctctgaggagctgatcgggctgctgaagactgcgcggctgctgcggctggtgcgcgtggcgcggaagctggatcgctactcagagtacggcgcggccgtgctgttcttgctcatgtgcacctttgcgctcatcgcgcactggctagcctgcatctggtacgccatcggcaacgtggagcagccacacatggactcacgcatcggctggctgcacaacctgggcgaccagataggcaaaccctacaacagcagcggcctgggcggcccctccatcaaggacaagtatgtgacggcgctctacttcaccttcagcagcctcaccagtgtgggcttcggcaacgtctctcccaacaccaactcagagaagatcttctccatctgcgtcatgctcattggctccctcatgtatgctagcatcttcggcaacgtgtcggccatcatccagcggctgtactcgggcacagcccgctaccacacacagatgctgcgggtgcgggagttcatccgcttccaccagatccccaatcccctgcgccagcgcctcgaggagtacttccagcacgcctggtcctacaccaacggcatcgacatgaacgcggtgctgaagggcttccctgagtgcctgcaggctgacatctgcctgcacctgaaccgctcactgctgcagcactgcaaacccttccgaggggccaccaagggctgccttcgggccctggccatgaagttcaagaccacacatgcaccgccaggggacacactggtgcatgctggggacctgctcaccgccctgtacttcatctcccggggctccatcgagatcctgcggggcgacgtcgtcgtggccatcctggggaagaatgacatctttggggagcctctgaacctgtatgcaaggcctggcaagtcgaacggggatgtgcgggccctcacctactgtgacctacacaagatccatcgggacgacctgctggaggtgctggacatgtaccctgagttctccgaccacttctggtccagcctggagatcaccttcaacctgcgagataccaacatgatcccgggctcccccggcagtacggagttagagggtggcttcagtcggcaacgcaagcgcaagttgtccttccgcaggcgcacggacaaggacacggagcagccaggggaggtgtcggccttggggccgggccgggcgggggcagggccgagtagccggggccggccgggggggccgtggggggagagcccgtccagtggcccctccagccctgagagcagtgaggatgagggcccaggccgcagctccagccccctccgcctggtgcccttctccagccccaggccccccggagagccgccgggtggggagcccctgatggaggactgcgagaagagcagcgacacttgcaaccccctgtcaggcgccttctcaggagtgtccaacattttcagcttctggggggacagtcggggccgccagtaccaggagctccctcgatgccccgcccccacccccagcctcctcaacatccccctctccagcccgggtcggcggccccggggcgacgtggagagcaggctggatgccctccagcgccagctcaacaggctggagacccggctgagtgcagacatggccactgtcctgcagctgctacagaggcagatgacgctggtcccgcccgcctacagtgctgtgaccaccccggggcctggccccacttccacatccccgctgttgcccgtcagccccctccccaccctcaccttggactcgctttctcaggtttcccagttcatggcgtgtgaggagctgcccccgggggccccagagcttccccaagaaggccccacacgacgcctctccctaccgggccagctgggggccctcacctcccagcccctgcacagacacggctcggacccgggcagttagtggggctgcccagtgtggacacgtggctcacccagggatcaaggcgctgctgggccgctccccttggaggccctgctcaggaggccctgaccgtggaaggggagaggaactcgaaagcacagctcctcccccagcccttgggaccatcttctcctgcagtcccctgggccccagtgagaggggcaggggcagggccggcagtaggtggggcctgtggtccccccactgccctgagggcattagctggtctaactgcccggaggcacccggccctgggccttaggcacctcaaggacttttctgctatttactgctcttattgttaaggataataattaaggatcatatgaataattaatgaagatgctgatgactatgaataataaataattatcctgaggaga

SEQ ID NO: 228 - DNA, 3884 bp, Homo sapiens
  source 1..3884: mol_type = genomic DNA
  misc_feature 1..3884: note = cDNA of KCNH2 gene SNP c.1724A>G (p.Glu575Gly)
atgccggtgcggaggggccacgtcgcgccgcagaacaccttcctggacaccatcatccgcaagtttgagggccagagccgtaagttcatcatcgccaacgctcgggtggagaactgcgccgtcatctactgcaacgacggcttctgcgagctgtgcggctactcgcgggccgaggtgatgcagcgaccctgcacctgcgacttcctgcacgggccgcgcacgcagcgccgcgctgccgcgcagatcgcgcaggcactgctgggcgccgaggagcgcaaagtggaaatcgccttctaccggaaagatgggagctgcttcctatgtctggtggatgtggtgcccgtgaagaacgaggatggggctgtcatcatgttcatcctcaatttcgaggtggtgatggagaaggacatggtggggtccccggctcatgacaccaaccaccggggcccccccaccagctggctggccccaggccgcgccaagaccttccgcctgaagctgcccgcgctgctggcgctgacggcccgggagtcgtcggtgcggtcgggcggcgcgggcggcgcgggcgccccgggggccgtggtggtggacgtggacctgacgcccgcggcacccagcagcgagtcgctggccctggacgaagtgacagccatggacaaccacgtggcagggctcgggcccgcggaggagcggcgtgcgctggtgggtcccggctctccgccccgcagcgcgcccggccagctcccatcgccccgggcgcacagcctcaaccccgacgcctcgggctccagctgcagcctggcccggacgcgctcccgagaaagctgcgccagcgtgcgccgcgcctcgtcggccgacgacatcgaggccatgcgcgccggggtgctgcccccgccaccgcgccacgccagcaccggggccatgcacccactgcgcagcggcttgctcaactccacctcggactccgacctcgtgcgctaccgcaccattagcaagattccccaaatcaccctcaactttgtggacctcaagggcgaccccttcttggcttcgcccaccagtgaccgtgagatcatagcacctaagataaaggagcgaacccacaatgtcactgagaaggtcacccaggtcctgtccctgggcgccgacgtgctgcctgagtacaagctgcaggcaccgcgcatccaccgctggaccatcctgcattacagccccttcaaggccgtgtgggactggctcatcctgctgctggtcatctacacggctgtcttcacaccctactcggctgccttcctgctgaaggagacggaagaaggcccgcctgctaccgagtgtggctacgcctgccagccgctggctgtggtggacctcatcgtggacatcatgttcattgtggacatcctcatcaacttccgcaccacctacgtcaatgccaacgaggaggtggtcagccaccccggccgcatcgccgtccactacttcaagggctggttcctcatcgacatggtggccgccatccccttcgacctgctcatcttcggctctggctctgaggagctgatcgggctgctgaagactgcgcggctgctgcggctggtgcgcgtggcgcggaagctggatcgctactcagagtacggcgcggccgtgctgttcttgctcatgtgcacctttgcgctcatcgcgcactggctagcctgcatctggtacgccatcggcaacatggggcagccacacatggactcacgcatcggctggctgcacaacctgggcgaccagataggcaaaccctacaacagcagcggcctgggcggcccctccatcaaggacaagtatgtgacggcgctctacttcaccttcagcagcctcaccagtgtgggcttcggcaacgtctctcccaacaccaactcagagaagatcttctccatctgcgtcatgctcattggctccctcatgtatgctagcatcttcggcaacgtgtcggccatcatccagcggctgtactcgggcacagcccgctaccacacacagatgctgcgggtgcgggagttcatccgcttccaccagatccccaatcccctgcgccagcgcctcgaggagtacttccagcacgcctggtcctacaccaacggcatcgacatgaacgcggtgctgaagggcttccctgagtgcctgcaggctgacatctgcctgcacctgaaccgctcactgctgcagcactgcaaacccttccgaggggccaccaagggctgccttcgggccctggccatgaagttcaagaccacacatgcaccgccaggggacacactggtgcatgctggggacctgctcaccgccctgtacttcatctcccggggctccatcgagatcctgcggggcgacgtcgtcgtggccatcctggggaagaatgacatctttggggagcctctgaacctgtatgcaaggcctggcaagtcgaacggggatgtgcgggccctcacctactgtgacctacacaagatccatcgggacgacctgctggaggtgctggacatgtaccctgagttctccgaccacttctggtccagcctggagatcaccttcaacctgcgagataccaacatgatcccgggctcccccggcagtacggagttagagggtggcttcagtcggcaacgcaagcgcaagttgtccttccgcaggcgcacggacaaggacacggagcagccaggggaggtgtcggccttggggccgggccgggcgggggcagggccgagtagccggggccggccgggggggccgtggggggagagcccgtccagtggcccctccagccctgagagcagtgaggatgagggcccaggccgcagctccagccccctccgcctggtgcccttctccagccccaggccccccggagagccgccgggtggggagcccctgatggaggactgcgagaagagcagcgacacttgcaaccccctgtcaggcgccttctcaggagtgtccaacattttcagcttctggggggacagtcggggccgccagtaccaggagctccctcgatgccccgcccccacccccagcctcctcaacatccccctctccagcccgggtcggcggccccggggcgacgtggagagcaggctggatgccctccagcgccagctcaacaggctggagacccggctgagtgcagacatggccactgtcctgcagctgctacagaggcagatgacgctggtcccgcccgcctacagtgctgtgaccaccccggggcctggccccacttccacatccccgctgttgcccgtcagccccctccccaccctcaccttggactcgctttctcaggtttcccagttcatggcgtgtgaggagctgcccccgggggccccagagcttccccaagaaggccccacacgacgcctctccctaccgggccagctgggggccctcacctcccagcccctgcacagacacggctcggacccgggcagttagtggggctgcccagtgtggacacgtggctcacccagggatcaaggcgctgctgggccgctccccttggaggccctgctcaggaggccctgaccgtggaaggggagaggaactcgaaagcacagctcctcccccagcccttgggaccatcttctcctgcagtcccctgggccccagtgagaggggcaggggcagggccggcagtaggtggggcctgtggtccccccactgccctgagggcattagctggtctaactgcccggaggcacccggccctgggccttaggcacctcaaggacttttctgctatttactgctcttattgttaaggataataattaaggatcatatgaataattaatgaagatgctgatgactatgaataataaataattatcctgaggaga

SEQ ID NO: 229 - DNA, 3884 bp, Homo sapiens
  source 1..3884: mol_type = genomic DNA
  misc_feature 1..3884: note = cDNA of KCNH2 gene SNP c.1726C>T (p.Gln576Ter)
atgccggtgcggaggggccacgtcgcgccgcagaacaccttcctggacaccatcatccgcaagtttgagggccagagccgtaagttcatcatcgccaacgctcgggtggagaactgcgccgtcatctactgcaacgacggcttctgcgagctgtgcggctactcgcgggccgaggtgatgcagcgaccctgcacctgcgacttcctgcacgggccgcgcacgcagcgccgcgctgccgcgcagatcgcgcaggcactgctgggcgccgaggagcgcaaagtggaaatcgccttctaccggaaagatgggagctgcttcctatgtctggtggatgtggtgcccgtgaagaacgaggatggggctgtcatcatgttcatcctcaatttcgaggtggtgatggagaaggacatggtggggtccccggctcatgacaccaaccaccggggcccccccaccagctggctggccccaggccgcgccaagaccttccgcctgaagctgcccgcgctgctggcgctgacggcccgggagtcgtcggtgcggtcgggcggcgcgggcggcgcgggcgccccgggggccgtggtggtggacgtggacctgacgcccgcggcacccagcagcgagtcgctggccctggacgaagtgacagccatggacaaccacgtggcagggctcgggcccgcggaggagcggcgtgcgctggtgggtcccggctctccgccccgcagcgcgcccggccagctcccatcgccccgggcgcacagcctcaaccccgacgcctcgggctccagctgcagcctggcccggacgcgctcccgagaaagctgcgccagcgtgcgccgcgcctcgtcggccgacgacatcgaggccatgcgcgccggggtgctgcccccgccaccgcgccacgccagcaccggggccatgcacccactgcgcagcggcttgctcaactccacctcggactccgacctcgtgcgctaccgcaccattagcaagattccccaaatcaccctcaactttgtggacctcaagggcgaccccttcttggcttcgcccaccagtgaccgtgagatcatagcacctaagataaaggagcgaacccacaatgtcactgagaaggtcacccaggtcctgtccctgggcgccgacgtgctgcctgagtacaagctgcaggcaccgcgcatccaccgctggaccatcctgcattacagccccttcaaggccgtgtgggactggctcatcctgctgctggtcatctacacggctgtcttcacaccctactcggctgccttcctgctgaaggagacggaagaaggcccgcctgctaccgagtgtggctacgcctgccagccgctggctgtggtggacctcatcgtggacatcatgttcattgtggacatcctcatcaacttccgcaccacctacgtcaatgccaacgaggaggtggtcagccaccccggccgcatcgccgtccactacttcaagggctggttcctcatcgacatggtggccgccatccccttcgacctgctcatcttcggctctggctctgaggagctgatcgggctgctgaagactgcgcggctgctgcggctggtgcgcgtggcgcggaagctggatcgctactcagagtacggcgcggccgtgctgttcttgctcatgtgcacctttgcgctcatcgcgcactggctagcctgcatctggtacgccatcggcaacatggagtagccacacatggactcacgcatcggctggctgcacaacctgggcgaccagataggcaaaccctacaacagcagcggcctgggcggcccctccatcaaggacaagtatgtgacggcgctctacttcaccttcagcagcctcaccagtgtgggcttcggcaacgtctctcccaacaccaactcagagaagatcttctccatctgcgtcatgctcattggctccctcatgtatgctagcatcttcggcaacgtgtcggccatcatccagcggctgtactcgggcacagcccgctaccacacacagatgctgcgggtgcgggagttcatccgcttccaccagatccccaatcccctgcgccagcgcctcgaggagtacttccagcacgcctggtcctacaccaacggcatcgacatgaacgcggtgctgaagggcttccctgagtgcctgcaggctgacatctgcctgcacctgaaccgctcactgctgcagcactgcaaacccttccgaggggccaccaagggctgccttcgggccctggccatgaagttcaagaccacacatgcaccgccaggggacacactggtgcatgctggggacctgctcaccgccctgtacttcatctcccggggctccatcgagatcctgcggggcgacgtcgtcgtggccatcctggggaagaatgacatctttggggagcctctgaacctgtatgcaaggcctggcaagtcgaacggggatgtgcgggccctcacctactgtgacctacacaagatccatcgggacgacctgctggaggtgctggacatgtaccctgagttctccgaccacttctggtccagcctggagatcaccttcaacctgcgagataccaacatgatcccgggctcccccggcagtacggagttagagggtggcttcagtcggcaacgcaagcgcaagttgtccttccgcaggcgcacggacaaggacacggagcagccaggggaggtgtcggccttggggccgggccgggcgggggcagggccgagtagccggggccggccgggggggccgtggggggagagcccgtccagtggcccctccagccctgagagcagtgaggatgagggcccaggccgcagctccagccccctccgcctggtgcccttctccagccccaggccccccggagagccgccgggtggggagcccctgatggaggactgcgagaagagcagcgacacttgcaaccccctgtcaggcgccttctcaggagtgtccaacattttcagcttctggggggacagtcggggccgccagtaccaggagctccctcgatgccccgcccccacccccagcctcctcaacatccccctctccagcccgggtcggcggccccggggcgacgtggagagcaggctggatgccctccagcgccagctcaacaggctggagacccggctgagtgcagacatggccactgtcctgcagctgctacagaggcagatgacgctggtcccgcccgcctacagtgctgtgaccaccccggggcctggccccacttccacatccccgctgttgcccgtcagccccctccccaccctcaccttggactcgctttctcaggtttcccagttcatggcgtgtgaggagctgcccccgggggccccagagcttccccaagaaggccccacacgacgcctctccctaccgggccagctgggggccctcacctcccagcccctgcacagacacggctcggacccgggcagttagtggggctgcccagtgtggacacgtggctcacccagggatcaaggcgctgctgggccgctccccttggaggccctgctcaggaggccctgaccgtggaaggggagaggaactcgaaagcacagctcctcccccagcccttgggaccatcttctcctgcagtcccctgggccccagtgagaggggcaggggcagggccggcagtaggtggggcctgtggtccccccactgccctgagggcattagctggtctaactgcccggaggcacccggccctgggccttaggcacctcaaggacttttctgctatttactgctcttattgttaaggataataattaaggatcatatgaataattaatgaagatgctgatgactatgaataataaataattatcctgaggaga

SEQ ID NO: 230 - DNA, 3884 bp, Homo sapiens
  source 1..3884: mol_type = genomic DNA
  misc_feature 1..3884: note = cDNA of KCNH2 gene SNP c.172G>A (p.Glu58Lys)
atgccggtgcggaggggccacgtcgcgccgcagaacaccttcctggacaccatcatccgcaagtttgagggccagagccgtaagttcatcatcgccaacgctcgggtggagaactgcgccgtcatctactgcaacgacggcttctgcgagctgtgcggctactcgcgggccaaggtgatgcagcgaccctgcacctgcgacttcctgcacgggccgcgcacgcagcgccgcgctgccgcgcagatcgcgcaggcactgctgggcgccgaggagcgcaaagtggaaatcgccttctaccggaaagatgggagctgcttcctatgtctggtggatgtggtgcccgtgaagaacgaggatggggctgtcatcatgttcatcctcaatttcgaggtggtgatggagaaggacatggtggggtccccggctcatgacaccaaccaccggggcccccccaccagctggctggccccaggccgcgccaagaccttccgcctgaagctgcccgcgctgctggcgctgacggcccgggagtcgtcggtgcggtcgggcggcgcgggcggcgcgggcgccccgggggccgtggtggtggacgtggacctgacgcccgcggcacccagcagcgagtcgctggccctggacgaagtgacagccatggacaaccacgtggcagggctcgggcccgcggaggagcggcgtgcgctggtgggtcccggctctccgccccgcagcgcgcccggccagctcccatcgccccgggcgcacagcctcaaccccgacgcctcgggctccagctgcagcctggcccggacgcgctcccgagaaagctgcgccagcgtgcgccgcgcctcgtcggccgacgacatcgaggccatgcgcgccggggtgctgcccccgccaccgcgccacgccagcaccggggccatgcacccactgcgcagcggcttgctcaactccacctcggactccgacctcgtgcgctaccgcaccattagcaagattccccaaatcaccctcaactttgtggacctcaagggcgaccccttcttggcttcgcccaccagtgaccgtgagatcatagcacctaagataaaggagcgaacccacaatgtcactgagaaggtcacccaggtcctgtccctgggcgccgacgtgctgcctgagtacaagctgcaggcaccgcgcatccaccgctggaccatcctgcattacagccccttcaaggccgtgtgggactggctcatcctgctgctggtcatctacacggctgtcttcacaccctactcggctgccttcctgctgaaggagacggaagaaggcccgcctgctaccgagtgtggctacgcctgccagccgctggctgtggtggacctcatcgtggacatcatgttcattgtggacatcctcatcaacttccgcaccacctacgtcaatgccaacgaggaggtggtcagccaccccggccgcatcgccgtccactacttcaagggctggttcctcatcgacatggtggccgccatccccttcgacctgctcatcttcggctctggctctgaggagctgatcgggctgctgaagactgcgcggctgctgcggctggtgcgcgtggcgcggaagctggatcgctactcagagtacggcgcggccgtgctgttcttgctcatgtgcacctttgcgctcatcgcgcactggctagcctgcatctggtacgccatcggcaacatggagcagccacacatggactcacgcatcggctggctgcacaacctgggcgaccagataggcaaaccctacaacagcagcggcctgggcggcccctccatcaaggacaagtatgtgacggcgctctacttcaccttcagcagcctcaccagtgtgggcttcggcaacgtctctcccaacaccaactcagagaagatcttctccatctgcgtcatgctcattggctccctcatgtatgctagcatcttcggcaacgtgtcggccatcatccagcggctgtactcgggcacagcccgctaccacacacagatgctgcgggtgcgggagttcatccgcttccaccagatccccaatcccctgcgccagcgcctcgaggagtacttccagcacgcctggtcctacaccaacggcatcgacatgaacgcggtgctgaagggcttccctgagtgcctgcaggctgacatctgcctgcacctgaaccgctcactgctgcagcactgcaaacccttccgaggggccaccaagggctgccttcgggccctggccatgaagttcaagaccacacatgcaccgccaggggacacactggtgcatgctggggacctgctcaccgccctgtacttcatctcccggggctccatcgagatcctgcggggcgacgtcgtcgtggccatcctggggaagaatgacatctttggggagcctctgaacctgtatgcaaggcctggcaagtcgaacggggatgtgcgggccctcacctactgtgacctacacaagatccatcgggacgacctgctggaggtgctggacatgtaccctgagttctccgaccacttctggtccagcctggagatcaccttcaacctgcgagataccaacatgatcccgggctcccccggcagtacggagttagagggtggcttcagtcggcaacgcaagcgcaagttgtccttccgcaggcgcacggacaaggacacggagcagccaggggaggtgtcggccttggggccgggccgggcgggggcagggccgagtagccggggccggccgggggggccgtggggggagagcccgtccagtggcccctccagccctgagagcagtgaggatgagggcccaggccgcagctccagccccctccgcctggtgcccttctccagccccaggccccccggagagccgccgggtggggagcccctgatggaggactgcgagaagagcagcgacacttgcaaccccctgtcaggcgccttctcaggagtgtccaacattttcagcttctggggggacagtcggggccgccagtaccaggagctccctcgatgccccgcccccacccccagcctcctcaacatccccctctccagcccgggtcggcggccccggggcgacgtggagagcaggctggatgccctccagcgccagctcaacaggctggagacccggctgagtgcagacatggccactgtcctgcagctgctacagaggcagatgacgctggtcccgcccgcctacagtgctgtgaccaccccggggcctggccccacttccacatccccgctgttgcccgtcagccccctccccaccctcaccttggactcgctttctcaggtttcccagttcatggcgtgtgaggagctgcccccgggggccccagagcttccccaagaaggccccacacgacgcctctccctaccgggccagctgggggccctcacctcccagcccctgcacagacacggctcggacccgggcagttagtggggctgcccagtgtggacacgtggctcacccagggatcaaggcgctgctgggccgctccccttggaggccctgctcaggaggccctgaccgtggaaggggagaggaactcgaaagcacagctcctcccccagcccttgggaccatcttctcctgcagtcccctgggccccagtgagaggggcaggggcagggccggcagtaggtggggcctgtggtccccccactgccctgagggcattagctggtctaactgcccggaggcacccggccctgggccttaggcacctcaaggacttttctgctatttactgctcttattgttaaggataataattaaggatcatatgaataattaatgaagatgctgatgactatgaataataaataattatcctgaggaga

SEQ ID NO: 231 - DNA, 3884 bp, Homo sapiens
  source 1..3884: mol_type = genomic DNA
  misc_feature 1..3884: note = cDNA of KCNH2 gene SNP c.1730C>A (p.Pro577Gln)
atgccggtgcggaggggccacgtcgcgccgcagaacaccttcctggacaccatcatccgcaagtttgagggccagagccgtaagttcatcatcgccaacgctcgggtggagaactgcgccgtcatctactgcaacgacggcttctgcgagctgtgcggctactcgcgggccgaggtgatgcagcgaccctgcacctgcgacttcctgcacgggccgcgcacgcagcgccgcgctgccgcgcagatcgcgcaggcactgctgggcgccgaggagcgcaaagtggaaatcgccttctaccggaaagatgggagctgcttcctatgtctggtggatgtggtgcccgtgaagaacgaggatggggctgtcatcatgttcatcctcaatttcgaggtggtgatggagaaggacatggtggggtccccggctcatgacaccaaccaccggggcccccccaccagctggctggccccaggccgcgccaagaccttccgcctgaagctgcccgcgctgctggcgctgacggcccgggagtcgtcggtgcggtcgggcggcgcgggcggcgcgggcgccccgggggccgtggtggtggacgtggacctgacgcccgcggcacccagcagcgagtcgctggccctggacgaagtgacagccatggacaaccacgtggcagggctcgggcccgcggaggagcggcgtgcgctggtgggtcccggctctccgccccgcagcgcgcccggccagctcccatcgccccgggcgcacagcctcaaccccgacgcctcgggctccagctgcagcctggcccggacgcgctcccgagaaagctgcgccagcgtgcgccgcgcctcgtcggccgacgacatcgaggccatgcgcgccggggtgctgcccccgccaccgcgccacgccagcaccggggccatgcacccactgcgcagcggcttgctcaactccacctcggactccgacctcgtgcgctaccgcaccattagcaagattccccaaatcaccctcaactttgtggacctcaagggcgaccccttcttggcttcgcccaccagtgaccgtgagatcatagcacctaagataaaggagcgaacccacaatgtcactgagaaggtcacccaggtcctgtccctgggcgccgacgtgctgcctgagtacaagctgcaggcaccgcgcatccaccgctggaccatcctgcattacagccccttcaaggccgtgtgggactggctcatcctgctgctggtcatctacacggctgtcttcacaccctactcggctgccttcctgctgaaggagacggaagaaggcccgcctgctaccgagtgtggctacgcctgccagccgctggctgtggtggacctcatcgtggacatcatgttcattgtggacatcctcatcaacttccgcaccacctacgtcaatgccaacgaggaggtggtcagccaccccggccgcatcgccgtccactacttcaagggctggttcctcatcgacatggtggccgccatccccttcgacctgctcatcttcggctctggctctgaggagctgatcgggctgctgaagactgcgcggctgctgcggctggtgcgcgtggcgcggaagctggatcgctactcagagtacggcgcggccgtgctgttcttgctcatgtgcacctttgcgctcatcgcgcactggctagcctgcatctggtacgccatcggcaacatggagcagcaacacatggactcacgcatcggctggctgcacaacctgggcgaccagataggcaaaccctacaacagcagcggcctgggcggcccctccatcaaggacaagtatgtgacggcgctctacttcaccttcagcagcctcaccagtgtgggcttcggcaacgtctctcccaacaccaactcagagaagatcttctccatctgcgtcatgctcattggctccctcatgtatgctagcatcttcggcaacgtgtcggccatcatccagcggctgtactcgggcacagcccgctaccacacacagatgctgcgggtgcgggagttcatccgcttccaccagatccccaatcccctgcgccagcgcctcgaggagtacttccagcacgcctggtcctacaccaacggcatcgacatgaacgcggtgctgaagggcttccctgagtgcctgcaggctgacatctgcctgcacctgaaccgctcactgctgcagcactgcaaacccttccgaggggccaccaagggctgccttcgggccctggccatgaagttcaagaccacacatgcaccgccaggggacacactggtgcatgctggggacctgctcaccgccctgtacttcatctcccggggctccatcgagatcctgcggggcgacgtcgtcgtggccatcctggggaagaatgacatctttggggagcctctgaacctgtatgcaaggcctggcaagtcgaacggggatgtgcgggccctcacctactgtgacctacacaagatccatcgggacgacctgctggaggtgctggacatgtaccctgagttctccgaccacttctggtccagcctggagatcaccttcaacctgcgagataccaacatgatcccgggctcccccggcagtacggagttagagggtggcttcagtcggcaacgcaagcgcaagttgtccttccgcaggcgcacggacaaggacacggagcagccaggggaggtgtcggccttggggccgggccgggcgggggcagggccgagtagccggggccggccgggggggccgtggggggagagcccgtccagtggcccctccagccctgagagcagtgaggatgagggcccaggccgcagctccagccccctccgcctggtgcccttctccagccccaggccccccggagagccgccgggtggggagcccctgatggaggactgcgagaagagcagcgacacttgcaaccccctgtcaggcgccttctcaggagtgtccaacattttcagcttctggggggacagtcggggccgccagtaccaggagctccctcgatgccccgcccccacccccagcctcctcaacatccccctctccagcccgggtcggcggccccggggcgacgtggagagcaggctggatgccctccagcgccagctcaacaggctggagacccggctgagtgcagacatggccactgtcctgcagctgctacagaggcagatgacgctggtcccgcccgcctacagtgctgtgaccaccccggggcctggccccacttccacatccccgctgttgcccgtcagccccctccccaccctcaccttggactcgctttctcaggtttcccagttcatggcgtgtgaggagctgcccccgggggccccagagcttccccaagaaggccccacacgacgcctctccctaccgggccagctgggggccctcacctcccagcccctgcacagacacggctcggacccgggcagttagtggggctgcccagtgtggacacgtggctcacccagggatcaaggcgctgctgggccgctccccttggaggccctgctcaggaggccctgaccgtggaaggggagaggaactcgaaagcacagctcctcccccagcccttgggaccatcttctcctgcagtcccctgggccccagtgagaggggcaggggcagggccggcagtaggtggggcctgtggtccccccactgccctgagggcattagctggtctaactgcccggaggcacccggccctgggccttaggcacctcaaggacttttctgctatttactgctcttattgttaaggataataattaaggatcatatgaataattaatgaagatgctgatgactatgaataataaataattatcctgaggaga

SEQ ID NO: 232 - DNA, 3884 bp, Homo sapiens
  source 1..3884: mol_type = genomic DNA
  misc_feature 1..3884: note = cDNA of KCNH2 gene SNP c.1733A>C (p.His578Pro)
atgccggtgcggaggggccacgtcgcgccgcagaacaccttcctggacaccatcatccgcaagtttgagggccagagccgtaagttcatcatcgccaacgctcgggtggagaactgcgccgtcatctactgcaacgacggcttctgcgagctgtgcggctactcgcgggccgaggtgatgcagcgaccctgcacctgcgacttcctgcacgggccgcgcacgcagcgccgcgctgccgcgcagatcgcgcaggcactgctgggcgccgaggagcgcaaagtggaaatcgccttctaccggaaagatgggagctgcttcctatgtctggtggatgtggtgcccgtgaagaacgaggatggggctgtcatcatgttcatcctcaatttcgaggtggtgatggagaaggacatggtggggtccccggctcatgacaccaaccaccggggcccccccaccagctggctggccccaggccgcgccaagaccttccgcctgaagctgcccgcgctgctggcgctgacggcccgggagtcgtcggtgcggtcgggcggcgcgggcggcgcgggcgccccgggggccgtggtggtggacgtggacctgacgcccgcggcacccagcagcgagtcgctggccctggacgaagtgacagccatggacaaccacgtggcagggctcgggcccgcggaggagcggcgtgcgctggtgggtcccggctctccgccccgcagcgcgcccggccagctcccatcgccccgggcgcacagcctcaaccccgacgcctcgggctccagctgcagcctggcccggacgcgctcccgagaaagctgcgccagcgtgcgccgcgcctcgtcggccgacgacatcgaggccatgcgcgccggggtgctgcccccgccaccgcgccacgccagcaccggggccatgcacccactgcgcagcggcttgctcaactccacctcggactccgacctcgtgcgctaccgcaccattagcaagattccccaaatcaccctcaactttgtggacctcaagggcgaccccttcttggcttcgcccaccagtgaccgtgagatcatagcacctaagataaaggagcgaacccacaatgtcactgagaaggtcacccaggtcctgtccctgggcgccgacgtgctgcctgagtacaagctgcaggcaccgcgcatccaccgctggaccatcctgcattacagccccttcaaggccgtgtgggactggctcatcctgctgctggtcatctacacggctgtcttcacaccctactcggctgccttcctgctgaaggagacggaagaaggcccgcctgctaccgagtgtggctacgcctgccagccgctggctgtggtggacctcatcgtggacatcatgttcattgtggacatcctcatcaacttccgcaccacctacgtcaatgccaacgaggaggtggtcagccaccccggccgcatcgccgtccactacttcaagggctggttcctcatcgacatggtggccgccatccccttcgacctgctcatcttcggctctggctctgaggagctgatcgggctgctgaagactgcgcggctgctgcggctggtgcgcgtggcgcggaagctggatcgctactcagagtacggcgcggccgtgctgttcttgctcatgtgcacctttgcgctcatcgcgcactggctagcctgcatctggtacgccatcggcaacatggagcagccacccatggactcacgcatcggctggctgcacaacctgggcgaccagataggcaaaccctacaacagcagcggcctgggcggcccctccatcaaggacaagtatgtgacggcgctctacttcaccttcagcagcctcaccagtgtgggcttcggcaacgtctctcccaacaccaactcagagaagatcttctccatctgcgtcatgctcattggctccctcatgtatgctagcatcttcggcaacgtgtcggccatcatccagcggctgtactcgggcacagcccgctaccacacacagatgctgcgggtgcgggagttcatccgcttccaccagatccccaatcccctgcgccagcgcctcgaggagtacttccagcacgcctggtcctacaccaacggcatcgacatgaacgcggtgctgaagggcttccctgagtgcctgcaggctgacatctgcctgcacctgaaccgctcactgctgcagcactgcaaacccttccgaggggccaccaagggctgccttcgggccctggccatgaagttcaagaccacacatgcaccgccaggggacacactggtgcatgctggggacctgctcaccgccctgtacttcatctcccggggctccatcgagatcctgcggggcgacgtcgtcgtggccatcctggggaagaatgacatctttggggagcctctgaacctgtatgcaaggcctggcaagtcgaacggggatgtgcgggccctcacctactgtgacctacacaagatccatcgggacgacctgctggaggtgctggacatgtaccctgagttctccgaccacttctggtccagcctggagatcaccttcaacctgcgagataccaacatgatcccgggctcccccggcagtacggagttagagggtggcttcagtcggcaacgcaagcgcaagttgtccttccgcaggcgcacggacaaggacacggagcagccaggggaggtgtcggccttggggccgggccgggcgggggcagggccgagtagccggggccggccgggggggccgtggggggagagcccgtccagtggcccctccagccctgagagcagtgaggatgagggcccaggccgcagctccagccccctccgcctggtgcccttctccagccccaggccccccggagagccgccgggtggggagcccctgatggaggactgcgagaagagcagcgacacttgcaaccccctgtcaggcgccttctcaggagtgtccaacattttcagcttctggggggacagtcggggccgccagtaccaggagctccctcgatgccccgcccccacccccagcctcctcaacatccccctctccagcccgggtcggcggccccggggcgacgtggagagcaggctggatgccctccagcgccagctcaacaggctggagacccggctgagtgcagacatggccactgtcctgcagctgctacagaggcagatgacgctggtcccgcccgcctacagtgctgtgaccaccccggggcctggccccacttccacatccccgctgttgcccgtcagccccctccccaccctcaccttggactcgctttctcaggtttcccagttcatggcgtgtgaggagctgcccccgggggccccagagcttccccaagaaggccccacacgacgcctctccctaccgggccagctgggggccctcacctcccagcccctgcacagacacggctcggacccgggcagttagtggggctgcccagtgtggacacgtggctcacccagggatcaaggcgctgctgggccgctccccttggaggccctgctcaggaggccctgaccgtggaaggggagaggaactcgaaagcacagctcctcccccagcccttgggaccatcttctcctgcagtcccctgggccccagtgagaggggcaggggcagggccggcagtaggtggggcctgtggtccccccactgccctgagggcattagctggtctaactgcccggaggcacccggccctgggccttaggcacctcaaggacttttctgctatttactgctcttattgttaaggataataattaaggatcatatgaataattaatgaagatgctgatgactatgaataataaataattatcctgaggaga

SEQ ID NO: 233 - DNA, 3884 bp, Homo sapiens
  source 1..3884: mol_type = genomic DNA
  misc_feature 1..3884: note = cDNA of KCNH2 gene SNP c.1736T>C (p.Met579Thr)
atgccggtgcggaggggccacgtcgcgccgcagaacaccttcctggacaccatcatccgcaagtttgagggccagagccgtaagttcatcatcgccaacgctcgggtggagaactgcgccgtcatctactgcaacgacggcttctgcgagctgtgcggctactcgcgggccgaggtgatgcagcgaccctgcacctgcgacttcctgcacgggccgcgcacgcagcgccgcgctgccgcgcagatcgcgcaggcactgctgggcgccgaggagcgcaaagtggaaatcgccttctaccggaaagatgggagctgcttcctatgtctggtggatgtggtgcccgtgaagaacgaggatggggctgtcatcatgttcatcctcaatttcgaggtggtgatggagaaggacatggtggggtccccggctcatgacaccaaccaccggggcccccccaccagctggctggccccaggccgcgccaagaccttccgcctgaagctgcccgcgctgctggcgctgacggcccgggagtcgtcggtgcggtcgggcggcgcgggcggcgcgggcgccccgggggccgtggtggtggacgtggacctgacgcccgcggcacccagcagcgagtcgctggccctggacgaagtgacagccatggacaaccacgtggcagggctcgggcccgcggaggagcggcgtgcgctggtgggtcccggctctccgccccgcagcgcgcccggccagctcccatcgccccgggcgcacagcctcaaccccgacgcctcgggctccagctgcagcctggcccggacgcgctcccgagaaagctgcgccagcgtgcgccgcgcctcgtcggccgacgacatcgaggccatgcgcgccggggtgctgcccccgccaccgcgccacgccagcaccggggccatgcacccactgcgcagcggcttgctcaactccacctcggactccgacctcgtgcgctaccgcaccattagcaagattccccaaatcaccctcaactttgtggacctcaagggcgaccccttcttggcttcgcccaccagtgaccgtgagatcatagcacctaagataaaggagcgaacccacaatgtcactgagaaggtcacccaggtcctgtccctgggcgccgacgtgctgcctgagtacaagctgcaggcaccgcgcatccaccgctggaccatcctgcattacagccccttcaaggccgtgtgggactggctcatcctgctgctggtcatctacacggctgtcttcacaccctactcggctgccttcctgctgaaggagacggaagaaggcccgcctgctaccgagtgtggctacgcctgccagccgctggctgtggtggacctcatcgtggacatcatgttcattgtggacatcctcatcaacttccgcaccacctacgtcaatgccaacgaggaggtggtcagccaccccggccgcatcgccgtccactacttcaagggctggttcctcatcgacatggtggccgccatccccttcgacctgctcatcttcggctctggctctgaggagctgatcgggctgctgaagactgcgcggctgctgcggctggtgcgcgtggcgcggaagctggatcgctactcagagtacggcgcggccgtgctgttcttgctcatgtgcacctttgcgctcatcgcgcactggctagcctgcatctggtacgccatcggcaacatggagcagccacacacggactcacgcatcggctggctgcacaacctgggcgaccagataggcaaaccctacaacagcagcggcctgggcggcccctccatcaaggacaagtatgtgacggcgctctacttcaccttcagcagcctcaccagtgtgggcttcggcaacgtctctcccaacaccaactcagagaagatcttctccatctgcgtcatgctcattggctccctcatgtatgctagcatcttcggcaacgtgtcggccatcatccagcggctgtactcgggcacagcccgctaccacacacagatgctgcgggtgcgggagttcatccgcttccaccagatccccaatcccctgcgccagcgcctcgaggagtacttccagcacgcctggtcctacaccaacggcatcgacatgaacgcggtgctgaagggcttccctgagtgcctgcaggctgacatctgcctgcacctgaaccgctcactgctgcagcactgcaaacccttccgaggggccaccaagggctgccttcgggccctggccatgaagttcaagaccacacatgcaccgccaggggacacactggtgcatgctggggacctgctcaccgccctgtacttcatctcccggggctccatcgagatcctgcggggcgacgtcgtcgtggccatcctggggaagaatgacatctttggggagcctctgaacctgtatgcaaggcctggcaagtcgaacggggatgtgcgggccctcacctactgtgacctacacaagatccatcgggacgacctgctggaggtgctggacatgtaccctgagttctccgaccacttctggtccagcctggagatcaccttcaacctgcgagataccaacatgatcccgggctcccccggcagtacggagttagagggtggcttcagtcggcaacgcaagcgcaagttgtccttccgcaggcgcacggacaaggacacggagcagccaggggaggtgtcggccttggggccgggccgggcgggggcagggccgagtagccggggccggccgggggggccgtggggggagagcccgtccagtggcccctccagccctgagagcagtgaggatgagggcccaggccgcagctccagccccctccgcctggtgcccttctccagccccaggccccccggagagccgccgggtggggagcccctgatggaggactgcgagaagagcagcgacacttgcaaccccctgtcaggcgccttctcaggagtgtccaacattttcagcttctggggggacagtcggggccgccagtaccaggagctccctcgatgccccgcccccacccccagcctcctcaacatccccctctccagcccgggtcggcggccccggggcgacgtggagagcaggctggatgccctccagcgccagctcaacaggctggagacccggctgagtgcagacatggccactgtcctgcagctgctacagaggcagatgacgctggtcccgcccgcctacagtgctgtgaccaccccggggcctggccccacttccacatccccgctgttgcccgtcagccccctccccaccctcaccttggactcgctttctcaggtttcccagttcatggcgtgtgaggagctgcccccgggggccccagagcttccccaagaaggccccacacgacgcctctccctaccgggccagctgggggccctcacctcccagcccctgcacagacacggctcggacccgggcagttagtggggctgcccagtgtggacacgtggctcacccagggatcaaggcgctgctgggccgctccccttggaggccctgctcaggaggccctgaccgtggaaggggagaggaactcgaaagcacagctcctcccccagcccttgggaccatcttctcctgcagtcccctgggccccagtgagaggggcaggggcagggccggcagtaggtggggcctgtggtccccccactgccctgagggcattagctggtctaactgcccggaggcacccggccctgggccttaggcacctcaaggacttttctgctatttactgctcttattgttaaggataataattaaggatcatatgaataattaatgaagatgctgatgactatgaataataaataattatcctgaggaga

SEQ ID NO: 234 - DNA, 3884 bp, Homo sapiens
  source 1..3884: mol_type = genomic DNA
  misc_feature 1..3884: note = cDNA of KCNH2 gene SNP c.1738G>C (p.Asp580His)
atgccggtgcggaggggccacgtcgcgccgcagaacaccttcctggacaccatcatccgcaagtttgagggccagagccgtaagttcatcatcgccaacgctcgggtggagaactgcgccgtcatctactgcaacgacggcttctgcgagctgtgcggctactcgcgggccgaggtgatgcagcgaccctgcacctgcgacttcctgcacgggccgcgcacgcagcgccgcgctgccgcgcagatcgcgcaggcactgctgggcgccgaggagcgcaaagtggaaatcgccttctaccggaaagatgggagctgcttcctatgtctggtggatgtggtgcccgtgaagaacgaggatggggctgtcatcatgttcatcctcaatttcgaggtggtgatggagaaggacatggtggggtccccggctcatgacaccaaccaccggggcccccccaccagctggctggccccaggccgcgccaagaccttccgcctgaagctgcccgcgctgctggcgctgacggcccgggagtcgtcggtgcggtcgggcggcgcgggcggcgcgggcgccccgggggccgtggtggtggacgtggacctgacgcccgcggcacccagcagcgagtcgctggccctggacgaagtgacagccatggacaaccacgtggcagggctcgggcccgcggaggagcggcgtgcgctggtgggtcccggctctccgccccgcagcgcgcccggccagctcccatcgccccgggcgcacagcctcaaccccgacgcctcgggctccagctgcagcctggcccggacgcgctcccgagaaagctgcgccagcgtgcgccgcgcctcgtcggccgacgacatcgaggccatgcgcgccggggtgctgcccccgccaccgcgccacgccagcaccggggccatgcacccactgcgcagcggcttgctcaactccacctcggactccgacctcgtgcgctaccgcaccattagcaagattccccaaatcaccctcaactttgtggacctcaagggcgaccccttcttggcttcgcccaccagtgaccgtgagatcatagcacctaagataaaggagcgaacccacaatgtcactgagaaggtcacccaggtcctgtccctgggcgccgacgtgctgcctgagtacaagctgcaggcaccgcgcatccaccgctggaccatcctgcattacagccccttcaaggccgtgtgggactggctcatcctgctgctggtcatctacacggctgtcttcacaccctactcggctgccttcctgctgaaggagacggaagaaggcccgcctgctaccgagtgtggctacgcctgccagccgctggctgtggtggacctcatcgtggacatcatgttcattgtggacatcctcatcaacttccgcaccacctacgtcaatgccaacgaggaggtggtcagccaccccggccgcatcgccgtccactacttcaagggctggttcctcatcgacatggtggccgccatccccttcgacctgctcatcttcggctctggctctgaggagctgatcgggctgctgaagactgcgcggctgctgcggctggtgcgcgtggcgcggaagctggatcgctactcagagtacggcgcggccgtgctgttcttgctcatgtgcacctttgcgctcatcgcgcactggctagcctgcatctggtacgccatcggcaacatggagcagccacacatgcactcacgcatcggctggctgcacaacctgggcgaccagataggcaaaccctacaacagcagcggcctgggcggcccctccatcaaggacaagtatgtgacggcgctctacttcaccttcagcagcctcaccagtgtgggcttcggcaacgtctctcccaacaccaactcagagaagatcttctccatctgcgtcatgctcattggctccctcatgtatgctagcatcttcggcaacgtgtcggccatcatccagcggctgtactcgggcacagcccgctaccacacacagatgctgcgggtgcgggagttcatccgcttccaccagatccccaatcccctgcgccagcgcctcgaggagtacttccagcacgcctggtcctacaccaacggcatcgacatgaacgcggtgctgaagggcttccctgagtgcctgcaggctgacatctgcctgcacctgaaccgctcactgctgcagcactgcaaacccttccgaggggccaccaagggctgccttcgggccctggccatgaagttcaagaccacacatgcaccgccaggggacacactggtgcatgctggggacctgctcaccgccctgtacttcatctcccggggctccatcgagatcctgcggggcgacgtcgtcgtggccatcctggggaagaatgacatctttggggagcctctgaacctgtatgcaaggcctggcaagtcgaacggggatgtgcgggccctcacctactgtgacctacacaagatccatcgggacgacctgctggaggtgctggacatgtaccctgagttctccgaccacttctggtccagcctggagatcaccttcaacctgcgagataccaacatgatcccgggctcccccggcagtacggagttagagggtggcttcagtcggcaacgcaagcgcaagttgtccttccgcaggcgcacggacaaggacacggagcagccaggggaggtgtcggccttggggccgggccgggcgggggcagggccgagtagccggggccggccgggggggccgtggggggagagcccgtccagtggcccctccagccctgagagcagtgaggatgagggcccaggccgcagctccagccccctccgcctggtgcccttctccagccccaggccccccggagagccgccgggtggggagcccctgatggaggactgcgagaagagcagcgacacttgcaaccccctgtcaggcgccttctcaggagtgtccaacattttcagcttctggggggacagtcggggccgccagtaccaggagctccctcgatgccccgcccccacccccagcctcctcaacatccccctctccagcccgggtcggcggccccggggcgacgtggagagcaggctggatgccctccagcgccagctcaacaggctggagacccggctgagtgcagacatggccactgtcctgcagctgctacagaggcagatgacgctggtcccgcccgcctacagtgctgtgaccaccccggggcctggccccacttccacatccccgctgttgcccgtcagccccctccccaccctcaccttggactcgctttctcaggtttcccagttcatggcgtgtgaggagctgcccccgggggccccagagcttccccaagaaggccccacacgacgcctctccctaccgggccagctgggggccctcacctcccagcccctgcacagacacggctcggacccgggcagttagtggggctgcccagtgtggacacgtggctcacccagggatcaaggcgctgctgggccgctccccttggaggccctgctcaggaggccctgaccgtggaaggggagaggaactcgaaagcacagctcctcccccagcccttgggaccatcttctcctgcagtcccctgggccccagtgagaggggcaggggcagggccggcagtaggtggggcctgtggtccccccactgccctgagggcattagctggtctaactgcccggaggcacccggccctgggccttaggcacctcaaggacttttctgctatttactgctcttattgttaaggataataattaaggatcatatgaataattaatgaagatgctgatgactatgaataataaataattatcctgaggaga

SEQ ID NO: 235 - DNA, 3884 bp, Homo sapiens
  source 1..3884: mol_type = genomic DNA
  misc_feature 1..3884: note = cDNA of KCNH2 gene SNP c.173A>C (p.Glu58Ala)
atgccggtgcggaggggccacgtcgcgccgcagaacaccttcctggacaccatcatccgcaagtttgagggccagagccgtaagttcatcatcgccaacgctcgggtggagaactgcgccgtcatctactgcaacgacggcttctgcgagctgtgcggctactcgcgggccgcggtgatgcagcgaccctgcacctgcgacttcctgcacgggccgcgcacgcagcgccgcgctgccgcgcagatcgcgcaggcactgctgggcgccgaggagcgcaaagtggaaatcgccttctaccggaaagatgggagctgcttcctatgtctggtggatgtggtgcccgtgaagaacgaggatggggctgtcatcatgttcatcctcaatttcgaggtggtgatggagaaggacatggtggggtccccggctcatgacaccaaccaccggggcccccccaccagctggctggccccaggccgcgccaagaccttccgcctgaagctgcccgcgctgctggcgctgacggcccgggagtcgtcggtgcggtcgggcggcgcgggcggcgcgggcgccccgggggccgtggtggtggacgtggacctgacgcccgcggcacccagcagcgagtcgctggccctggacgaagtgacagccatggacaaccacgtggcagggctcgggcccgcggaggagcggcgtgcgctggtgggtcccggctctccgccccgcagcgcgcccggccagctcccatcgccccgggcgcacagcctcaaccccgacgcctcgggctccagctgcagcctggcccggacgcgctcccgagaaagctgcgccagcgtgcgccgcgcctcgtcggccgacgacatcgaggccatgcgcgccggggtgctgcccccgccaccgcgccacgccagcaccggggccatgcacccactgcgcagcggcttgctcaactccacctcggactccgacctcgtgcgctaccgcaccattagcaagattccccaaatcaccctcaactttgtggacctcaagggcgaccccttcttggcttcgcccaccagtgaccgtgagatcatagcacctaagataaaggagcgaacccacaatgtcactgagaaggtcacccaggtcctgtccctgggcgccgacgtgctgcctgagtacaagctgcaggcaccgcgcatccaccgctggaccatcctgcattacagccccttcaaggccgtgtgggactggctcatcctgctgctggtcatctacacggctgtcttcacaccctactcggctgccttcctgctgaaggagacggaagaaggcccgcctgctaccgagtgtggctacgcctgccagccgctggctgtggtggacctcatcgtggacatcatgttcattgtggacatcctcatcaacttccgcaccacctacgtcaatgccaacgaggaggtggtcagccaccccggccgcatcgccgtccactacttcaagggctggttcctcatcgacatggtggccgccatccccttcgacctgctcatcttcggctctggctctgaggagctgatcgggctgctgaagactgcgcggctgctgcggctggtgcgcgtggcgcggaagctggatcgctactcagagtacggcgcggccgtgctgttcttgctcatgtgcacctttgcgctcatcgcgcactggctagcctgcatctggtacgccatcggcaacatggagcagccacacatggactcacgcatcggctggctgcacaacctgggcgaccagataggcaaaccctacaacagcagcggcctgggcggcccctccatcaaggacaagtatgtgacggcgctctacttcaccttcagcagcctcaccagtgtgggcttcggcaacgtctctcccaacaccaactcagagaagatcttctccatctgcgtcatgctcattggctccctcatgtatgctagcatcttcggcaacgtgtcggccatcatccagcggctgtactcgggcacagcccgctaccacacacagatgctgcgggtgcgggagttcatccgcttccaccagatccccaatcccctgcgccagcgcctcgaggagtacttccagcacgcctggtcctacaccaacggcatcgacatgaacgcggtgctgaagggcttccctgagtgcctgcaggctgacatctgcctgcacctgaaccgctcactgctgcagcactgcaaacccttccgaggggccaccaagggctgccttcgggccctggccatgaagttcaagaccacacatgcaccgccaggggacacactggtgcatgctggggacctgctcaccgccctgtacttcatctcccggggctccatcgagatcctgcggggcgacgtcgtcgtggccatcctggggaagaatgacatctttggggagcctctgaacctgtatgcaaggcctggcaagtcgaacggggatgtgcgggccctcacctactgtgacctacacaagatccatcgggacgacctgctggaggtgctggacatgtaccctgagttctccgaccacttctggtccagcctggagatcaccttcaacctgcgagataccaacatgatcccgggctcccccggcagtacggagttagagggtggcttcagtcggcaacgcaagcgcaagttgtccttccgcaggcgcacggacaaggacacggagcagccaggggaggtgtcggccttggggccgggccgggcgggggcagggccgagtagccggggccggccgggggggccgtggggggagagcccgtccagtggcccctccagccctgagagcagtgaggatgagggcccaggccgcagctccagccccctccgcctggtgcccttctccagccccaggccccccggagagccgccgggtggggagcccctgatggaggactgcgagaagagcagcgacacttgcaaccccctgtcaggcgccttctcaggagtgtccaacattttcagcttctggggggacagtcggggccgccagtaccaggagctccctcgatgccccgcccccacccccagcctcctcaacatccccctctccagcccgggtcggcggccccggggcgacgtggagagcaggctggatgccctccagcgccagctcaacaggctggagacccggctgagtgcagacatggccactgtcctgcagctgctacagaggcagatgacgctggtcccgcccgcctacagtgctgtgaccaccccggggcctggccccacttccacatccccgctgttgcccgtcagccccctccccaccctcaccttggactcgctttctcaggtttcccagttcatggcgtgtgaggagctgcccccgggggccccagagcttccccaagaaggccccacacgacgcctctccctaccgggccagctgggggccctcacctcccagcccctgcacagacacggctcggacccgggcagttagtggggctgcccagtgtggacacgtggctcacccagggatcaaggcgctgctgggccgctccccttggaggccctgctcaggaggccctgaccgtggaaggggagaggaactcgaaagcacagctcctcccccagcccttgggaccatcttctcctgcagtcccctgggccccagtgagaggggcaggggcagggccggcagtaggtggggcctgtggtccccccactgccctgagggcattagctggtctaactgcccggaggcacccggccctgggccttaggcacctcaaggacttttctgctatttactgctcttattgttaaggataataattaaggatcatatgaataattaatgaagatgctgatgactatgaataataaataattatcctgaggaga

SEQ ID NO: 236 - DNA, 3884 bp, Homo sapiens
  source 1..3884: mol_type = genomic DNA
  misc_feature 1..3884: note = cDNA of KCNH2 gene SNP c.173A>G (p.Glu58Gly)
atgccggtgcggaggggccacgtcgcgccgcagaacaccttcctggacaccatcatccgcaagtttgagggccagagccgtaagttcatcatcgccaacgctcgggtggagaactgcgccgtcatctactgcaacgacggcttctgcgagctgtgcggctactcgcgggccggggtgatgcagcgaccctgcacctgcgacttcctgcacgggccgcgcacgcagcgccgcgctgccgcgcagatcgcgcaggcactgctgggcgccgaggagcgcaaagtggaaatcgccttctaccggaaagatgggagctgcttcctatgtctggtggatgtggtgcccgtgaagaacgaggatggggctgtcatcatgttcatcctcaatttcgaggtggtgatggagaaggacatggtggggtccccggctcatgacaccaaccaccggggcccccccaccagctggctggccccaggccgcgccaagaccttccgcctgaagctgcccgcgctgctggcgctgacggcccgggagtcgtcggtgcggtcgggcggcgcgggcggcgcgggcgccccgggggccgtggtggtggacgtggacctgacgcccgcggcacccagcagcgagtcgctggccctggacgaagtgacagccatggacaaccacgtggcagggctcgggcccgcggaggagcggcgtgcgctggtgggtcccggctctccgccccgcagcgcgcccggccagctcccatcgccccgggcgcacagcctcaaccccgacgcctcgggctccagctgcagcctggcccggacgcgctcccgagaaagctgcgccagcgtgcgccgcgcctcgtcggccgacgacatcgaggccatgcgcgccggggtgctgcccccgccaccgcgccacgccagcaccggggccatgcacccactgcgcagcggcttgctcaactccacctcggactccgacctcgtgcgctaccgcaccattagcaagattccccaaatcaccctcaactttgtggacctcaagggcgaccccttcttggcttcgcccaccagtgaccgtgagatcatagcacctaagataaaggagcgaacccacaatgtcactgagaaggtcacccaggtcctgtccctgggcgccgacgtgctgcctgagtacaagctgcaggcaccgcgcatccaccgctggaccatcctgcattacagccccttcaaggccgtgtgggactggctcatcctgctgctggtcatctacacggctgtcttcacaccctactcggctgccttcctgctgaaggagacggaagaaggcccgcctgctaccgagtgtggctacgcctgccagccgctggctgtggtggacctcatcgtggacatcatgttcattgtggacatcctcatcaacttccgcaccacctacgtcaatgccaacgaggaggtggtcagccaccccggccgcatcgccgtccactacttcaagggctggttcctcatcgacatggtggccgccatccccttcgacctgctcatcttcggctctggctctgaggagctgatcgggctgctgaagactgcgcggctgctgcggctggtgcgcgtggcgcggaagctggatcgctactcagagtacggcgcggccgtgctgttcttgctcatgtgcacctttgcgctcatcgcgcactggctagcctgcatctggtacgccatcggcaacatggagcagccacacatggactcacgcatcggctggctgcacaacctgggcgaccagataggcaaaccctacaacagcagcggcctgggcggcccctccatcaaggacaagtatgtgacggcgctctacttcaccttcagcagcctcaccagtgtgggcttcggcaacgtctctcccaacaccaactcagagaagatcttctccatctgcgtcatgctcattggctccctcatgtatgctagcatcttcggcaacgtgtcggccatcatccagcggctgtactcgggcacagcccgctaccacacacagatgctgcgggtgcgggagttcatccgcttccaccagatccccaatcccctgcgccagcgcctcgaggagtacttccagcacgcctggtcctacaccaacggcatcgacatgaacgcggtgctgaagggcttccctgagtgcctgcaggctgacatctgcctgcacctgaaccgctcactgctgcagcactgcaaacccttccgaggggccaccaagggctgccttcgggccctggccatgaagttcaagaccacacatgcaccgccaggggacacactggtgcatgctggggacctgctcaccgccctgtacttcatctcccggggctccatcgagatcctgcggggcgacgtcgtcgtggccatcctggggaagaatgacatctttggggagcctctgaacctgtatgcaaggcctggcaagtcgaacggggatgtgcgggccctcacctactgtgacctacacaagatccatcgggacgacctgctggaggtgctggacatgtaccctgagttctccgaccacttctggtccagcctggagatcaccttcaacctgcgagataccaacatgatcccgggctcccccggcagtacggagttagagggtggcttcagtcggcaacgcaagcgcaagttgtccttccgcaggcgcacggacaaggacacggagcagccaggggaggtgtcggccttggggccgggccgggcgggggcagggccgagtagccggggccggccgggggggccgtggggggagagcccgtccagtggcccctccagccctgagagcagtgaggatgagggcccaggccgcagctccagccccctccgcctggtgcccttctccagccccaggccccccggagagccgccgggtggggagcccctgatggaggactgcgagaagagcagcgacacttgcaaccccctgtcaggcgccttctcaggagtgtccaacattttcagcttctggggggacagtcggggccgccagtaccaggagctccctcgatgccccgcccccacccccagcctcctcaacatccccctctccagcccgggtcggcggccccggggcgacgtggagagcaggctggatgccctccagcgccagctcaacaggctggagacccggctgagtgcagacatggccactgtcctgcagctgctacagaggcagatgacgctggtcccgcccgcctacagtgctgtgaccaccccggggcctggccccacttccacatccccgctgttgcccgtcagccccctccccaccctcaccttggactcgctttctcaggtttcccagttcatggcgtgtgaggagctgcccccgggggccccagagcttccccaagaaggccccacacgacgcctctccctaccgggccagctgggggccctcacctcccagcccctgcacagacacggctcggacccgggcagttagtggggctgcccagtgtggacacgtggctcacccagggatcaaggcgctgctgggccgctccccttggaggccctgctcaggaggccctgaccgtggaaggggagaggaactcgaaagcacagctcctcccccagcccttgggaccatcttctcctgcagtcccctgggccccagtgagaggggcaggggcagggccggcagtaggtggggcctgtggtccccccactgccctgagggcattagctggtctaactgcccggaggcacccggccctgggccttaggcacctcaaggacttttctgctatttactgctcttattgttaaggataataattaaggatcatatgaataattaatgaagatgctgatgactatgaataataaataattatcctgaggaga

SEQ ID NO: 237 - DNA, 3884 bp, Homo sapiens
  source 1..3884: mol_type = genomic DNA
  misc_feature 1..3884: note = cDNA of KCNH2 gene SNP c.1742C>A (p.Ser581Ter)
atgccggtgcggaggggccacgtcgcgccgcagaacaccttcctggacaccatcatccgcaagtttgagggccagagccgtaagttcatcatcgccaacgctcgggtggagaactgcgccgtcatctactgcaacgacggcttctgcgagctgtgcggctactcgcgggccgaggtgatgcagcgaccctgcacctgcgacttcctgcacgggccgcgcacgcagcgccgcgctgccgcgcagatcgcgcaggcactgctgggcgccgaggagcgcaaagtggaaatcgccttctaccggaaagatgggagctgcttcctatgtctggtggatgtggtgcccgtgaagaacgaggatggggctgtcatcatgttcatcctcaatttcgaggtggtgatggagaaggacatggtggggtccccggctcatgacaccaaccaccggggcccccccaccagctggctggccccaggccgcgccaagaccttccgcctgaagctgcccgcgctgctggcgctgacggcccgggagtcgtcggtgcggtcgggcggcgcgggcggcgcgggcgccccgggggccgtggtggtggacgtggacctgacgcccgcggcacccagcagcgagtcgctggccctggacgaagtgacagccatggacaaccacgtggcagggctcgggcccgcggaggagcggcgtgcgctggtgggtcccggctctccgccccgcagcgcgcccggccagctcccatcgccccgggcgcacagcctcaaccccgacgcctcgggctccagctgcagcctggcccggacgcgctcccgagaaagctgcgccagcgtgcgccgcgcctcgtcggccgacgacatcgaggccatgcgcgccggggtgctgcccccgccaccgcgccacgccagcaccggggccatgcacccactgcgcagcggcttgctcaactccacctcggactccgacctcgtgcgctaccgcaccattagcaagattccccaaatcaccctcaactttgtggacctcaagggcgaccccttcttggcttcgcccaccagtgaccgtgagatcatagcacctaagataaaggagcgaacccacaatgtcactgagaaggtcacccaggtcctgtccctgggcgccgacgtgctgcctgagtacaagctgcaggcaccgcgcatccaccgctggaccatcctgcattacagccccttcaaggccgtgtgggactggctcatcctgctgctggtcatctacacggctgtcttcacaccctactcggctgccttcctgctgaaggagacggaagaaggcccgcctgctaccgagtgtggctacgcctgccagccgctggctgtggtggacctcatcgtggacatcatgttcattgtggacatcctcatcaacttccgcaccacctacgtcaatgccaacgaggaggtggtcagccaccccggccgcatcgccgtccactacttcaagggctggttcctcatcgacatggtggccgccatccccttcgacctgctcatcttcggctctggctctgaggagctgatcgggctgctgaagactgcgcggctgctgcggctggtgcgcgtggcgcggaagctggatcgctactcagagtacggcgcggccgtgctgttcttgctcatgtgcacctttgcgctcatcgcgcactggctagcctgcatctggtacgccatcggcaacatggagcagccacacatggactaacgcatcggctggctgcacaacctgggcgaccagataggcaaaccctacaacagcagcggcctgggcggcccctccatcaaggacaagtatgtgacggcgctctacttcaccttcagcagcctcaccagtgtgggcttcggcaacgtctctcccaacaccaactcagagaagatcttctccatctgcgtcatgctcattggctccctcatgtatgctagcatcttcggcaacgtgtcggccatcatccagcggctgtactcgggcacagcccgctaccacacacagatgctgcgggtgcgggagttcatccgcttccaccagatccccaatcccctgcgccagcgcctcgaggagtacttccagcacgcctggtcctacaccaacggcatcgacatgaacgcggtgctgaagggcttccctgagtgcctgcaggctgacatctgcctgcacctgaaccgctcactgctgcagcactgcaaacccttccgaggggccaccaagggctgccttcgggccctggccatgaagttcaagaccacacatgcaccgccaggggacacactggtgcatgctggggacctgctcaccgccctgtacttcatctcccggggctccatcgagatcctgcggggcgacgtcgtcgtggccatcctggggaagaatgacatctttggggagcctctgaacctgtatgcaaggcctggcaagtcgaacggggatgtgcgggccctcacctactgtgacctacacaagatccatcgggacgacctgctggaggtgctggacatgtaccctgagttctccgaccacttctggtccagcctggagatcaccttcaacctgcgagataccaacatgatcccgggctcccccggcagtacggagttagagggtggcttcagtcggcaacgcaagcgcaagttgtccttccgcaggcgcacggacaaggacacggagcagccaggggaggtgtcggccttggggccgggccgggcgggggcagggccgagtagccggggccggccgggggggccgtggggggagagcccgtccagtggcccctccagccctgagagcagtgaggatgagggcccaggccgcagctccagccccctccgcctggtgcccttctccagccccaggccccccggagagccgccgggtggggagcccctgatggaggactgcgagaagagcagcgacacttgcaaccccctgtcaggcgccttctcaggagtgtccaacattttcagcttctggggggacagtcggggccgccagtaccaggagctccctcgatgccccgcccccacccccagcctcctcaacatccccctctccagcccgggtcggcggccccggggcgacgtggagagcaggctggatgccctccagcgccagctcaacaggctggagacccggctgagtgcagacatggccactgtcctgcagctgctacagaggcagatgacgctggtcccgcccgcctacagtgctgtgaccaccccggggcctggccccacttccacatccccgctgttgcccgtcagccccctccccaccctcaccttggactcgctttctcaggtttcccagttcatggcgtgtgaggagctgcccccgggggccccagagcttccccaagaaggccccacacgacgcctctccctaccgggccagctgggggccctcacctcccagcccctgcacagacacggctcggacccgggcagttagtggggctgcccagtgtggacacgtggctcacccagggatcaaggcgctgctgggccgctccccttggaggccctgctcaggaggccctgaccgtggaaggggagaggaactcgaaagcacagctcctcccccagcccttgggaccatcttctcctgcagtcccctgggccccagtgagaggggcaggggcagggccggcagtaggtggggcctgtggtccccccactgccctgagggcattagctggtctaactgcccggaggcacccggccctgggccttaggcacctcaaggacttttctgctatttactgctcttattgttaaggataataattaaggatcatatgaataattaatgaagatgctgatgactatgaataataaataattatcctgaggaga

SEQ ID NO: 238 - DNA, 3884 bp, Homo sapiens
  source 1..3884: mol_type = genomic DNA
  misc_feature 1..3884: note = cDNA of KCNH2 gene SNP c.1742C>T (p.Ser581Leu)
atgccggtgcggaggggccacgtcgcgccgcagaacaccttcctggacaccatcatccgcaagtttgagggccagagccgtaagttcatcatcgccaacgctcgggtggagaactgcgccgtcatctactgcaacgacggcttctgcgagctgtgcggctactcgcgggccgaggtgatgcagcgaccctgcacctgcgacttcctgcacgggccgcgcacgcagcgccgcgctgccgcgcagatcgcgcaggcactgctgggcgccgaggagcgcaaagtggaaatcgccttctaccggaaagatgggagctgcttcctatgtctggtggatgtggtgcccgtgaagaacgaggatggggctgtcatcatgttcatcctcaatttcgaggtggtgatggagaaggacatggtggggtccccggctcatgacaccaaccaccggggcccccccaccagctggctggccccaggccgcgccaagaccttccgcctgaagctgcccgcgctgctggcgctgacggcccgggagtcgtcggtgcggtcgggcggcgcgggcggcgcgggcgccccgggggccgtggtggtggacgtggacctgacgcccgcggcacccagcagcgagtcgctggccctggacgaagtgacagccatggacaaccacgtggcagggctcgggcccgcggaggagcggcgtgcgctggtgggtcccggctctccgccccgcagcgcgcccggccagctcccatcgccccgggcgcacagcctcaaccccgacgcctcgggctccagctgcagcctggcccggacgcgctcccgagaaagctgcgccagcgtgcgccgcgcctcgtcggccgacgacatcgaggccatgcgcgccggggtgctgcccccgccaccgcgccacgccagcaccggggccatgcacccactgcgcagcggcttgctcaactccacctcggactccgacctcgtgcgctaccgcaccattagcaagattccccaaatcaccctcaactttgtggacctcaagggcgaccccttcttggcttcgcccaccagtgaccgtgagatcatagcacctaagataaaggagcgaacccacaatgtcactgagaaggtcacccaggtcctgtccctgggcgccgacgtgctgcctgagtacaagctgcaggcaccgcgcatccaccgctggaccatcctgcattacagccccttcaaggccgtgtgggactggctcatcctgctgctggtcatctacacggctgtcttcacaccctactcggctgccttcctgctgaaggagacggaagaaggcccgcctgctaccgagtgtggctacgcctgccagccgctggctgtggtggacctcatcgtggacatcatgttcattgtggacatcctcatcaacttccgcaccacctacgtcaatgccaacgaggaggtggtcagccaccccggccgcatcgccgtccactacttcaagggctggttcctcatcgacatggtggccgccatccccttcgacctgctcatcttcggctctggctctgaggagctgatcgggctgctgaagactgcgcggctgctgcggctggtgcgcgtggcgcggaagctggatcgctactcagagtacggcgcggccgtgctgttcttgctcatgtgcacctttgcgctcatcgcgcactggctagcctgcatctggtacgccatcggcaacatggagcagccacacatggacttacgcatcggctggctgcacaacctgggcgaccagataggcaaaccctacaacagcagcggcctgggcggcccctccatcaaggacaagtatgtgacggcgctctacttcaccttcagcagcctcaccagtgtgggcttcggcaacgtctctcccaacaccaactcagagaagatcttctccatctgcgtcatgctcattggctccctcatgtatgctagcatcttcggcaacgtgtcggccatcatccagcggctgtactcgggcacagcccgctaccacacacagatgctgcgggtgcgggagttcatccgcttccaccagatccccaatcccctgcgccagcgcctcgaggagtacttccagcacgcctggtcctacaccaacggcatcgacatgaacgcggtgctgaagggcttccctgagtgcctgcaggctgacatctgcctgcacctgaaccgctcactgctgcagcactgcaaacccttccgaggggccaccaagggctgccttcgggccctggccatgaagttcaagaccacacatgcaccgccaggggacacactggtgcatgctggggacctgctcaccgccctgtacttcatctcccggggctccatcgagatcctgcggggcgacgtcgtcgtggccatcctggggaagaatgacatctttggggagcctctgaacctgtatgcaaggcctggcaagtcgaacggggatgtgcgggccctcacctactgtgacctacacaagatccatcgggacgacctgctggaggtgctggacatgtaccctgagttctccgaccacttctggtccagcctggagatcaccttcaacctgcgagataccaacatgatcccgggctcccccggcagtacggagttagagggtggcttcagtcggcaacgcaagcgcaagttgtccttccgcaggcgcacggacaaggacacggagcagccaggggaggtgtcggccttggggccgggccgggcgggggcagggccgagtagccggggccggccgggggggccgtggggggagagcccgtccagtggcccctccagccctgagagcagtgaggatgagggcccaggccgcagctccagccccctccgcctggtgcccttctccagccccaggccccccggagagccgccgggtggggagcccctgatggaggactgcgagaagagcagcgacacttgcaaccccctgtcaggcgccttctcaggagtgtccaacattttcagcttctggggggacagtcggggccgccagtaccaggagctccctcgatgccccgcccccacccccagcctcctcaacatccccctctccagcccgggtcggcggccccggggcgacgtggagagcaggctggatgccctccagcgccagctcaacaggctggagacccggctgagtgcagacatggccactgtcctgcagctgctacagaggcagatgacgctggtcccgcccgcctacagtgctgtgaccaccccggggcctggccccacttccacatccccgctgttgcccgtcagccccctccccaccctcaccttggactcgctttctcaggtttcccagttcatggcgtgtgaggagctgcccccgggggccccagagcttccccaagaaggccccacacgacgcctctccctaccgggccagctgggggccctcacctcccagcccctgcacagacacggctcggacccgggcagttagtggggctgcccagtgtggacacgtggctcacccagggatcaaggcgctgctgggccgctccccttggaggccctgctcaggaggccctgaccgtggaaggggagaggaactcgaaagcacagctcctcccccagcccttgggaccatcttctcctgcagtcccctgggccccagtgagaggggcaggggcagggccggcagtaggtggggcctgtggtccccccactgccctgagggcattagctggtctaactgcccggaggcacccggccctgggccttaggcacctcaaggacttttctgctatttactgctcttattgttaaggataataattaaggatcatatgaataattaatgaagatgctgatgactatgaataataaataattatcctgaggaga

SEQ ID NO: 239 - DNA, 3884 bp, Homo sapiens
  source 1..3884: mol_type = genomic DNA
  misc_feature 1..3884: note = cDNA of KCNH2 gene SNP c.1744C>T (p.Arg582Cys)
atgccggtgcggaggggccacgtcgcgccgcagaacaccttcctggacaccatcatccgcaagtttgagggccagagccgtaagttcatcatcgccaacgctcgggtggagaactgcgccgtcatctactgcaacgacggcttctgcgagctgtgcggctactcgcgggccgaggtgatgcagcgaccctgcacctgcgacttcctgcacgggccgcgcacgcagcgccgcgctgccgcgcagatcgcgcaggcactgctgggcgccgaggagcgcaaagtggaaatcgccttctaccggaaagatgggagctgcttcctatgtctggtggatgtggtgcccgtgaagaacgaggatggggctgtcatcatgttcatcctcaatttcgaggtggtgatggagaaggacatggtggggtccccggctcatgacaccaaccaccggggcccccccaccagctggctggccccaggccgcgccaagaccttccgcctgaagctgcccgcgctgctggcgctgacggcccgggagtcgtcggtgcggtcgggcggcgcgggcggcgcgggcgccccgggggccgtggtggtggacgtggacctgacgcccgcggcacccagcagcgagtcgctggccctggacgaagtgacagccatggacaaccacgtggcagggctcgggcccgcggaggagcggcgtgcgctggtgggtcccggctctccgccccgcagcgcgcccggccagctcccatcgccccgggcgcacagcctcaaccccgacgcctcgggctccagctgcagcctggcccggacgcgctcccgagaaagctgcgccagcgtgcgccgcgcctcgtcggccgacgacatcgaggccatgcgcgccggggtgctgcccccgccaccgcgccacgccagcaccggggccatgcacccactgcgcagcggcttgctcaactccacctcggactccgacctcgtgcgctaccgcaccattagcaagattccccaaatcaccctcaactttgtggacctcaagggcgaccccttcttggcttcgcccaccagtgaccgtgagatcatagcacctaagataaaggagcgaacccacaatgtcactgagaaggtcacccaggtcctgtccctgggcgccgacgtgctgcctgagtacaagctgcaggcaccgcgcatccaccgctggaccatcctgcattacagccccttcaaggccgtgtgggactggctcatcctgctgctggtcatctacacggctgtcttcacaccctactcggctgccttcctgctgaaggagacggaagaaggcccgcctgctaccgagtgtggctacgcctgccagccgctggctgtggtggacctcatcgtggacatcatgttcattgtggacatcctcatcaacttccgcaccacctacgtcaatgccaacgaggaggtggtcagccaccccggccgcatcgccgtccactacttcaagggctggttcctcatcgacatggtggccgccatccccttcgacctgctcatcttcggctctggctctgaggagctgatcgggctgctgaagactgcgcggctgctgcggctggtgcgcgtggcgcggaagctggatcgctactcagagtacggcgcggccgtgctgttcttgctcatgtgcacctttgcgctcatcgcgcactggctagcctgcatctggtacgccatcggcaacatggagcagccacacatggactcatgcatcggctggctgcacaacctgggcgaccagataggcaaaccctacaacagcagcggcctgggcggcccctccatcaaggacaagtatgtgacggcgctctacttcaccttcagcagcctcaccagtgtgggcttcggcaacgtctctcccaacaccaactcagagaagatcttctccatctgcgtcatgctcattggctccctcatgtatgctagcatcttcggcaacgtgtcggccatcatccagcggctgtactcgggcacagcccgctaccacacacagatgctgcgggtgcgggagttcatccgcttccaccagatccccaatcccctgcgccagcgcctcgaggagtacttccagcacgcctggtcctacaccaacggcatcgacatgaacgcggtgctgaagggcttccctgagtgcctgcaggctgacatctgcctgcacctgaaccgctcactgctgcagcactgcaaacccttccgaggggccaccaagggctgccttcgggccctggccatgaagttcaagaccacacatgcaccgccaggggacacactggtgcatgctggggacctgctcaccgccctgtacttcatctcccggggctccatcgagatcctgcggggcgacgtcgtcgtggccatcctggggaagaatgacatctttggggagcctctgaacctgtatgcaaggcctggcaagtcgaacggggatgtgcgggccctcacctactgtgacctacacaagatccatcgggacgacctgctggaggtgctggacatgtaccctgagttctccgaccacttctggtccagcctggagatcaccttcaacctgcgagataccaacatgatcccgggctcccccggcagtacggagttagagggtggcttcagtcggcaacgcaagcgcaagttgtccttccgcaggcgcacggacaaggacacggagcagccaggggaggtgtcggccttggggccgggccgggcgggggcagggccgagtagccggggccggccgggggggccgtggggggagagcccgtccagtggcccctccagccctgagagcagtgaggatgagggcccaggccgcagctccagccccctccgcctggtgcccttctccagccccaggccccccggagagccgccgggtggggagcccctgatggaggactgcgagaagagcagcgacacttgcaaccccctgtcaggcgccttctcaggagtgtccaacattttcagcttctggggggacagtcggggccgccagtaccaggagctccctcgatgccccgcccccacccccagcctcctcaacatccccctctccagcccgggtcggcggccccggggcgacgtggagagcaggctggatgccctccagcgccagctcaacaggctggagacccggctgagtgcagacatggccactgtcctgcagctgctacagaggcagatgacgctggtcccgcccgcctacagtgctgtgaccaccccggggcctggccccacttccacatccccgctgttgcccgtcagccccctccccaccctcaccttggactcgctttctcaggtttcccagttcatggcgtgtgaggagctgcccccgggggccccagagcttccccaagaaggccccacacgacgcctctccctaccgggccagctgggggccctcacctcccagcccctgcacagacacggctcggacccgggcagttagtggggctgcccagtgtggacacgtggctcacccagggatcaaggcgctgctgggccgctccccttggaggccctgctcaggaggccctgaccgtggaaggggagaggaactcgaaagcacagctcctcccccagcccttgggaccatcttctcctgcagtcccctgggccccagtgagaggggcaggggcagggccggcagtaggtggggcctgtggtccccccactgccctgagggcattagctggtctaactgcccggaggcacccggccctgggccttaggcacctcaaggacttttctgctatttactgctcttattgttaaggataataattaaggatcatatgaataattaatgaagatgctgatgactatgaataataaataattatcctgaggaga

SEQ ID NO: 240 - DNA, 3884 bp, Homo sapiens
  source 1..3884: mol_type = genomic DNA
  misc_feature 1..3884: note = cDNA of KCNH2 gene SNP c.1745G>A (p.Arg582His)
atgccggtgcggaggggccacgtcgcgccgcagaacaccttcctggacaccatcatccgcaagtttgagggccagagccgtaagttcatcatcgccaacgctcgggtggagaactgcgccgtcatctactgcaacgacggcttctgcgagctgtgcggctactcgcgggccgaggtgatgcagcgaccctgcacctgcgacttcctgcacgggccgcgcacgcagcgccgcgctgccgcgcagatcgcgcaggcactgctgggcgccgaggagcgcaaagtggaaatcgccttctaccggaaagatgggagctgcttcctatgtctggtggatgtggtgcccgtgaagaacgaggatggggctgtcatcatgttcatcctcaatttcgaggtggtgatggagaaggacatggtggggtccccggctcatgacaccaaccaccggggcccccccaccagctggctggccccaggccgcgccaagaccttccgcctgaagctgcccgcgctgctggcgctgacggcccgggagtcgtcggtgcggtcgggcggcgcgggcggcgcgggcgccccgggggccgtggtggtggacgtggacctgacgcccgcggcacccagcagcgagtcgctggccctggacgaagtgacagccatggacaaccacgtggcagggctcgggcccgcggaggagcggcgtgcgctggtgggtcccggctctccgccccgcagcgcgcccggccagctcccatcgccccgggcgcacagcctcaaccccgacgcctcgggctccagctgcagcctggcccggacgcgctcccgagaaagctgcgccagcgtgcgccgcgcctcgtcggccgacgacatcgaggccatgcgcgccggggtgctgcccccgccaccgcgccacgccagcaccggggccatgcacccactgcgcagcggcttgctcaactccacctcggactccgacctcgtgcgctaccgcaccattagcaagattccccaaatcaccctcaactttgtggacctcaagggcgaccccttcttggcttcgcccaccagtgaccgtgagatcatagcacctaagataaaggagcgaacccacaatgtcactgagaaggtcacccaggtcctgtccctgggcgccgacgtgctgcctgagtacaagctgcaggcaccgcgcatccaccgctggaccatcctgcattacagccccttcaaggccgtgtgggactggctcatcctgctgctggtcatctacacggctgtcttcacaccctactcggctgccttcctgctgaaggagacggaagaaggcccgcctgctaccgagtgtggctacgcctgccagccgctggctgtggtggacctcatcgtggacatcatgttcattgtggacatcctcatcaacttccgcaccacctacgtcaatgccaacgaggaggtggtcagccaccccggccgcatcgccgtccactacttcaagggctggttcctcatcgacatggtggccgccatccccttcgacctgctcatcttcggctctggctctgaggagctgatcgggctgctgaagactgcgcggctgctgcggctggtgcgcgtggcgcggaagctggatcgctactcagagtacggcgcggccgtgctgttcttgctcatgtgcacctttgcgctcatcgcgcactggctagcctgcatctggtacgccatcggcaacatggagcagccacacatggactcacacatcggctggctgcacaacctgggcgaccagataggcaaaccctacaacagcagcggcctgggcggcccctccatcaaggacaagtatgtgacggcgctctacttcaccttcagcagcctcaccagtgtgggcttcggcaacgtctctcccaacaccaactcagagaagatcttctccatctgcgtcatgctcattggctccctcatgtatgctagcatcttcggcaacgtgtcggccatcatccagcggctgtactcgggcacagcccgctaccacacacagatgctgcgggtgcgggagttcatccgcttccaccagatccccaatcccctgcgccagcgcctcgaggagtacttccagcacgcctggtcctacaccaacggcatcgacatgaacgcggtgctgaagggcttccctgagtgcctgcaggctgacatctgcctgcacctgaaccgctcactgctgcagcactgcaaacccttccgaggggccaccaagggctgccttcgggccctggccatgaagttcaagaccacacatgcaccgccaggggacacactggtgcatgctggggacctgctcaccgccctgtacttcatctcccggggctccatcgagatcctgcggggcgacgtcgtcgtggccatcctggggaagaatgacatctttggggagcctctgaacctgtatgcaaggcctggcaagtcgaacggggatgtgcgggccctcacctactgtgacctacacaagatccatcgggacgacctgctggaggtgctggacatgtaccctgagttctccgaccacttctggtccagcctggagatcaccttcaacctgcgagataccaacatgatcccgggctcccccggcagtacggagttagagggtggcttcagtcggcaacgcaagcgcaagttgtccttccgcaggcgcacggacaaggacacggagcagccaggggaggtgtcggccttggggccgggccgggcgggggcagggccgagtagccggggccggccgggggggccgtggggggagagcccgtccagtggcccctccagccctgagagcagtgaggatgagggcccaggccgcagctccagccccctccgcctggtgcccttctccagccccaggccccccggagagccgccgggtggggagcccctgatggaggactgcgagaagagcagcgacacttgcaaccccctgtcaggcgccttctcaggagtgtccaacattttcagcttctggggggacagtcggggccgccagtaccaggagctccctcgatgccccgcccccacccccagcctcctcaacatccccctctccagcccgggtcggcggccccggggcgacgtggagagcaggctggatgccctccagcgccagctcaacaggctggagacccggctgagtgcagacatggccactgtcctgcagctgctacagaggcagatgacgctggtcccgcccgcctacagtgctgtgaccaccccggggcctggccccacttccacatccccgctgttgcccgtcagccccctccccaccctcaccttggactcgctttctcaggtttcccagttcatggcgtgtgaggagctgcccccgggggccccagagcttccccaagaaggccccacacgacgcctctccctaccgggccagctgggggccctcacctcccagcccctgcacagacacggctcggacccgggcagttagtggggctgcccagtgtggacacgtggctcacccagggatcaaggcgctgctgggccgctccccttggaggccctgctcaggaggccctgaccgtggaaggggagaggaactcgaaagcacagctcctcccccagcccttgggaccatcttctcctgcagtcccctgggccccagtgagaggggcaggggcagggccggcagtaggtggggcctgtggtccccccactgccctgagggcattagctggtctaactgcccggaggcacccggccctgggccttaggcacctcaaggacttttctgctatttactgctcttattgttaaggataataattaaggatcatatgaataattaatgaagatgctgatgactatgaataataaataattatcctgaggaga

SEQ ID NO: 241 - DNA, 3884 bp, Homo sapiens
  source 1..3884: mol_type = genomic DNA
  misc_feature 1..3884: note = cDNA of KCNH2 gene SNP c.1745G>T (p.Arg582Leu)
atgccggtgcggaggggccacgtcgcgccgcagaacaccttcctggacaccatcatccgcaagtttgagggccagagccgtaagttcatcatcgccaacgctcgggtggagaactgcgccgtcatctactgcaacgacggcttctgcgagctgtgcggctactcgcgggccgaggtgatgcagcgaccctgcacctgcgacttcctgcacgggccgcgcacgcagcgccgcgctgccgcgcagatcgcgcaggcactgctgggcgccgaggagcgcaaagtggaaatcgccttctaccggaaagatgggagctgcttcctatgtctggtggatgtggtgcccgtgaagaacgaggatggggctgtcatcatgttcatcctcaatttcgaggtggtgatggagaaggacatggtggggtccccggctcatgacaccaaccaccggggcccccccaccagctggctggccccaggccgcgccaagaccttccgcctgaagctgcccgcgctgctggcgctgacggcccgggagtcgtcggtgcggtcgggcggcgcgggcggcgcgggcgccccgggggccgtggtggtggacgtggacctgacgcccgcggcacccagcagcgagtcgctggccctggacgaagtgacagccatggacaaccacgtggcagggctcgggcccgcggaggagcggcgtgcgctggtgggtcccggctctccgccccgcagcgcgcccggccagctcccatcgccccgggcgcacagcctcaaccccgacgcctcgggctccagctgcagcctggcccggacgcgctcccgagaaagctgcgccagcgtgcgccgcgcctcgtcggccgacgacatcgaggccatgcgcgccggggtgctgcccccgccaccgcgccacgccagcaccggggccatgcacccactgcgcagcggcttgctcaactccacctcggactccgacctcgtgcgctaccgcaccattagcaagattccccaaatcaccctcaactttgtggacctcaagggcgaccccttcttggcttcgcccaccagtgaccgtgagatcatagcacctaagataaaggagcgaacccacaatgtcactgagaaggtcacccaggtcctgtccctgggcgccgacgtgctgcctgagtacaagctgcaggcaccgcgcatccaccgctggaccatcctgcattacagccccttcaaggccgtgtgggactggctcatcctgctgctggtcatctacacggctgtcttcacaccctactcggctgccttcctgctgaaggagacggaagaaggcccgcctgctaccgagtgtggctacgcctgccagccgctggctgtggtggacctcatcgtggacatcatgttcattgtggacatcctcatcaacttccgcaccacctacgtcaatgccaacgaggaggtggtcagccaccccggccgcatcgccgtccactacttcaagggctggttcctcatcgacatggtggccgccatccccttcgacctgctcatcttcggctctggctctgaggagctgatcgggctgctgaagactgcgcggctgctgcggctggtgcgcgtggcgcggaagctggatcgctactcagagtacggcgcggccgtgctgttcttgctcatgtgcacctttgcgctcatcgcgcactggctagcctgcatctggtacgccatcggcaacatggagcagccacacatggactcactcatcggctggctgcacaacctgggcgaccagataggcaaaccctacaacagcagcggcctgggcggcccctccatcaaggacaagtatgtgacggcgctctacttcaccttcagcagcctcaccagtgtgggcttcggcaacgtctctcccaacaccaactcagagaagatcttctccatctgcgtcatgctcattggctccctcatgtatgctagcatcttcggcaacgtgtcggccatcatccagcggctgtactcgggcacagcccgctaccacacacagatgctgcgggtgcgggagttcatccgcttccaccagatccccaatcccctgcgccagcgcctcgaggagtacttccagcacgcctggtcctacaccaacggcatcgacatgaacgcggtgctgaagggcttccctgagtgcctgcaggctgacatctgcctgcacctgaaccgctcactgctgcagcactgcaaacccttccgaggggccaccaagggctgccttcgggccctggccatgaagttcaagaccacacatgcaccgccaggggacacactggtgcatgctggggacctgctcaccgccctgtacttcatctcccggggctccatcgagatcctgcggggcgacgtcgtcgtggccatcctggggaagaatgacatctttggggagcctctgaacctgtatgcaaggcctggcaagtcgaacggggatgtgcgggccctcacctactgtgacctacacaagatccatcgggacgacctgctggaggtgctggacatgtaccctgagttctccgaccacttctggtccagcctggagatcaccttcaacctgcgagataccaacatgatcccgggctcccccggcagtacggagttagagggtggcttcagtcggcaacgcaagcgcaagttgtccttccgcaggcgcacggacaaggacacggagcagccaggggaggtgtcggccttggggccgggccgggcgggggcagggccgagtagccggggccggccgggggggccgtggggggagagcccgtccagtggcccctccagccctgagagcagtgaggatgagggcccaggccgcagctccagccccctccgcctggtgcccttctccagccccaggccccccggagagccgccgggtggggagcccctgatggaggactgcgagaagagcagcgacacttgcaaccccctgtcaggcgccttctcaggagtgtccaacattttcagcttctggggggacagtcggggccgccagtaccaggagctccctcgatgccccgcccccacccccagcctcctcaacatccccctctccagcccgggtcggcggccccggggcgacgtggagagcaggctggatgccctccagcgccagctcaacaggctggagacccggctgagtgcagacatggccactgtcctgcagctgctacagaggcagatgacgctggtcccgcccgcctacagtgctgtgaccaccccggggcctggccccacttccacatccccgctgttgcccgtcagccccctccccaccctcaccttggactcgctttctcaggtttcccagttcatggcgtgtgaggagctgcccccgggggccccagagcttccccaagaaggccccacacgacgcctctccctaccgggccagctgggggccctcacctcccagcccctgcacagacacggctcggacccgggcagttagtggggctgcccagtgtggacacgtggctcacccagggatcaaggcgctgctgggccgctccccttggaggccctgctcaggaggccctgaccgtggaaggggagaggaactcgaaagcacagctcctcccccagcccttgggaccatcttctcctgcagtcccctgggccccagtgagaggggcaggggcagggccggcagtaggtggggcctgtggtccccccactgccctgagggcattagctggtctaactgcccggaggcacccggccctgggccttaggcacctcaaggacttttctgctatttactgctcttattgttaaggataataattaaggatcatatgaataattaatgaagatgctgatgactatgaataataaataattatcctgaggaga

SEQ ID NO: 242 - DNA, 3884 bp, Homo sapiens
  source 1..3884: mol_type = genomic DNA
  misc_feature 1..3884: note = cDNA of KCNH2 gene SNP c.1747A>G (p.Ile583Val)
atgccggtgcggaggggccacgtcgcgccgcagaacaccttcctggacaccatcatccgcaagtttgagggccagagccgtaagttcatcatcgccaacgctcgggtggagaactgcgccgtcatctactgcaacgacggcttctgcgagctgtgcggctactcgcgggccgaggtgatgcagcgaccctgcacctgcgacttcctgcacgggccgcgcacgcagcgccgcgctgccgcgcagatcgcgcaggcactgctgggcgccgaggagcgcaaagtggaaatcgccttctaccggaaagatgggagctgcttcctatgtctggtggatgtggtgcccgtgaagaacgaggatggggctgtcatcatgttcatcctcaatttcgaggtggtgatggagaaggacatggtggggtccccggctcatgacaccaaccaccggggcccccccaccagctggctggccccaggccgcgccaagaccttccgcctgaagctgcccgcgctgctggcgctgacggcccgggagtcgtcggtgcggtcgggcggcgcgggcggcgcgggcgccccgggggccgtggtggtggacgtggacctgacgcccgcggcacccagcagcgagtcgctggccctggacgaagtgacagccatggacaaccacgtggcagggctcgggcccgcggaggagcggcgtgcgctggtgggtcccggctctccgccccgcagcgcgcccggccagctcccatcgccccgggcgcacagcctcaaccccgacgcctcgggctccagctgcagcctggcccggacgcgctcccgagaaagctgcgccagcgtgcgccgcgcctcgtcggccgacgacatcgaggccatgcgcgccggggtgctgcccccgccaccgcgccacgccagcaccggggccatgcacccactgcgcagcggcttgctcaactccacctcggactccgacctcgtgcgctaccgcaccattagcaagattccccaaatcaccctcaactttgtggacctcaagggcgaccccttcttggcttcgcccaccagtgaccgtgagatcatagcacctaagataaaggagcgaacccacaatgtcactgagaaggtcacccaggtcctgtccctgggcgccgacgtgctgcctgagtacaagctgcaggcaccgcgcatccaccgctggaccatcctgcattacagccccttcaaggccgtgtgggactggctcatcctgctgctggtcatctacacggctgtcttcacaccctactcggctgccttcctgctgaaggagacggaagaaggcccgcctgctaccgagtgtggctacgcctgccagccgctggctgtggtggacctcatcgtggacatcatgttcattgtggacatcctcatcaacttccgcaccacctacgtcaatgccaacgaggaggtggtcagccaccccggccgcatcgccgtccactacttcaagggctggttcctcatcgacatggtggccgccatccccttcgacctgctcatcttcggctctggctctgaggagctgatcgggctgctgaagactgcgcggctgctgcggctggtgcgcgtggcgcggaagctggatcgctactcagagtacggcgcggccgtgctgttcttgctcatgtgcacctttgcgctcatcgcgcactggctagcctgcatctggtacgccatcggcaacatggagcagccacacatggactcacgcgtcggctggctgcacaacctgggcgaccagataggcaaaccctacaacagcagcggcctgggcggcccctccatcaaggacaagtatgtgacggcgctctacttcaccttcagcagcctcaccagtgtgggcttcggcaacgtctctcccaacaccaactcagagaagatcttctccatctgcgtcatgctcattggctccctcatgtatgctagcatcttcggcaacgtgtcggccatcatccagcggctgtactcgggcacagcccgctaccacacacagatgctgcgggtgcgggagttcatccgcttccaccagatccccaatcccctgcgccagcgcctcgaggagtacttccagcacgcctggtcctacaccaacggcatcgacatgaacgcggtgctgaagggcttccctgagtgcctgcaggctgacatctgcctgcacctgaaccgctcactgctgcagcactgcaaacccttccgaggggccaccaagggctgccttcgggccctggccatgaagttcaagaccacacatgcaccgccaggggacacactggtgcatgctggggacctgctcaccgccctgtacttcatctcccggggctccatcgagatcctgcggggcgacgtcgtcgtggccatcctggggaagaatgacatctttggggagcctctgaacctgtatgcaaggcctggcaagtcgaacggggatgtgcgggccctcacctactgtgacctacacaagatccatcgggacgacctgctggaggtgctggacatgtaccctgagttctccgaccacttctggtccagcctggagatcaccttcaacctgcgagataccaacatgatcccgggctcccccggcagtacggagttagagggtggcttcagtcggcaacgcaagcgcaagttgtccttccgcaggcgcacggacaaggacacggagcagccaggggaggtgtcggccttggggccgggccgggcgggggcagggccgagtagccggggccggccgggggggccgtggggggagagcccgtccagtggcccctccagccctgagagcagtgaggatgagggcccaggccgcagctccagccccctccgcctggtgcccttctccagccccaggccccccggagagccgccgggtggggagcccctgatggaggactgcgagaagagcagcgacacttgcaaccccctgtcaggcgccttctcaggagtgtccaacattttcagcttctggggggacagtcggggccgccagtaccaggagctccctcgatgccccgcccccacccccagcctcctcaacatccccctctccagcccgggtcggcggccccggggcgacgtggagagcaggctggatgccctccagcgccagctcaacaggctggagacccggctgagtgcagacatggccactgtcctgcagctgctacagaggcagatgacgctggtcccgcccgcctacagtgctgtgaccaccccggggcctggccccacttccacatccccgctgttgcccgtcagccccctccccaccctcaccttggactcgctttctcaggtttcccagttcatggcgtgtgaggagctgcccccgggggccccagagcttccccaagaaggccccacacgacgcctctccctaccgggccagctgggggccctcacctcccagcccctgcacagacacggctcggacccgggcagttagtggggctgcccagtgtggacacgtggctcacccagggatcaaggcgctgctgggccgctccccttggaggccctgctcaggaggccctgaccgtggaaggggagaggaactcgaaagcacagctcctcccccagcccttgggaccatcttctcctgcagtcccctgggccccagtgagaggggcaggggcagggccggcagtaggtggggcctgtggtccccccactgccctgagggcattagctggtctaactgcccggaggcacccggccctgggccttaggcacctcaaggacttttctgctatttactgctcttattgttaaggataataattaaggatcatatgaataattaatgaagatgctgatgactatgaataataaataattatcctgaggaga

SEQ ID NO: 243 - DNA, 3884 bp, Homo sapiens
  source 1..3884: mol_type = genomic DNA
  misc_feature 1..3884: note = cDNA of KCNH2 gene SNP c.1749C>G (p.Ile583Met)
atgccggtgcggaggggccacgtcgcgccgcagaacaccttcctggacaccatcatccgcaagtttgagggccagagccgtaagttcatcatcgccaacgctcgggtggagaactgcgccgtcatctactgcaacgacggcttctgcgagctgtgcggctactcgcgggccgaggtgatgcagcgaccctgcacctgcgacttcctgcacgggccgcgcacgcagcgccgcgctgccgcgcagatcgcgcaggcactgctgggcgccgaggagcgcaaagtggaaatcgccttctaccggaaagatgggagctgcttcctatgtctggtggatgtggtgcccgtgaagaacgaggatggggctgtcatcatgttcatcctcaatttcgaggtggtgatggagaaggacatggtggggtccccggctcatgacaccaaccaccggggcccccccaccagctggctggccccaggccgcgccaagaccttccgcctgaagctgcccgcgctgctggcgctgacggcccgggagtcgtcggtgcggtcgggcggcgcgggcggcgcgggcgccccgggggccgtggtggtggacgtggacctgacgcccgcggcacccagcagcgagtcgctggccctggacgaagtgacagccatggacaaccacgtggcagggctcgggcccgcggaggagcggcgtgcgctggtgggtcccggctctccgccccgcagcgcgcccggccagctcccatcgccccgggcgcacagcctcaaccccgacgcctcgggctccagctgcagcctggcccggacgcgctcccgagaaagctgcgccagcgtgcgccgcgcctcgtcggccgacgacatcgaggccatgcgcgccggggtgctgcccccgccaccgcgccacgccagcaccggggccatgcacccactgcgcagcggcttgctcaactccacctcggactccgacctcgtgcgctaccgcaccattagcaagattccccaaatcaccctcaactttgtggacctcaagggcgaccccttcttggcttcgcccaccagtgaccgtgagatcatagcacctaagataaaggagcgaacccacaatgtcactgagaaggtcacccaggtcctgtccctgggcgccgacgtgctgcctgagtacaagctgcaggcaccgcgcatccaccgctggaccatcctgcattacagccccttcaaggccgtgtgggactggctcatcctgctgctggtcatctacacggctgtcttcacaccctactcggctgccttcctgctgaaggagacggaagaaggcccgcctgctaccgagtgtggctacgcctgccagccgctggctgtggtggacctcatcgtggacatcatgttcattgtggacatcctcatcaacttccgcaccacctacgtcaatgccaacgaggaggtggtcagccaccccggccgcatcgccgtccactacttcaagggctggttcctcatcgacatggtggccgccatccccttcgacctgctcatcttcggctctggctctgaggagctgatcgggctgctgaagactgcgcggctgctgcggctggtgcgcgtggcgcggaagctggatcgctactcagagtacggcgcggccgtgctgttcttgctcatgtgcacctttgcgctcatcgcgcactggctagcctgcatctggtacgccatcggcaacatggagcagccacacatggactcacgcatgggctggctgcacaacctgggcgaccagataggcaaaccctacaacagcagcggcctgggcggcccctccatcaaggacaagtatgtgacggcgctctacttcaccttcagcagcctcaccagtgtgggcttcggcaacgtctctcccaacaccaactcagagaagatcttctccatctgcgtcatgctcattggctccctcatgtatgctagcatcttcggcaacgtgtcggccatcatccagcggctgtactcgggcacagcccgctaccacacacagatgctgcgggtgcgggagttcatccgcttccaccagatccccaatcccctgcgccagcgcctcgaggagtacttccagcacgcctggtcctacaccaacggcatcgacatgaacgcggtgctgaagggcttccctgagtgcctgcaggctgacatctgcctgcacctgaaccgctcactgctgcagcactgcaaacccttccgaggggccaccaagggctgccttcgggccctggccatgaagttcaagaccacacatgcaccgccaggggacacactggtgcatgctggggacctgctcaccgccctgtacttcatctcccggggctccatcgagatcctgcggggcgacgtcgtcgtggccatcctggggaagaatgacatctttggggagcctctgaacctgtatgcaaggcctggcaagtcgaacggggatgtgcgggccctcacctactgtgacctacacaagatccatcgggacgacctgctggaggtgctggacatgtaccctgagttctccgaccacttctggtccagcctggagatcaccttcaacctgcgagataccaacatgatcccgggctcccccggcagtacggagttagagggtggcttcagtcggcaacgcaagcgcaagttgtccttccgcaggcgcacggacaaggacacggagcagccaggggaggtgtcggccttggggccgggccgggcgggggcagggccgagtagccggggccggccgggggggccgtggggggagagcccgtccagtggcccctccagccctgagagcagtgaggatgagggcccaggccgcagctccagccccctccgcctggtgcccttctccagccccaggccccccggagagccgccgggtggggagcccctgatggaggactgcgagaagagcagcgacacttgcaaccccctgtcaggcgccttctcaggagtgtccaacattttcagcttctggggggacagtcggggccgccagtaccaggagctccctcgatgccccgcccccacccccagcctcctcaacatccccctctccagcccgggtcggcggccccggggcgacgtggagagcaggctggatgccctccagcgccagctcaacaggctggagacccggctgagtgcagacatggccactgtcctgcagctgctacagaggcagatgacgctggtcccgcccgcctacagtgctgtgaccaccccggggcctggccccacttccacatccccgctgttgcccgtcagccccctccccaccctcaccttggactcgctttctcaggtttcccagttcatggcgtgtgaggagctgcccccgggggccccagagcttccccaagaaggccccacacgacgcctctccctaccgggccagctgggggccctcacctcccagcccctgcacagacacggctcggacccgggcagttagtggggctgcccagtgtggacacgtggctcacccagggatcaaggcgctgctgggccgctccccttggaggccctgctcaggaggccctgaccgtggaaggggagaggaactcgaaagcacagctcctcccccagcccttgggaccatcttctcctgcagtcccctgggccccagtgagaggggcaggggcagggccggcagtaggtggggcctgtggtccccccactgccctgagggcattagctggtctaactgcccggaggcacccggccctgggccttaggcacctcaaggacttttctgctatttactgctcttattgttaaggataataattaaggatcatatgaataattaatgaagatgctgatgactatgaataataaataattatcctgaggaga

SEQ ID NO: 244 - DNA, 3884 bp, Homo sapiens
  source 1..3884: mol_type = genomic DNA
  misc_feature 1..3884: note = cDNA of KCNH2 gene SNP c.174G>C (p.Glu58Asp)
atgccggtgcggaggggccacgtcgcgccgcagaacaccttcctggacaccatcatccgcaagtttgagggccagagccgtaagttcatcatcgccaacgctcgggtggagaactgcgccgtcatctactgcaacgacggcttctgcgagctgtgcggctactcgcgggccgacgtgatgcagcgaccctgcacctgcgacttcctgcacgggccgcgcacgcagcgccgcgctgccgcgcagatcgcgcaggcactgctgggcgccgaggagcgcaaagtggaaatcgccttctaccggaaagatgggagctgcttcctatgtctggtggatgtggtgcccgtgaagaacgaggatggggctgtcatcatgttcatcctcaatttcgaggtggtgatggagaaggacatggtggggtccccggctcatgacaccaaccaccggggcccccccaccagctggctggccccaggccgcgccaagaccttccgcctgaagctgcccgcgctgctggcgctgacggcccgggagtcgtcggtgcggtcgggcggcgcgggcggcgcgggcgccccgggggccgtggtggtggacgtggacctgacgcccgcggcacccagcagcgagtcgctggccctggacgaagtgacagccatggacaaccacgtggcagggctcgggcccgcggaggagcggcgtgcgctggtgggtcccggctctccgccccgcagcgcgcccggccagctcccatcgccccgggcgcacagcctcaaccccgacgcctcgggctccagctgcagcctggcccggacgcgctcccgagaaagctgcgccagcgtgcgccgcgcctcgtcggccgacgacatcgaggccatgcgcgccggggtgctgcccccgccaccgcgccacgccagcaccggggccatgcacccactgcgcagcggcttgctcaactccacctcggactccgacctcgtgcgctaccgcaccattagcaagattccccaaatcaccctcaactttgtggacctcaagggcgaccccttcttggcttcgcccaccagtgaccgtgagatcatagcacctaagataaaggagcgaacccacaatgtcactgagaaggtcacccaggtcctgtccctgggcgccgacgtgctgcctgagtacaagctgcaggcaccgcgcatccaccgctggaccatcctgcattacagccccttcaaggccgtgtgggactggctcatcctgctgctggtcatctacacggctgtcttcacaccctactcggctgccttcctgctgaaggagacggaagaaggcccgcctgctaccgagtgtggctacgcctgccagccgctggctgtggtggacctcatcgtggacatcatgttcattgtggacatcctcatcaacttccgcaccacctacgtcaatgccaacgaggaggtggtcagccaccccggccgcatcgccgtccactacttcaagggctggttcctcatcgacatggtggccgccatccccttcgacctgctcatcttcggctctggctctgaggagctgatcgggctgctgaagactgcgcggctgctgcggctggtgcgcgtggcgcggaagctggatcgctactcagagtacggcgcggccgtgctgttcttgctcatgtgcacctttgcgctcatcgcgcactggctagcctgcatctggtacgccatcggcaacatggagcagccacacatggactcacgcatcggctggctgcacaacctgggcgaccagataggcaaaccctacaacagcagcggcctgggcggcccctccatcaaggacaagtatgtgacggcgctctacttcaccttcagcagcctcaccagtgtgggcttcggcaacgtctctcccaacaccaactcagagaagatcttctccatctgcgtcatgctcattggctccctcatgtatgctagcatcttcggcaacgtgtcggccatcatccagcggctgtactcgggcacagcccgctaccacacacagatgctgcgggtgcgggagttcatccgcttccaccagatccccaatcccctgcgccagcgcctcgaggagtacttccagcacgcctggtcctacaccaacggcatcgacatgaacgcggtgctgaagggcttccctgagtgcctgcaggctgacatctgcctgcacctgaaccgctcactgctgcagcactgcaaacccttccgaggggccaccaagggctgccttcgggccctggccatgaagttcaagaccacacatgcaccgccaggggacacactggtgcatgctggggacctgctcaccgccctgtacttcatctcccggggctccatcgagatcctgcggggcgacgtcgtcgtggccatcctggggaagaatgacatctttggggagcctctgaacctgtatgcaaggcctggcaagtcgaacggggatgtgcgggccctcacctactgtgacctacacaagatccatcgggacgacctgctggaggtgctggacatgtaccctgagttctccgaccacttctggtccagcctggagatcaccttcaacctgcgagataccaacatgatcccgggctcccccggcagtacggagttagagggtggcttcagtcggcaacgcaagcgcaagttgtccttccgcaggcgcacggacaaggacacggagcagccaggggaggtgtcggccttggggccgggccgggcgggggcagggccgagtagccggggccggccgggggggccgtggggggagagcccgtccagtggcccctccagccctgagagcagtgaggatgagggcccaggccgcagctccagccccctccgcctggtgcccttctccagccccaggccccccggagagccgccgggtggggagcccctgatggaggactgcgagaagagcagcgacacttgcaaccccctgtcaggcgccttctcaggagtgtccaacattttcagcttctggggggacagtcggggccgccagtaccaggagctccctcgatgccccgcccccacccccagcctcctcaacatccccctctccagcccgggtcggcggccccggggcgacgtggagagcaggctggatgccctccagcgccagctcaacaggctggagacccggctgagtgcagacatggccactgtcctgcagctgctacagaggcagatgacgctggtcccgcccgcctacagtgctgtgaccaccccggggcctggccccacttccacatccccgctgttgcccgtcagccccctccccaccctcaccttggactcgctttctcaggtttcccagttcatggcgtgtgaggagctgcccccgggggccccagagcttccccaagaaggccccacacgacgcctctccctaccgggccagctgggggccctcacctcccagcccctgcacagacacggctcggacccgggcagttagtggggctgcccagtgtggacacgtggctcacccagggatcaaggcgctgctgggccgctccccttggaggccctgctcaggaggccctgaccgtggaaggggagaggaactcgaaagcacagctcctcccccagcccttgggaccatcttctcctgcagtcccctgggccccagtgagaggggcaggggcagggccggcagtaggtggggcctgtggtccccccactgccctgagggcattagctggtctaactgcccggaggcacccggccctgggccttaggcacctcaaggacttttctgctatttactgctcttattgttaaggataataattaaggatcatatgaataattaatgaagatgctgatgactatgaataataaataattatcctgaggaga

SEQ ID NO: 245 - DNA, 3884 bp, Homo sapiens
  source 1..3884: mol_type = genomic DNA
  misc_feature 1..3884: note = cDNA of KCNH2 gene SNP c.1750G>A (p.Gly584Ser)
atgccggtgcggaggggccacgtcgcgccgcagaacaccttcctggacaccatcatccgcaagtttgagggccagagccgtaagttcatcatcgccaacgctcgggtggagaactgcgccgtcatctactgcaacgacggcttctgcgagctgtgcggctactcgcgggccgaggtgatgcagcgaccctgcacctgcgacttcctgcacgggccgcgcacgcagcgccgcgctgccgcgcagatcgcgcaggcactgctgggcgccgaggagcgcaaagtggaaatcgccttctaccggaaagatgggagctgcttcctatgtctggtggatgtggtgcccgtgaagaacgaggatggggctgtcatcatgttcatcctcaatttcgaggtggtgatggagaaggacatggtggggtccccggctcatgacaccaaccaccggggcccccccaccagctggctggccccaggccgcgccaagaccttccgcctgaagctgcccgcgctgctggcgctgacggcccgggagtcgtcggtgcggtcgggcggcgcgggcggcgcgggcgccccgggggccgtggtggtggacgtggacctgacgcccgcggcacccagcagcgagtcgctggccctggacgaagtgacagccatggacaaccacgtggcagggctcgggcccgcggaggagcggcgtgcgctggtgggtcccggctctccgccccgcagcgcgcccggccagctcccatcgccccgggcgcacagcctcaaccccgacgcctcgggctccagctgcagcctggcccggacgcgctcccgagaaagctgcgccagcgtgcgccgcgcctcgtcggccgacgacatcgaggccatgcgcgccggggtgctgcccccgccaccgcgccacgccagcaccggggccatgcacccactgcgcagcggcttgctcaactccacctcggactccgacctcgtgcgctaccgcaccattagcaagattccccaaatcaccctcaactttgtggacctcaagggcgaccccttcttggcttcgcccaccagtgaccgtgagatcatagcacctaagataaaggagcgaacccacaatgtcactgagaaggtcacccaggtcctgtccctgggcgccgacgtgctgcctgagtacaagctgcaggcaccgcgcatccaccgctggaccatcctgcattacagccccttcaaggccgtgtgggactggctcatcctgctgctggtcatctacacggctgtcttcacaccctactcggctgccttcctgctgaaggagacggaagaaggcccgcctgctaccgagtgtggctacgcctgccagccgctggctgtggtggacctcatcgtggacatcatgttcattgtggacatcctcatcaacttccgcaccacctacgtcaatgccaacgaggaggtggtcagccaccccggccgcatcgccgtccactacttcaagggctggttcctcatcgacatggtggccgccatccccttcgacctgctcatcttcggctctggctctgaggagctgatcgggctgctgaagactgcgcggctgctgcggctggtgcgcgtggcgcggaagctggatcgctactcagagtacggcgcggccgtgctgttcttgctcatgtgcacctttgcgctcatcgcgcactggctagcctgcatctggtacgccatcggcaacatggagcagccacacatggactcacgcatcagctggctgcacaacctgggcgaccagataggcaaaccctacaacagcagcggcctgggcggcccctccatcaaggacaagtatgtgacggcgctctacttcaccttcagcagcctcaccagtgtgggcttcggcaacgtctctcccaacaccaactcagagaagatcttctccatctgcgtcatgctcattggctccctcatgtatgctagcatcttcggcaacgtgtcggccatcatccagcggctgtactcgggcacagcccgctaccacacacagatgctgcgggtgcgggagttcatccgcttccaccagatccccaatcccctgcgccagcgcctcgaggagtacttccagcacgcctggtcctacaccaacggcatcgacatgaacgcggtgctgaagggcttccctgagtgcctgcaggctgacatctgcctgcacctgaaccgctcactgctgcagcactgcaaacccttccgaggggccaccaagggctgccttcgggccctggccatgaagttcaagaccacacatgcaccgccaggggacacactggtgcatgctggggacctgctcaccgccctgtacttcatctcccggggctccatcgagatcctgcggggcgacgtcgtcgtggccatcctggggaagaatgacatctttggggagcctctgaacctgtatgcaaggcctggcaagtcgaacggggatgtgcgggccctcacctactgtgacctacacaagatccatcgggacgacctgctggaggtgctggacatgtaccctgagttctccgaccacttctggtccagcctggagatcaccttcaacctgcgagataccaacatgatcccgggctcccccggcagtacggagttagagggtggcttcagtcggcaacgcaagcgcaagttgtccttccgcaggcgcacggacaaggacacggagcagccaggggaggtgtcggccttggggccgggccgggcgggggcagggccgagtagccggggccggccgggggggccgtggggggagagcccgtccagtggcccctccagccctgagagcagtgaggatgagggcccaggccgcagctccagccccctccgcctggtgcccttctccagccccaggccccccggagagccgccgggtggggagcccctgatggaggactgcgagaagagcagcgacacttgcaaccccctgtcaggcgccttctcaggagtgtccaacattttcagcttctggggggacagtcggggccgccagtaccaggagctccctcgatgccccgcccccacccccagcctcctcaacatccccctctccagcccgggtcggcggccccggggcgacgtggagagcaggctggatgccctccagcgccagctcaacaggctggagacccggctgagtgcagacatggccactgtcctgcagctgctacagaggcagatgacgctggtcccgcccgcctacagtgctgtgaccaccccggggcctggccccacttccacatccccgctgttgcccgtcagccccctccccaccctcaccttggactcgctttctcaggtttcccagttcatggcgtgtgaggagctgcccccgggggccccagagcttccccaagaaggccccacacgacgcctctccctaccgggccagctgggggccctcacctcccagcccctgcacagacacggctcggacccgggcagttagtggggctgcccagtgtggacacgtggctcacccagggatcaaggcgctgctgggccgctccccttggaggccctgctcaggaggccctgaccgtggaaggggagaggaactcgaaagcacagctcctcccccagcccttgggaccatcttctcctgcagtcccctgggccccagtgagaggggcaggggcagggccggcagtaggtggggcctgtggtccccccactgccctgagggcattagctggtctaactgcccggaggcacccggccctgggccttaggcacctcaaggacttttctgctatttactgctcttattgttaaggataataattaaggatcatatgaataattaatgaagatgctgatgactatgaataataaataattatcctgaggaga

SEQ ID NO: 246 - DNA, 3884 bp, Homo sapiens
  source 1..3884: mol_type = genomic DNA
  misc_feature 1..3884: note = cDNA of KCNH2 gene SNP c.1750G>C (p.Gly584Arg)
atgccggtgcggaggggccacgtcgcgccgcagaacaccttcctggacaccatcatccgcaagtttgagggccagagccgtaagttcatcatcgccaacgctcgggtggagaactgcgccgtcatctactgcaacgacggcttctgcgagctgtgcggctactcgcgggccgaggtgatgcagcgaccctgcacctgcgacttcctgcacgggccgcgcacgcagcgccgcgctgccgcgcagatcgcgcaggcactgctgggcgccgaggagcgcaaagtggaaatcgccttctaccggaaagatgggagctgcttcctatgtctggtggatgtggtgcccgtgaagaacgaggatggggctgtcatcatgttcatcctcaatttcgaggtggtgatggagaaggacatggtggggtccccggctcatgacaccaaccaccggggcccccccaccagctggctggccccaggccgcgccaagaccttccgcctgaagctgcccgcgctgctggcgctgacggcccgggagtcgtcggtgcggtcgggcggcgcgggcggcgcgggcgccccgggggccgtggtggtggacgtggacctgacgcccgcggcacccagcagcgagtcgctggccctggacgaagtgacagccatggacaaccacgtggcagggctcgggcccgcggaggagcggcgtgcgctggtgggtcccggctctccgccccgcagcgcgcccggccagctcccatcgccccgggcgcacagcctcaaccccgacgcctcgggctccagctgcagcctggcccggacgcgctcccgagaaagctgcgccagcgtgcgccgcgcctcgtcggccgacgacatcgaggccatgcgcgccggggtgctgcccccgccaccgcgccacgccagcaccggggccatgcacccactgcgcagcggcttgctcaactccacctcggactccgacctcgtgcgctaccgcaccattagcaagattccccaaatcaccctcaactttgtggacctcaagggcgaccccttcttggcttcgcccaccagtgaccgtgagatcatagcacctaagataaaggagcgaacccacaatgtcactgagaaggtcacccaggtcctgtccctgggcgccgacgtgctgcctgagtacaagctgcaggcaccgcgcatccaccgctggaccatcctgcattacagccccttcaaggccgtgtgggactggctcatcctgctgctggtcatctacacggctgtcttcacaccctactcggctgccttcctgctgaaggagacggaagaaggcccgcctgctaccgagtgtggctacgcctgccagccgctggctgtggtggacctcatcgtggacatcatgttcattgtggacatcctcatcaacttccgcaccacctacgtcaatgccaacgaggaggtggtcagccaccccggccgcatcgccgtccactacttcaagggctggttcctcatcgacatggtggccgccatccccttcgacctgctcatcttcggctctggctctgaggagctgatcgggctgctgaagactgcgcggctgctgcggctggtgcgcgtggcgcggaagctggatcgctactcagagtacggcgcggccgtgctgttcttgctcatgtgcacctttgcgctcatcgcgcactggctagcctgcatctggtacgccatcggcaacatggagcagccacacatggactcacgcatccgctggctgcacaacctgggcgaccagataggcaaaccctacaacagcagcggcctgggcggcccctccatcaaggacaagtatgtgacggcgctctacttcaccttcagcagcctcaccagtgtgggcttcggcaacgtctctcccaacaccaactcagagaagatcttctccatctgcgtcatgctcattggctccctcatgtatgctagcatcttcggcaacgtgtcggccatcatccagcggctgtactcgggcacagcccgctaccacacacagatgctgcgggtgcgggagttcatccgcttccaccagatccccaatcccctgcgccagcgcctcgaggagtacttccagcacgcctggtcctacaccaacggcatcgacatgaacgcggtgctgaagggcttccctgagtgcctgcaggctgacatctgcctgcacctgaaccgctcactgctgcagcactgcaaacccttccgaggggccaccaagggctgccttcgggccctggccatgaagttcaagaccacacatgcaccgccaggggacacactggtgcatgctggggacctgctcaccgccctgtacttcatctcccggggctccatcgagatcctgcggggcgacgtcgtcgtggccatcctggggaagaatgacatctttggggagcctctgaacctgtatgcaaggcctggcaagtcgaacggggatgtgcgggccctcacctactgtgacctacacaagatccatcgggacgacctgctggaggtgctggacatgtaccctgagttctccgaccacttctggtccagcctggagatcaccttcaacctgcgagataccaacatgatcccgggctcccccggcagtacggagttagagggtggcttcagtcggcaacgcaagcgcaagttgtccttccgcaggcgcacggacaaggacacggagcagccaggggaggtgtcggccttggggccgggccgggcgggggcagggccgagtagccggggccggccgggggggccgtggggggagagcccgtccagtggcccctccagccctgagagcagtgaggatgagggcccaggccgcagctccagccccctccgcctggtgcccttctccagccccaggccccccggagagccgccgggtggggagcccctgatggaggactgcgagaagagcagcgacacttgcaaccccctgtcaggcgccttctcaggagtgtccaacattttcagcttctggggggacagtcggggccgccagtaccaggagctccctcgatgccccgcccccacccccagcctcctcaacatccccctctccagcccgggtcggcggccccggggcgacgtggagagcaggctggatgccctccagcgccagctcaacaggctggagacccggctgagtgcagacatggccactgtcctgcagctgctacagaggcagatgacgctggtcccgcccgcctacagtgctgtgaccaccccggggcctggccccacttccacatccccgctgttgcccgtcagccccctccccaccctcaccttggactcgctttctcaggtttcccagttcatggcgtgtgaggagctgcccccgggggccccagagcttccccaagaaggccccacacgacgcctctccctaccgggccagctgggggccctcacctcccagcccctgcacagacacggctcggacccgggcagttagtggggctgcccagtgtggacacgtggctcacccagggatcaaggcgctgctgggccgctccccttggaggccctgctcaggaggccctgaccgtggaaggggagaggaactcgaaagcacagctcctcccccagcccttgggaccatcttctcctgcagtcccctgggccccagtgagaggggcaggggcagggccggcagtaggtggggcctgtggtccccccactgccctgagggcattagctggtctaactgcccggaggcacccggccctgggccttaggcacctcaaggacttttctgctatttactgctcttattgttaaggataataattaaggatcatatgaataattaatgaagatgctgatgactatgaataataaataattatcctgaggaga

SEQ ID NO: 247 - DNA, 3884 bp, Homo sapiens
  source 1..3884: mol_type = genomic DNA
  misc_feature 1..3884: note = cDNA of KCNH2 gene SNP c.1750G>T (p.Gly584Cys)
atgccggtgcggaggggccacgtcgcgccgcagaacaccttcctggacaccatcatccgcaagtttgagggccagagccgtaagttcatcatcgccaacgctcgggtggagaactgcgccgtcatctactgcaacgacggcttctgcgagctgtgcggctactcgcgggccgaggtgatgcagcgaccctgcacctgcgacttcctgcacgggccgcgcacgcagcgccgcgctgccgcgcagatcgcgcaggcactgctgggcgccgaggagcgcaaagtggaaatcgccttctaccggaaagatgggagctgcttcctatgtctggtggatgtggtgcccgtgaagaacgaggatggggctgtcatcatgttcatcctcaatttcgaggtggtgatggagaaggacatggtggggtccccggctcatgacaccaaccaccggggcccccccaccagctggctggccccaggccgcgccaagaccttccgcctgaagctgcccgcgctgctggcgctgacggcccgggagtcgtcggtgcggtcgggcggcgcgggcggcgcgggcgccccgggggccgtggtggtggacgtggacctgacgcccgcggcacccagcagcgagtcgctggccctggacgaagtgacagccatggacaaccacgtggcagggctcgggcccgcggaggagcggcgtgcgctggtgggtcccggctctccgccccgcagcgcgcccggccagctcccatcgccccgggcgcacagcctcaaccccgacgcctcgggctccagctgcagcctggcccggacgcgctcccgagaaagctgcgccagcgtgcgccgcgcctcgtcggccgacgacatcgaggccatgcgcgccggggtgctgcccccgccaccgcgccacgccagcaccggggccatgcacccactgcgcagcggcttgctcaactccacctcggactccgacctcgtgcgctaccgcaccattagcaagattccccaaatcaccctcaactttgtggacctcaagggcgaccccttcttggcttcgcccaccagtgaccgtgagatcatagcacctaagataaaggagcgaacccacaatgtcactgagaaggtcacccaggtcctgtccctgggcgccgacgtgctgcctgagtacaagctgcaggcaccgcgcatccaccgctggaccatcctgcattacagccccttcaaggccgtgtgggactggctcatcctgctgctggtcatctacacggctgtcttcacaccctactcggctgccttcctgctgaaggagacggaagaaggcccgcctgctaccgagtgtggctacgcctgccagccgctggctgtggtggacctcatcgtggacatcatgttcattgtggacatcctcatcaacttccgcaccacctacgtcaatgccaacgaggaggtggtcagccaccccggccgcatcgccgtccactacttcaagggctggttcctcatcgacatggtggccgccatccccttcgacctgctcatcttcggctctggctctgaggagctgatcgggctgctgaagactgcgcggctgctgcggctggtgcgcgtggcgcggaagctggatcgctactcagagtacggcgcggccgtgctgttcttgctcatgtgcacctttgcgctcatcgcgcactggctagcctgcatctggtacgccatcggcaacatggagcagccacacatggactcacgcatctgctggctgcacaacctgggcgaccagataggcaaaccctacaacagcagcggcctgggcggcccctccatcaaggacaagtatgtgacggcgctctacttcaccttcagcagcctcaccagtgtgggcttcggcaacgtctctcccaacaccaactcagagaagatcttctccatctgcgtcatgctcattggctccctcatgtatgctagcatcttcggcaacgtgtcggccatcatccagcggctgtactcgggcacagcccgctaccacacacagatgctgcgggtgcgggagttcatccgcttccaccagatccccaatcccctgcgccagcgcctcgaggagtacttccagcacgcctggtcctacaccaacggcatcgacatgaacgcggtgctgaagggcttccctgagtgcctgcaggctgacatctgcctgcacctgaaccgctcactgctgcagcactgcaaacccttccgaggggccaccaagggctgccttcgggccctggccatgaagttcaagaccacacatgcaccgccaggggacacactggtgcatgctggggacctgctcaccgccctgtacttcatctcccggggctccatcgagatcctgcggggcgacgtcgtcgtggccatcctggggaagaatgacatctttggggagcctctgaacctgtatgcaaggcctggcaagtcgaacggggatgtgcgggccctcacctactgtgacctacacaagatccatcgggacgacctgctggaggtgctggacatgtaccctgagttctccgaccacttctggtccagcctggagatcaccttcaacctgcgagataccaacatgatcccgggctcccccggcagtacggagttagagggtggcttcagtcggcaacgcaagcgcaagttgtccttccgcaggcgcacggacaaggacacggagcagccaggggaggtgtcggccttggggccgggccgggcgggggcagggccgagtagccggggccggccgggggggccgtggggggagagcccgtccagtggcccctccagccctgagagcagtgaggatgagggcccaggccgcagctccagccccctccgcctggtgcccttctccagccccaggccccccggagagccgccgggtggggagcccctgatggaggactgcgagaagagcagcgacacttgcaaccccctgtcaggcgccttctcaggagtgtccaacattttcagcttctggggggacagtcggggccgccagtaccaggagctccctcgatgccccgcccccacccccagcctcctcaacatccccctctccagcccgggtcggcggccccggggcgacgtggagagcaggctggatgccctccagcgccagctcaacaggctggagacccggctgagtgcagacatggccactgtcctgcagctgctacagaggcagatgacgctggtcccgcccgcctacagtgctgtgaccaccccggggcctggccccacttccacatccccgctgttgcccgtcagccccctccccaccctcaccttggactcgctttctcaggtttcccagttcatggcgtgtgaggagctgcccccgggggccccagagcttccccaagaaggccccacacgacgcctctccctaccgggccagctgggggccctcacctcccagcccctgcacagacacggctcggacccgggcagttagtggggctgcccagtgtggacacgtggctcacccagggatcaaggcgctgctgggccgctccccttggaggccctgctcaggaggccctgaccgtggaaggggagaggaactcgaaagcacagctcctcccccagcccttgggaccatcttctcctgcagtcccctgggccccagtgagaggggcaggggcagggccggcagtaggtggggcctgtggtccccccactgccctgagggcattagctggtctaactgcccggaggcacccggccctgggccttaggcacctcaaggacttttctgctatttactgctcttattgttaaggataataattaaggatcatatgaataattaatgaagatgctgatgactatgaataataaataattatcctgaggaga

SEQ ID NO: 248 - DNA, 3884 bp, Homo sapiens
  source 1..3884: mol_type = genomic DNA
  misc_feature 1..3884: note = cDNA of KCNH2 gene SNP c.1751G>T (p.Gly584Val)
atgccggtgcggaggggccacgtcgcgccgcagaacaccttcctggacaccatcatccgcaagtttgagggccagagccgtaagttcatcatcgccaacgctcgggtggagaactgcgccgtcatctactgcaacgacggcttctgcgagctgtgcggctactcgcgggccgaggtgatgcagcgaccctgcacctgcgacttcctgcacgggccgcgcacgcagcgccgcgctgccgcgcagatcgcgcaggcactgctgggcgccgaggagcgcaaagtggaaatcgccttctaccggaaagatgggagctgcttcctatgtctggtggatgtggtgcccgtgaagaacgaggatggggctgtcatcatgttcatcctcaatttcgaggtggtgatggagaaggacatggtggggtccccggctcatgacaccaaccaccggggcccccccaccagctggctggccccaggccgcgccaagaccttccgcctgaagctgcccgcgctgctggcgctgacggcccgggagtcgtcggtgcggtcgggcggcgcgggcggcgcgggcgccccgggggccgtggtggtggacgtggacctgacgcccgcggcacccagcagcgagtcgctggccctggacgaagtgacagccatggacaaccacgtggcagggctcgggcccgcggaggagcggcgtgcgctggtgggtcccggctctccgccccgcagcgcgcccggccagctcccatcgccccgggcgcacagcctcaaccccgacgcctcgggctccagctgcagcctggcccggacgcgctcccgagaaagctgcgccagcgtgcgccgcgcctcgtcggccgacgacatcgaggccatgcgcgccggggtgctgcccccgccaccgcgccacgccagcaccggggccatgcacccactgcgcagcggcttgctcaactccacctcggactccgacctcgtgcgctaccgcaccattagcaagattccccaaatcaccctcaactttgtggacctcaagggcgaccccttcttggcttcgcccaccagtgaccgtgagatcatagcacctaagataaaggagcgaacccacaatgtcactgagaaggtcacccaggtcctgtccctgggcgccgacgtgctgcctgagtacaagctgcaggcaccgcgcatccaccgctggaccatcctgcattacagccccttcaaggccgtgtgggactggctcatcctgctgctggtcatctacacggctgtcttcacaccctactcggctgccttcctgctgaaggagacggaagaaggcccgcctgctaccgagtgtggctacgcctgccagccgctggctgtggtggacctcatcgtggacatcatgttcattgtggacatcctcatcaacttccgcaccacctacgtcaatgccaacgaggaggtggtcagccaccccggccgcatcgccgtccactacttcaagggctggttcctcatcgacatggtggccgccatccccttcgacctgctcatcttcggctctggctctgaggagctgatcgggctgctgaagactgcgcggctgctgcggctggtgcgcgtggcgcggaagctggatcgctactcagagtacggcgcggccgtgctgttcttgctcatgtgcacctttgcgctcatcgcgcactggctagcctgcatctggtacgccatcggcaacatggagcagccacacatggactcacgcatcgtctggctgcacaacctgggcgaccagataggcaaaccctacaacagcagcggcctgggcggcccctccatcaaggacaagtatgtgacggcgctctacttcaccttcagcagcctcaccagtgtgggcttcggcaacgtctctcccaacaccaactcagagaagatcttctccatctgcgtcatgctcattggctccctcatgtatgctagcatcttcggcaacgtgtcggccatcatccagcggctgtactcgggcacagcccgctaccacacacagatgctgcgggtgcgggagttcatccgcttccaccagatccccaatcccctgcgccagcgcctcgaggagtacttccagcacgcctggtcctacaccaacggcatcgacatgaacgcggtgctgaagggcttccctgagtgcctgcaggctgacatctgcctgcacctgaaccgctcactgctgcagcactgcaaacccttccgaggggccaccaagggctgccttcgggccctggccatgaagttcaagaccacacatgcaccgccaggggacacactggtgcatgctggggacctgctcaccgccctgtacttcatctcccggggctccatcgagatcctgcggggcgacgtcgtcgtggccatcctggggaagaatgacatctttggggagcctctgaacctgtatgcaaggcctggcaagtcgaacggggatgtgcgggccctcacctactgtgacctacacaagatccatcgggacgacctgctggaggtgctggacatgtaccctgagttctccgaccacttctggtccagcctggagatcaccttcaacctgcgagataccaacatgatcccgggctcccccggcagtacggagttagagggtggcttcagtcggcaacgcaagcgcaagttgtccttccgcaggcgcacggacaaggacacggagcagccaggggaggtgtcggccttggggccgggccgggcgggggcagggccgagtagccggggccggccgggggggccgtggggggagagcccgtccagtggcccctccagccctgagagcagtgaggatgagggcccaggccgcagctccagccccctccgcctggtgcccttctccagccccaggccccccggagagccgccgggtggggagcccctgatggaggactgcgagaagagcagcgacacttgcaaccccctgtcaggcgccttctcaggagtgtccaacattttcagcttctggggggacagtcggggccgccagtaccaggagctccctcgatgccccgcccccacccccagcctcctcaacatccccctctccagcccgggtcggcggccccggggcgacgtggagagcaggctggatgccctccagcgccagctcaacaggctggagacccggctgagtgcagacatggccactgtcctgcagctgctacagaggcagatgacgctggtcccgcccgcctacagtgctgtgaccaccccggggcctggccccacttccacatccccgctgttgcccgtcagccccctccccaccctcaccttggactcgctttctcaggtttcccagttcatggcgtgtgaggagctgcccccgggggccccagagcttccccaagaaggccccacacgacgcctctccctaccgggccagctgggggccctcacctcccagcccctgcacagacacggctcggacccgggcagttagtggggctgcccagtgtggacacgtggctcacccagggatcaaggcgctgctgggccgctccccttggaggccctgctcaggaggccctgaccgtggaaggggagaggaactcgaaagcacagctcctcccccagcccttgggaccatcttctcctgcagtcccctgggccccagtgagaggggcaggggcagggccggcagtaggtggggcctgtggtccccccactgccctgagggcattagctggtctaactgcccggaggcacccggccctgggccttaggcacctcaaggacttttctgctatttactgctcttattgttaaggataataattaaggatcatatgaataattaatgaagatgctgatgactatgaataataaataattatcctgaggaga

SEQ ID NO: 249 - DNA, 3884 bp, Homo sapiens
  source 1..3884: mol_type = genomic DNA
  misc_feature 1..3884: note = cDNA of KCNH2 gene SNP c.1754G>T (p.Trp585Leu)
atgccggtgcggaggggccacgtcgcgccgcagaacaccttcctggacaccatcatccgcaagtttgagggccagagccgtaagttcatcatcgccaacgctcgggtggagaactgcgccgtcatctactgcaacgacggcttctgcgagctgtgcggctactcgcgggccgaggtgatgcagcgaccctgcacctgcgacttcctgcacgggccgcgcacgcagcgccgcgctgccgcgcagatcgcgcaggcactgctgggcgccgaggagcgcaaagtggaaatcgccttctaccggaaagatgggagctgcttcctatgtctggtggatgtggtgcccgtgaagaacgaggatggggctgtcatcatgttcatcctcaatttcgaggtggtgatggagaaggacatggtggggtccccggctcatgacaccaaccaccggggcccccccaccagctggctggccccaggccgcgccaagaccttccgcctgaagctgcccgcgctgctggcgctgacggcccgggagtcgtcggtgcggtcgggcggcgcgggcggcgcgggcgccccgggggccgtggtggtggacgtggacctgacgcccgcggcacccagcagcgagtcgctggccctggacgaagtgacagccatggacaaccacgtggcagggctcgggcccgcggaggagcggcgtgcgctggtgggtcccggctctccgccccgcagcgcgcccggccagctcccatcgccccgggcgcacagcctcaaccccgacgcctcgggctccagctgcagcctggcccggacgcgctcccgagaaagctgcgccagcgtgcgccgcgcctcgtcggccgacgacatcgaggccatgcgcgccggggtgctgcccccgccaccgcgccacgccagcaccggggccatgcacccactgcgcagcggcttgctcaactccacctcggactccgacctcgtgcgctaccgcaccattagcaagattccccaaatcaccctcaactttgtggacctcaagggcgaccccttcttggcttcgcccaccagtgaccgtgagatcatagcacctaagataaaggagcgaacccacaatgtcactgagaaggtcacccaggtcctgtccctgggcgccgacgtgctgcctgagtacaagctgcaggcaccgcgcatccaccgctggaccatcctgcattacagccccttcaaggccgtgtgggactggctcatcctgctgctggtcatctacacggctgtcttcacaccctactcggctgccttcctgctgaaggagacggaagaaggcccgcctgctaccgagtgtggctacgcctgccagccgctggctgtggtggacctcatcgtggacatcatgttcattgtggacatcctcatcaacttccgcaccacctacgtcaatgccaacgaggaggtggtcagccaccccggccgcatcgccgtccactacttcaagggctggttcctcatcgacatggtggccgccatccccttcgacctgctcatcttcggctctggctctgaggagctgatcgggctgctgaagactgcgcggctgctgcggctggtgcgcgtggcgcggaagctggatcgctactcagagtacggcgcggccgtgctgttcttgctcatgtgcacctttgcgctcatcgcgcactggctagcctgcatctggtacgccatcggcaacatggagcagccacacatggactcacgcatcggcttgctgcacaacctgggcgaccagataggcaaaccctacaacagcagcggcctgggcggcccctccatcaaggacaagtatgtgacggcgctctacttcaccttcagcagcctcaccagtgtgggcttcggcaacgtctctcccaacaccaactcagagaagatcttctccatctgcgtcatgctcattggctccctcatgtatgctagcatcttcggcaacgtgtcggccatcatccagcggctgtactcgggcacagcccgctaccacacacagatgctgcgggtgcgggagttcatccgcttccaccagatccccaatcccctgcgccagcgcctcgaggagtacttccagcacgcctggtcctacaccaacggcatcgacatgaacgcggtgctgaagggcttccctgagtgcctgcaggctgacatctgcctgcacctgaaccgctcactgctgcagcactgcaaacccttccgaggggccaccaagggctgccttcgggccctggccatgaagttcaagaccacacatgcaccgccaggggacacactggtgcatgctggggacctgctcaccgccctgtacttcatctcccggggctccatcgagatcctgcggggcgacgtcgtcgtggccatcctggggaagaatgacatctttggggagcctctgaacctgtatgcaaggcctggcaagtcgaacggggatgtgcgggccctcacctactgtgacctacacaagatccatcgggacgacctgctggaggtgctggacatgtaccctgagttctccgaccacttctggtccagcctggagatcaccttcaacctgcgagataccaacatgatcccgggctcccccggcagtacggagttagagggtggcttcagtcggcaacgcaagcgcaagttgtccttccgcaggcgcacggacaaggacacggagcagccaggggaggtgtcggccttggggccgggccgggcgggggcagggccgagtagccggggccggccgggggggccgtggggggagagcccgtccagtggcccctccagccctgagagcagtgaggatgagggcccaggccgcagctccagccccctccgcctggtgcccttctccagccccaggccccccggagagccgccgggtggggagcccctgatggaggactgcgagaagagcagcgacacttgcaaccccctgtcaggcgccttctcaggagtgtccaacattttcagcttctggggggacagtcggggccgccagtaccaggagctccctcgatgccccgcccccacccccagcctcctcaacatccccctctccagcccgggtcggcggccccggggcgacgtggagagcaggctggatgccctccagcgccagctcaacaggctggagacccggctgagtgcagacatggccactgtcctgcagctgctacagaggcagatgacgctggtcccgcccgcctacagtgctgtgaccaccccggggcctggccccacttccacatccccgctgttgcccgtcagccccctccccaccctcaccttggactcgctttctcaggtttcccagttcatggcgtgtgaggagctgcccccgggggccccagagcttccccaagaaggccccacacgacgcctctccctaccgggccagctgggggccctcacctcccagcccctgcacagacacggctcggacccgggcagttagtggggctgcccagtgtggacacgtggctcacccagggatcaaggcgctgctgggccgctccccttggaggccctgctcaggaggccctgaccgtggaaggggagaggaactcgaaagcacagctcctcccccagcccttgggaccatcttctcctgcagtcccctgggccccagtgagaggggcaggggcagggccggcagtaggtggggcctgtggtccccccactgccctgagggcattagctggtctaactgcccggaggcacccggccctgggccttaggcacctcaaggacttttctgctatttactgctcttattgttaaggataataattaaggatcatatgaataattaatgaagatgctgatgactatgaataataaataattatcctgaggaga

SEQ ID NO: 250 - DNA, 3884 bp, Homo sapiens
  source 1..3884: mol_type = genomic DNA
  misc_feature 1..3884: note = cDNA of KCNH2 gene SNP c.1755G>C (p.Trp585Cys)
atgccggtgcggaggggccacgtcgcgccgcagaacaccttcctggacaccatcatccgcaagtttgagggccagagccgtaagttcatcatcgccaacgctcgggtggagaactgcgccgtcatctactgcaacgacggcttctgcgagctgtgcggctactcgcgggccgaggtgatgcagcgaccctgcacctgcgacttcctgcacgggccgcgcacgcagcgccgcgctgccgcgcagatcgcgcaggcactgctgggcgccgaggagcgcaaagtggaaatcgccttctaccggaaagatgggagctgcttcctatgtctggtggatgtggtgcccgtgaagaacgaggatggggctgtcatcatgttcatcctcaatttcgaggtggtgatggagaaggacatggtggggtccccggctcatgacaccaaccaccggggcccccccaccagctggctggccccaggccgcgccaagaccttccgcctgaagctgcccgcgctgctggcgctgacggcccgggagtcgtcggtgcggtcgggcggcgcgggcggcgcgggcgccccgggggccgtggtggtggacgtggacctgacgcccgcggcacccagcagcgagtcgctggccctggacgaagtgacagccatggacaaccacgtggcagggctcgggcccgcggaggagcggcgtgcgctggtgggtcccggctctccgccccgcagcgcgcccggccagctcccatcgccccgggcgcacagcctcaaccccgacgcctcgggctccagctgcagcctggcccggacgcgctcccgagaaagctgcgccagcgtgcgccgcgcctcgtcggccgacgacatcgaggccatgcgcgccggggtgctgcccccgccaccgcgccacgccagcaccggggccatgcacccactgcgcagcggcttgctcaactccacctcggactccgacctcgtgcgctaccgcaccattagcaagattccccaaatcaccctcaactttgtggacctcaagggcgaccccttcttggcttcgcccaccagtgaccgtgagatcatagcacctaagataaaggagcgaacccacaatgtcactgagaaggtcacccaggtcctgtccctgggcgccgacgtgctgcctgagtacaagctgcaggcaccgcgcatccaccgctggaccatcctgcattacagccccttcaaggccgtgtgggactggctcatcctgctgctggtcatctacacggctgtcttcacaccctactcggctgccttcctgctgaaggagacggaagaaggcccgcctgctaccgagtgtggctacgcctgccagccgctggctgtggtggacctcatcgtggacatcatgttcattgtggacatcctcatcaacttccgcaccacctacgtcaatgccaacgaggaggtggtcagccaccccggccgcatcgccgtccactacttcaagggctggttcctcatcgacatggtggccgccatccccttcgacctgctcatcttcggctctggctctgaggagctgatcgggctgctgaagactgcgcggctgctgcggctggtgcgcgtggcgcggaagctggatcgctactcagagtacggcgcggccgtgctgttcttgctcatgtgcacctttgcgctcatcgcgcactggctagcctgcatctggtacgccatcggcaacatggagcagccacacatggactcacgcatcggctgcctgcacaacctgggcgaccagataggcaaaccctacaacagcagcggcctgggcggcccctccatcaaggacaagtatgtgacggcgctctacttcaccttcagcagcctcaccagtgtgggcttcggcaacgtctctcccaacaccaactcagagaagatcttctccatctgcgtcatgctcattggctccctcatgtatgctagcatcttcggcaacgtgtcggccatcatccagcggctgtactcgggcacagcccgctaccacacacagatgctgcgggtgcgggagttcatccgcttccaccagatccccaatcccctgcgccagcgcctcgaggagtacttccagcacgcctggtcctacaccaacggcatcgacatgaacgcggtgctgaagggcttccctgagtgcctgcaggctgacatctgcctgcacctgaaccgctcactgctgcagcactgcaaacccttccgaggggccaccaagggctgccttcgggccctggccatgaagttcaagaccacacatgcaccgccaggggacacactggtgcatgctggggacctgctcaccgccctgtacttcatctcccggggctccatcgagatcctgcggggcgacgtcgtcgtggccatcctggggaagaatgacatctttggggagcctctgaacctgtatgcaaggcctggcaagtcgaacggggatgtgcgggccctcacctactgtgacctacacaagatccatcgggacgacctgctggaggtgctggacatgtaccctgagttctccgaccacttctggtccagcctggagatcaccttcaacctgcgagataccaacatgatcccgggctcccccggcagtacggagttagagggtggcttcagtcggcaacgcaagcgcaagttgtccttccgcaggcgcacggacaaggacacggagcagccaggggaggtgtcggccttggggccgggccgggcgggggcagggccgagtagccggggccggccgggggggccgtggggggagagcccgtccagtggcccctccagccctgagagcagtgaggatgagggcccaggccgcagctccagccccctccgcctggtgcccttctccagccccaggccccccggagagccgccgggtggggagcccctgatggaggactgcgagaagagcagcgacacttgcaaccccctgtcaggcgccttctcaggagtgtccaacattttcagcttctggggggacagtcggggccgccagtaccaggagctccctcgatgccccgcccccacccccagcctcctcaacatccccctctccagcccgggtcggcggccccggggcgacgtggagagcaggctggatgccctccagcgccagctcaacaggctggagacccggctgagtgcagacatggccactgtcctgcagctgctacagaggcagatgacgctggtcccgcccgcctacagtgctgtgaccaccccggggcctggccccacttccacatccccgctgttgcccgtcagccccctccccaccctcaccttggactcgctttctcaggtttcccagttcatggcgtgtgaggagctgcccccgggggccccagagcttccccaagaaggccccacacgacgcctctccctaccgggccagctgggggccctcacctcccagcccctgcacagacacggctcggacccgggcagttagtggggctgcccagtgtggacacgtggctcacccagggatcaaggcgctgctgggccgctccccttggaggccctgctcaggaggccctgaccgtggaaggggagaggaactcgaaagcacagctcctcccccagcccttgggaccatcttctcctgcagtcccctgggccccagtgagaggggcaggggcagggccggcagtaggtggggcctgtggtccccccactgccctgagggcattagctggtctaactgcccggaggcacccggccctgggccttaggcacctcaaggacttttctgctatttactgctcttattgttaaggataataattaaggatcatatgaataattaatgaagatgctgatgactatgaataataaataattatcctgaggaga

SEQ ID NO: 251 - DNA, 3884 bp, Homo sapiens
  source 1..3884: mol_type = genomic DNA
  misc_feature 1..3884: note = cDNA of KCNH2 gene SNP c.1755G>T (p.Trp585Cys)
atgccggtgcggaggggccacgtcgcgccgcagaacaccttcctggacaccatcatccgcaagtttgagggccagagccgtaagttcatcatcgccaacgctcgggtggagaactgcgccgtcatctactgcaacgacggcttctgcgagctgtgcggctactcgcgggccgaggtgatgcagcgaccctgcacctgcgacttcctgcacgggccgcgcacgcagcgccgcgctgccgcgcagatcgcgcaggcactgctgggcgccgaggagcgcaaagtggaaatcgccttctaccggaaagatgggagctgcttcctatgtctggtggatgtggtgcccgtgaagaacgaggatggggctgtcatcatgttcatcctcaatttcgaggtggtgatggagaaggacatggtggggtccccggctcatgacaccaaccaccggggcccccccaccagctggctggccccaggccgcgccaagaccttccgcctgaagctgcccgcgctgctggcgctgacggcccgggagtcgtcggtgcggtcgggcggcgcgggcggcgcgggcgccccgggggccgtggtggtggacgtggacctgacgcccgcggcacccagcagcgagtcgctggccctggacgaagtgacagccatggacaaccacgtggcagggctcgggcccgcggaggagcggcgtgcgctggtgggtcccggctctccgccccgcagcgcgcccggccagctcccatcgccccgggcgcacagcctcaaccccgacgcctcgggctccagctgcagcctggcccggacgcgctcccgagaaagctgcgccagcgtgcgccgcgcctcgtcggccgacgacatcgaggccatgcgcgccggggtgctgcccccgccaccgcgccacgccagcaccggggccatgcacccactgcgcagcggcttgctcaactccacctcggactccgacctcgtgcgctaccgcaccattagcaagattccccaaatcaccctcaactttgtggacctcaagggcgaccccttcttggcttcgcccaccagtgaccgtgagatcatagcacctaagataaaggagcgaacccacaatgtcactgagaaggtcacccaggtcctgtccctgggcgccgacgtgctgcctgagtacaagctgcaggcaccgcgcatccaccgctggaccatcctgcattacagccccttcaaggccgtgtgggactggctcatcctgctgctggtcatctacacggctgtcttcacaccctactcggctgccttcctgctgaaggagacggaagaaggcccgcctgctaccgagtgtggctacgcctgccagccgctggctgtggtggacctcatcgtggacatcatgttcattgtggacatcctcatcaacttccgcaccacctacgtcaatgccaacgaggaggtggtcagccaccccggccgcatcgccgtccactacttcaagggctggttcctcatcgacatggtggccgccatccccttcgacctgctcatcttcggctctggctctgaggagctgatcgggctgctgaagactgcgcggctgctgcggctggtgcgcgtggcgcggaagctggatcgctactcagagtacggcgcggccgtgctgttcttgctcatgtgcacctttgcgctcatcgcgcactggctagcctgcatctggtacgccatcggcaacatggagcagccacacatggactcacgcatcggctgtctgcacaacctgggcgaccagataggcaaaccctacaacagcagcggcctgggcggcccctccatcaaggacaagtatgtgacggcgctctacttcaccttcagcagcctcaccagtgtgggcttcggcaacgtctctcccaacaccaactcagagaagatcttctccatctgcgtcatgctcattggctccctcatgtatgctagcatcttcggcaacgtgtcggccatcatccagcggctgtactcgggcacagcccgctaccacacacagatgctgcgggtgcgggagttcatccgcttccaccagatccccaatcccctgcgccagcgcctcgaggagtacttccagcacgcctggtcctacaccaacggcatcgacatgaacgcggtgctgaagggcttccctgagtgcctgcaggctgacatctgcctgcacctgaaccgctcactgctgcagcactgcaaacccttccgaggggccaccaagggctgccttcgggccctggccatgaagttcaagaccacacatgcaccgccaggggacacactggtgcatgctggggacctgctcaccgccctgtacttcatctcccggggctccatcgagatcctgcggggcgacgtcgtcgtggccatcctggggaagaatgacatctttggggagcctctgaacctgtatgcaaggcctggcaagtcgaacggggatgtgcgggccctcacctactgtgacctacacaagatccatcgggacgacctgctggaggtgctggacatgtaccctgagttctccgaccacttctggtccagcctggagatcaccttcaacctgcgagataccaacatgatcccgggctcccccggcagtacggagttagagggtggcttcagtcggcaacgcaagcgcaagttgtccttccgcaggcgcacggacaaggacacggagcagccaggggaggtgtcggccttggggccgggccgggcgggggcagggccgagtagccggggccggccgggggggccgtggggggagagcccgtccagtggcccctccagccctgagagcagtgaggatgagggcccaggccgcagctccagccccctccgcctggtgcccttctccagccccaggccccccggagagccgccgggtggggagcccctgatggaggactgcgagaagagcagcgacacttgcaaccccctgtcaggcgccttctcaggagtgtccaacattttcagcttctggggggacagtcggggccgccagtaccaggagctccctcgatgccccgcccccacccccagcctcctcaacatccccctctccagcccgggtcggcggccccggggcgacgtggagagcaggctggatgccctccagcgccagctcaacaggctggagacccggctgagtgcagacatggccactgtcctgcagctgctacagaggcagatgacgctggtcccgcccgcctacagtgctgtgaccaccccggggcctggccccacttccacatccccgctgttgcccgtcagccccctccccaccctcaccttggactcgctttctcaggtttcccagttcatggcgtgtgaggagctgcccccgggggccccagagcttccccaagaaggccccacacgacgcctctccctaccgggccagctgggggccctcacctcccagcccctgcacagacacggctcggacccgggcagttagtggggctgcccagtgtggacacgtggctcacccagggatcaaggcgctgctgggccgctccccttggaggccctgctcaggaggccctgaccgtggaaggggagaggaactcgaaagcacagctcctcccccagcccttgggaccatcttctcctgcagtcccctgggccccagtgagaggggcaggggcagggccggcagtaggtggggcctgtggtccccccactgccctgagggcattagctggtctaactgcccggaggcacccggccctgggccttaggcacctcaaggacttttctgctatttactgctcttattgttaaggataataattaaggatcatatgaataattaatgaagatgctgatgactatgaataataaataattatcctgaggaga

SEQ ID NO: 252 - DNA, 3884 bp, Homo sapiens
  source 1..3884: mol_type = genomic DNA
  misc_feature 1..3884: note = cDNA of KCNH2 gene SNP c.1756C>G (p.Leu586Val)
atgccggtgcggaggggccacgtcgcgccgcagaacaccttcctggacaccatcatccgcaagtttgagggccagagccgtaagttcatcatcgccaacgctcgggtggagaactgcgccgtcatctactgcaacgacggcttctgcgagctgtgcggctactcgcgggccgaggtgatgcagcgaccctgcacctgcgacttcctgcacgggccgcgcacgcagcgccgcgctgccgcgcagatcgcgcaggcactgctgggcgccgaggagcgcaaagtggaaatcgccttctaccggaaagatgggagctgcttcctatgtctggtggatgtggtgcccgtgaagaacgaggatggggctgtcatcatgttcatcctcaatttcgaggtggtgatggagaaggacatggtggggtccccggctcatgacaccaaccaccggggcccccccaccagctggctggccccaggccgcgccaagaccttccgcctgaagctgcccgcgctgctggcgctgacggcccgggagtcgtcggtgcggtcgggcggcgcgggcggcgcgggcgccccgggggccgtggtggtggacgtggacctgacgcccgcggcacccagcagcgagtcgctggccctggacgaagtgacagccatggacaaccacgtggcagggctcgggcccgcggaggagcggcgtgcgctggtgggtcccggctctccgccccgcagcgcgcccggccagctcccatcgccccgggcgcacagcctcaaccccgacgcctcgggctccagctgcagcctggcccggacgcgctcccgagaaagctgcgccagcgtgcgccgcgcctcgtcggccgacgacatcgaggccatgcgcgccggggtgctgcccccgccaccgcgccacgccagcaccggggccatgcacccactgcgcagcggcttgctcaactccacctcggactccgacctcgtgcgctaccgcaccattagcaagattccccaaatcaccctcaactttgtggacctcaagggcgaccccttcttggcttcgcccaccagtgaccgtgagatcatagcacctaagataaaggagcgaacccacaatgtcactgagaaggtcacccaggtcctgtccctgggcgccgacgtgctgcctgagtacaagctgcaggcaccgcgcatccaccgctggaccatcctgcattacagccccttcaaggccgtgtgggactggctcatcctgctgctggtcatctacacggctgtcttcacaccctactcggctgccttcctgctgaaggagacggaagaaggcccgcctgctaccgagtgtggctacgcctgccagccgctggctgtggtggacctcatcgtggacatcatgttcattgtggacatcctcatcaacttccgcaccacctacgtcaatgccaacgaggaggtggtcagccaccccggccgcatcgccgtccactacttcaagggctggttcctcatcgacatggtggccgccatccccttcgacctgctcatcttcggctctggctctgaggagctgatcgggctgctgaagactgcgcggctgctgcggctggtgcgcgtggcgcggaagctggatcgctactcagagtacggcgcggccgtgctgttcttgctcatgtgcacctttgcgctcatcgcgcactggctagcctgcatctggtacgccatcggcaacatggagcagccacacatggactcacgcatcggctgggtgcacaacctgggcgaccagataggcaaaccctacaacagcagcggcctgggcggcccctccatcaaggacaagtatgtgacggcgctctacttcaccttcagcagcctcaccagtgtgggcttcggcaacgtctctcccaacaccaactcagagaagatcttctccatctgcgtcatgctcattggctccctcatgtatgctagcatcttcggcaacgtgtcggccatcatccagcggctgtactcgggcacagcccgctaccacacacagatgctgcgggtgcgggagttcatccgcttccaccagatccccaatcccctgcgccagcgcctcgaggagtacttccagcacgcctggtcctacaccaacggcatcgacatgaacgcggtgctgaagggcttccctgagtgcctgcaggctgacatctgcctgcacctgaaccgctcactgctgcagcactgcaaacccttccgaggggccaccaagggctgccttcgggccctggccatgaagttcaagaccacacatgcaccgccaggggacacactggtgcatgctggggacctgctcaccgccctgtacttcatctcccggggctccatcgagatcctgcggggcgacgtcgtcgtggccatcctggggaagaatgacatctttggggagcctctgaacctgtatgcaaggcctggcaagtcgaacggggatgtgcgggccctcacctactgtgacctacacaagatccatcgggacgacctgctggaggtgctggacatgtaccctgagttctccgaccacttctggtccagcctggagatcaccttcaacctgcgagataccaacatgatcccgggctcccccggcagtacggagttagagggtggcttcagtcggcaacgcaagcgcaagttgtccttccgcaggcgcacggacaaggacacggagcagccaggggaggtgtcggccttggggccgggccgggcgggggcagggccgagtagccggggccggccgggggggccgtggggggagagcccgtccagtggcccctccagccctgagagcagtgaggatgagggcccaggccgcagctccagccccctccgcctggtgcccttctccagccccaggccccccggagagccgccgggtggggagcccctgatggaggactgcgagaagagcagcgacacttgcaaccccctgtcaggcgccttctcaggagtgtccaacattttcagcttctggggggacagtcggggccgccagtaccaggagctccctcgatgccccgcccccacccccagcctcctcaacatccccctctccagcccgggtcggcggccccggggcgacgtggagagcaggctggatgccctccagcgccagctcaacaggctggagacccggctgagtgcagacatggccactgtcctgcagctgctacagaggcagatgacgctggtcccgcccgcctacagtgctgtgaccaccccggggcctggccccacttccacatccccgctgttgcccgtcagccccctccccaccctcaccttggactcgctttctcaggtttcccagttcatggcgtgtgaggagctgcccccgggggccccagagcttccccaagaaggccccacacgacgcctctccctaccgggccagctgggggccctcacctcccagcccctgcacagacacggctcggacccgggcagttagtggggctgcccagtgtggacacgtggctcacccagggatcaaggcgctgctgggccgctccccttggaggccctgctcaggaggccctgaccgtggaaggggagaggaactcgaaagcacagctcctcccccagcccttgggaccatcttctcctgcagtcccctgggccccagtgagaggggcaggggcagggccggcagtaggtggggcctgtggtccccccactgccctgagggcattagctggtctaactgcccggaggcacccggccctgggccttaggcacctcaaggacttttctgctatttactgctcttattgttaaggataataattaaggatcatatgaataattaatgaagatgctgatgactatgaataataaataattatcctgaggaga

SEQ ID NO: 253 - DNA, 3884 bp, Homo sapiens
  source 1..3884: mol_type = genomic DNA
  misc_feature 1..3884: note = cDNA of KCNH2 gene SNP c.1762A>G (p.Asn588Asp)
atgccggtgcggaggggccacgtcgcgccgcagaacaccttcctggacaccatcatccgcaagtttgagggccagagccgtaagttcatcatcgccaacgctcgggtggagaactgcgccgtcatctactgcaacgacggcttctgcgagctgtgcggctactcgcgggccgaggtgatgcagcgaccctgcacctgcgacttcctgcacgggccgcgcacgcagcgccgcgctgccgcgcagatcgcgcaggcactgctgggcgccgaggagcgcaaagtggaaatcgccttctaccggaaagatgggagctgcttcctatgtctggtggatgtggtgcccgtgaagaacgaggatggggctgtcatcatgttcatcctcaatttcgaggtggtgatggagaaggacatggtggggtccccggctcatgacaccaaccaccggggcccccccaccagctggctggccccaggccgcgccaagaccttccgcctgaagctgcccgcgctgctggcgctgacggcccgggagtcgtcggtgcggtcgggcggcgcgggcggcgcgggcgccccgggggccgtggtggtggacgtggacctgacgcccgcggcacccagcagcgagtcgctggccctggacgaagtgacagccatggacaaccacgtggcagggctcgggcccgcggaggagcggcgtgcgctggtgggtcccggctctccgccccgcagcgcgcccggccagctcccatcgccccgggcgcacagcctcaaccccgacgcctcgggctccagctgcagcctggcccggacgcgctcccgagaaagctgcgccagcgtgcgccgcgcctcgtcggccgacgacatcgaggccatgcgcgccggggtgctgcccccgccaccgcgccacgccagcaccggggccatgcacccactgcgcagcggcttgctcaactccacctcggactccgacctcgtgcgctaccgcaccattagcaagattccccaaatcaccctcaactttgtggacctcaagggcgaccccttcttggcttcgcccaccagtgaccgtgagatcatagcacctaagataaaggagcgaacccacaatgtcactgagaaggtcacccaggtcctgtccctgggcgccgacgtgctgcctgagtacaagctgcaggcaccgcgcatccaccgctggaccatcctgcattacagccccttcaaggccgtgtgggactggctcatcctgctgctggtcatctacacggctgtcttcacaccctactcggctgccttcctgctgaaggagacggaagaaggcccgcctgctaccgagtgtggctacgcctgccagccgctggctgtggtggacctcatcgtggacatcatgttcattgtggacatcctcatcaacttccgcaccacctacgtcaatgccaacgaggaggtggtcagccaccccggccgcatcgccgtccactacttcaagggctggttcctcatcgacatggtggccgccatccccttcgacctgctcatcttcggctctggctctgaggagctgatcgggctgctgaagactgcgcggctgctgcggctggtgcgcgtggcgcggaagctggatcgctactcagagtacggcgcggccgtgctgttcttgctcatgtgcacctttgcgctcatcgcgcactggctagcctgcatctggtacgccatcggcaacatggagcagccacacatggactcacgcatcggctggctgcacgacctgggcgaccagataggcaaaccctacaacagcagcggcctgggcggcccctccatcaaggacaagtatgtgacggcgctctacttcaccttcagcagcctcaccagtgtgggcttcggcaacgtctctcccaacaccaactcagagaagatcttctccatctgcgtcatgctcattggctccctcatgtatgctagcatcttcggcaacgtgtcggccatcatccagcggctgtactcgggcacagcccgctaccacacacagatgctgcgggtgcgggagttcatccgcttccaccagatccccaatcccctgcgccagcgcctcgaggagtacttccagcacgcctggtcctacaccaacggcatcgacatgaacgcggtgctgaagggcttccctgagtgcctgcaggctgacatctgcctgcacctgaaccgctcactgctgcagcactgcaaacccttccgaggggccaccaagggctgccttcgggccctggccatgaagttcaagaccacacatgcaccgccaggggacacactggtgcatgctggggacctgctcaccgccctgtacttcatctcccggggctccatcgagatcctgcggggcgacgtcgtcgtggccatcctggggaagaatgacatctttggggagcctctgaacctgtatgcaaggcctggcaagtcgaacggggatgtgcgggccctcacctactgtgacctacacaagatccatcgggacgacctgctggaggtgctggacatgtaccctgagttctccgaccacttctggtccagcctggagatcaccttcaacctgcgagataccaacatgatcccgggctcccccggcagtacggagttagagggtggcttcagtcggcaacgcaagcgcaagttgtccttccgcaggcgcacggacaaggacacggagcagccaggggaggtgtcggccttggggccgggccgggcgggggcagggccgagtagccggggccggccgggggggccgtggggggagagcccgtccagtggcccctccagccctgagagcagtgaggatgagggcccaggccgcagctccagccccctccgcctggtgcccttctccagccccaggccccccggagagccgccgggtggggagcccctgatggaggactgcgagaagagcagcgacacttgcaaccccctgtcaggcgccttctcaggagtgtccaacattttcagcttctggggggacagtcggggccgccagtaccaggagctccctcgatgccccgcccccacccccagcctcctcaacatccccctctccagcccgggtcggcggccccggggcgacgtggagagcaggctggatgccctccagcgccagctcaacaggctggagacccggctgagtgcagacatggccactgtcctgcagctgctacagaggcagatgacgctggtcccgcccgcctacagtgctgtgaccaccccggggcctggccccacttccacatccccgctgttgcccgtcagccccctccccaccctcaccttggactcgctttctcaggtttcccagttcatggcgtgtgaggagctgcccccgggggccccagagcttccccaagaaggccccacacgacgcctctccctaccgggccagctgggggccctcacctcccagcccctgcacagacacggctcggacccgggcagttagtggggctgcccagtgtggacacgtggctcacccagggatcaaggcgctgctgggccgctccccttggaggccctgctcaggaggccctgaccgtggaaggggagaggaactcgaaagcacagctcctcccccagcccttgggaccatcttctcctgcagtcccctgggccccagtgagaggggcaggggcagggccggcagtaggtggggcctgtggtccccccactgccctgagggcattagctggtctaactgcccggaggcacccggccctgggccttaggcacctcaaggacttttctgctatttactgctcttattgttaaggataataattaaggatcatatgaataattaatgaagatgctgatgactatgaataataaataattatcctgaggaga

SEQ ID NO: 254 - DNA, 3884 bp, Homo sapiens
  source 1..3884: mol_type = genomic DNA
  misc_feature 1..3884: note = cDNA of KCNH2 gene SNP c.1764C>A (p.Asn588Lys)
atgccggtgcggaggggccacgtcgcgccgcagaacaccttcctggacaccatcatccgcaagtttgagggccagagccgtaagttcatcatcgccaacgctcgggtggagaactgcgccgtcatctactgcaacgacggcttctgcgagctgtgcggctactcgcgggccgaggtgatgcagcgaccctgcacctgcgacttcctgcacgggccgcgcacgcagcgccgcgctgccgcgcagatcgcgcaggcactgctgggcgccgaggagcgcaaagtggaaatcgccttctaccggaaagatgggagctgcttcctatgtctggtggatgtggtgcccgtgaagaacgaggatggggctgtcatcatgttcatcctcaatttcgaggtggtgatggagaaggacatggtggggtccccggctcatgacaccaaccaccggggcccccccaccagctggctggccccaggccgcgccaagaccttccgcctgaagctgcccgcgctgctggcgctgacggcccgggagtcgtcggtgcggtcgggcggcgcgggcggcgcgggcgccccgggggccgtggtggtggacgtggacctgacgcccgcggcacccagcagcgagtcgctggccctggacgaagtgacagccatggacaaccacgtggcagggctcgggcccgcggaggagcggcgtgcgctggtgggtcccggctctccgccccgcagcgcgcccggccagctcccatcgccccgggcgcacagcctcaaccccgacgcctcgggctccagctgcagcctggcccggacgcgctcccgagaaagctgcgccagcgtgcgccgcgcctcgtcggccgacgacatcgaggccatgcgcgccggggtgctgcccccgccaccgcgccacgccagcaccggggccatgcacccactgcgcagcggcttgctcaactccacctcggactccgacctcgtgcgctaccgcaccattagcaagattccccaaatcaccctcaactttgtggacctcaagggcgaccccttcttggcttcgcccaccagtgaccgtgagatcatagcacctaagataaaggagcgaacccacaatgtcactgagaaggtcacccaggtcctgtccctgggcgccgacgtgctgcctgagtacaagctgcaggcaccgcgcatccaccgctggaccatcctgcattacagccccttcaaggccgtgtgggactggctcatcctgctgctggtcatctacacggctgtcttcacaccctactcggctgccttcctgctgaaggagacggaagaaggcccgcctgctaccgagtgtggctacgcctgccagccgctggctgtggtggacctcatcgtggacatcatgttcattgtggacatcctcatcaacttccgcaccacctacgtcaatgccaacgaggaggtggtcagccaccccggccgcatcgccgtccactacttcaagggctggttcctcatcgacatggtggccgccatccccttcgacctgctcatcttcggctctggctctgaggagctgatcgggctgctgaagactgcgcggctgctgcggctggtgcgcgtggcgcggaagctggatcgctactcagagtacggcgcggccgtgctgttcttgctcatgtgcacctttgcgctcatcgcgcactggctagcctgcatctggtacgccatcggcaacatggagcagccacacatggactcacgcatcggctggctgcacaaactgggcgaccagataggcaaaccctacaacagcagcggcctgggcggcccctccatcaaggacaagtatgtgacggcgctctacttcaccttcagcagcctcaccagtgtgggcttcggcaacgtctctcccaacaccaactcagagaagatcttctccatctgcgtcatgctcattggctccctcatgtatgctagcatcttcggcaacgtgtcggccatcatccagcggctgtactcgggcacagcccgctaccacacacagatgctgcgggtgcgggagttcatccgcttccaccagatccccaatcccctgcgccagcgcctcgaggagtacttccagcacgcctggtcctacaccaacggcatcgacatgaacgcggtgctgaagggcttccctgagtgcctgcaggctgacatctgcctgcacctgaaccgctcactgctgcagcactgcaaacccttccgaggggccaccaagggctgccttcgggccctggccatgaagttcaagaccacacatgcaccgccaggggacacactggtgcatgctggggacctgctcaccgccctgtacttcatctcccggggctccatcgagatcctgcggggcgacgtcgtcgtggccatcctggggaagaatgacatctttggggagcctctgaacctgtatgcaaggcctggcaagtcgaacggggatgtgcgggccctcacctactgtgacctacacaagatccatcgggacgacctgctggaggtgctggacatgtaccctgagttctccgaccacttctggtccagcctggagatcaccttcaacctgcgagataccaacatgatcccgggctcccccggcagtacggagttagagggtggcttcagtcggcaacgcaagcgcaagttgtccttccgcaggcgcacggacaaggacacggagcagccaggggaggtgtcggccttggggccgggccgggcgggggcagggccgagtagccggggccggccgggggggccgtggggggagagcccgtccagtggcccctccagccctgagagcagtgaggatgagggcccaggccgcagctccagccccctccgcctggtgcccttctccagccccaggccccccggagagccgccgggtggggagcccctgatggaggactgcgagaagagcagcgacacttgcaaccccctgtcaggcgccttctcaggagtgtccaacattttcagcttctggggggacagtcggggccgccagtaccaggagctccctcgatgccccgcccccacccccagcctcctcaacatccccctctccagcccgggtcggcggccccggggcgacgtggagagcaggctggatgccctccagcgccagctcaacaggctggagacccggctgagtgcagacatggccactgtcctgcagctgctacagaggcagatgacgctggtcccgcccgcctacagtgctgtgaccaccccggggcctggccccacttccacatccccgctgttgcccgtcagccccctccccaccctcaccttggactcgctttctcaggtttcccagttcatggcgtgtgaggagctgcccccgggggccccagagcttccccaagaaggccccacacgacgcctctccctaccgggccagctgggggccctcacctcccagcccctgcacagacacggctcggacccgggcagttagtggggctgcccagtgtggacacgtggctcacccagggatcaaggcgctgctgggccgctccccttggaggccctgctcaggaggccctgaccgtggaaggggagaggaactcgaaagcacagctcctcccccagcccttgggaccatcttctcctgcagtcccctgggccccagtgagaggggcaggggcagggccggcagtaggtggggcctgtggtccccccactgccctgagggcattagctggtctaactgcccggaggcacccggccctgggccttaggcacctcaaggacttttctgctatttactgctcttattgttaaggataataattaaggatcatatgaataattaatgaagatgctgatgactatgaataataaataattatcctgaggaga

SEQ ID NO: 255 - DNA, 3884 bp, Homo sapiens
  source 1..3884: mol_type = genomic DNA
  misc_feature 1..3884: note = cDNA of KCNH2 gene SNP c.1764C>G (p.Asn588Lys)
atgccggtgcggaggggccacgtcgcgccgcagaacaccttcctggacaccatcatccgcaagtttgagggccagagccgtaagttcatcatcgccaacgctcgggtggagaactgcgccgtcatctactgcaacgacggcttctgcgagctgtgcggctactcgcgggccgaggtgatgcagcgaccctgcacctgcgacttcctgcacgggccgcgcacgcagcgccgcgctgccgcgcagatcgcgcaggcactgctgggcgccgaggagcgcaaagtggaaatcgccttctaccggaaagatgggagctgcttcctatgtctggtggatgtggtgcccgtgaagaacgaggatggggctgtcatcatgttcatcctcaatttcgaggtggtgatggagaaggacatggtggggtccccggctcatgacaccaaccaccggggcccccccaccagctggctggccccaggccgcgccaagaccttccgcctgaagctgcccgcgctgctggcgctgacggcccgggagtcgtcggtgcggtcgggcggcgcgggcggcgcgggcgccccgggggccgtggtggtggacgtggacctgacgcccgcggcacccagcagcgagtcgctggccctggacgaagtgacagccatggacaaccacgtggcagggctcgggcccgcggaggagcggcgtgcgctggtgggtcccggctctccgccccgcagcgcgcccggccagctcccatcgccccgggcgcacagcctcaaccccgacgcctcgggctccagctgcagcctggcccggacgcgctcccgagaaagctgcgccagcgtgcgccgcgcctcgtcggccgacgacatcgaggccatgcgcgccggggtgctgcccccgccaccgcgccacgccagcaccggggccatgcacccactgcgcagcggcttgctcaactccacctcggactccgacctcgtgcgctaccgcaccattagcaagattccccaaatcaccctcaactttgtggacctcaagggcgaccccttcttggcttcgcccaccagtgaccgtgagatcatagcacctaagataaaggagcgaacccacaatgtcactgagaaggtcacccaggtcctgtccctgggcgccgacgtgctgcctgagtacaagctgcaggcaccgcgcatccaccgctggaccatcctgcattacagccccttcaaggccgtgtgggactggctcatcctgctgctggtcatctacacggctgtcttcacaccctactcggctgccttcctgctgaaggagacggaagaaggcccgcctgctaccgagtgtggctacgcctgccagccgctggctgtggtggacctcatcgtggacatcatgttcattgtggacatcctcatcaacttccgcaccacctacgtcaatgccaacgaggaggtggtcagccaccccggccgcatcgccgtccactacttcaagggctggttcctcatcgacatggtggccgccatccccttcgacctgctcatcttcggctctggctctgaggagctgatcgggctgctgaagactgcgcggctgctgcggctggtgcgcgtggcgcggaagctggatcgctactcagagtacggcgcggccgtgctgttcttgctcatgtgcacctttgcgctcatcgcgcactggctagcctgcatctggtacgccatcggcaacatggagcagccacacatggactcacgcatcggctggctgcacaagctgggcgaccagataggcaaaccctacaacagcagcggcctgggcggcccctccatcaaggacaagtatgtgacggcgctctacttcaccttcagcagcctcaccagtgtgggcttcggcaacgtctctcccaacaccaactcagagaagatcttctccatctgcgtcatgctcattggctccctcatgtatgctagcatcttcggcaacgtgtcggccatcatccagcggctgtactcgggcacagcccgctaccacacacagatgctgcgggtgcgggagttcatccgcttccaccagatccccaatcccctgcgccagcgcctcgaggagtacttccagcacgcctggtcctacaccaacggcatcgacatgaacgcggtgctgaagggcttccctgagtgcctgcaggctgacatctgcctgcacctgaaccgctcactgctgcagcactgcaaacccttccgaggggccaccaagggctgccttcgggccctggccatgaagttcaagaccacacatgcaccgccaggggacacactggtgcatgctggggacctgctcaccgccctgtacttcatctcccggggctccatcgagatcctgcggggcgacgtcgtcgtggccatcctggggaagaatgacatctttggggagcctctgaacctgtatgcaaggcctggcaagtcgaacggggatgtgcgggccctcacctactgtgacctacacaagatccatcgggacgacctgctggaggtgctggacatgtaccctgagttctccgaccacttctggtccagcctggagatcaccttcaacctgcgagataccaacatgatcccgggctcccccggcagtacggagttagagggtggcttcagtcggcaacgcaagcgcaagttgtccttccgcaggcgcacggacaaggacacggagcagccaggggaggtgtcggccttggggccgggccgggcgggggcagggccgagtagccggggccggccgggggggccgtggggggagagcccgtccagtggcccctccagccctgagagcagtgaggatgagggcccaggccgcagctccagccccctccgcctggtgcccttctccagccccaggccccccggagagccgccgggtggggagcccctgatggaggactgcgagaagagcagcgacacttgcaaccccctgtcaggcgccttctcaggagtgtccaacattttcagcttctggggggacagtcggggccgccagtaccaggagctccctcgatgccccgcccccacccccagcctcctcaacatccccctctccagcccgggtcggcggccccggggcgacgtggagagcaggctggatgccctccagcgccagctcaacaggctggagacccggctgagtgcagacatggccactgtcctgcagctgctacagaggcagatgacgctggtcccgcccgcctacagtgctgtgaccaccccggggcctggccccacttccacatccccgctgttgcccgtcagccccctccccaccctcaccttggactcgctttctcaggtttcccagttcatggcgtgtgaggagctgcccccgggggccccagagcttccccaagaaggccccacacgacgcctctccctaccgggccagctgggggccctcacctcccagcccctgcacagacacggctcggacccgggcagttagtggggctgcccagtgtggacacgtggctcacccagggatcaaggcgctgctgggccgctccccttggaggccctgctcaggaggccctgaccgtggaaggggagaggaactcgaaagcacagctcctcccccagcccttgggaccatcttctcctgcagtcccctgggccccagtgagaggggcaggggcagggccggcagtaggtggggcctgtggtccccccactgccctgagggcattagctggtctaactgcccggaggcacccggccctgggccttaggcacctcaaggacttttctgctatttactgctcttattgttaaggataataattaaggatcatatgaataattaatgaagatgctgatgactatgaataataaataattatcctgaggaga

SEQ ID NO: 256 - DNA, 3884 bp, Homo sapiens
  source 1..3884: mol_type = genomic DNA
  misc_feature 1..3884: note = cDNA of KCNH2 gene SNP c.1769G>T (p.Gly590Val)
atgccggtgcggaggggccacgtcgcgccgcagaacaccttcctggacaccatcatccgcaagtttgagggccagagccgtaagttcatcatcgccaacgctcgggtggagaactgcgccgtcatctactgcaacgacggcttctgcgagctgtgcggctactcgcgggccgaggtgatgcagcgaccctgcacctgcgacttcctgcacgggccgcgcacgcagcgccgcgctgccgcgcagatcgcgcaggcactgctgggcgccgaggagcgcaaagtggaaatcgccttctaccggaaagatgggagctgcttcctatgtctggtggatgtggtgcccgtgaagaacgaggatggggctgtcatcatgttcatcctcaatttcgaggtggtgatggagaaggacatggtggggtccccggctcatgacaccaaccaccggggcccccccaccagctggctggccccaggccgcgccaagaccttccgcctgaagctgcccgcgctgctggcgctgacggcccgggagtcgtcggtgcggtcgggcggcgcgggcggcgcgggcgccccgggggccgtggtggtggacgtggacctgacgcccgcggcacccagcagcgagtcgctggccctggacgaagtgacagccatggacaaccacgtggcagggctcgggcccgcggaggagcggcgtgcgctggtgggtcccggctctccgccccgcagcgcgcccggccagctcccatcgccccgggcgcacagcctcaaccccgacgcctcgggctccagctgcagcctggcccggacgcgctcccgagaaagctgcgccagcgtgcgccgcgcctcgtcggccgacgacatcgaggccatgcgcgccggggtgctgcccccgccaccgcgccacgccagcaccggggccatgcacccactgcgcagcggcttgctcaactccacctcggactccgacctcgtgcgctaccgcaccattagcaagattccccaaatcaccctcaactttgtggacctcaagggcgaccccttcttggcttcgcccaccagtgaccgtgagatcatagcacctaagataaaggagcgaacccacaatgtcactgagaaggtcacccaggtcctgtccctgggcgccgacgtgctgcctgagtacaagctgcaggcaccgcgcatccaccgctggaccatcctgcattacagccccttcaaggccgtgtgggactggctcatcctgctgctggtcatctacacggctgtcttcacaccctactcggctgccttcctgctgaaggagacggaagaaggcccgcctgctaccgagtgtggctacgcctgccagccgctggctgtggtggacctcatcgtggacatcatgttcattgtggacatcctcatcaacttccgcaccacctacgtcaatgccaacgaggaggtggtcagccaccccggccgcatcgccgtccactacttcaagggctggttcctcatcgacatggtggccgccatccccttcgacctgctcatcttcggctctggctctgaggagctgatcgggctgctgaagactgcgcggctgctgcggctggtgcgcgtggcgcggaagctggatcgctactcagagtacggcgcggccgtgctgttcttgctcatgtgcacctttgcgctcatcgcgcactggctagcctgcatctggtacgccatcggcaacatggagcagccacacatggactcacgcatcggctggctgcacaacctggtcgaccagataggcaaaccctacaacagcagcggcctgggcggcccctccatcaaggacaagtatgtgacggcgctctacttcaccttcagcagcctcaccagtgtgggcttcggcaacgtctctcccaacaccaactcagagaagatcttctccatctgcgtcatgctcattggctccctcatgtatgctagcatcttcggcaacgtgtcggccatcatccagcggctgtactcgggcacagcccgctaccacacacagatgctgcgggtgcgggagttcatccgcttccaccagatccccaatcccctgcgccagcgcctcgaggagtacttccagcacgcctggtcctacaccaacggcatcgacatgaacgcggtgctgaagggcttccctgagtgcctgcaggctgacatctgcctgcacctgaaccgctcactgctgcagcactgcaaacccttccgaggggccaccaagggctgccttcgggccctggccatgaagttcaagaccacacatgcaccgccaggggacacactggtgcatgctggggacctgctcaccgccctgtacttcatctcccggggctccatcgagatcctgcggggcgacgtcgtcgtggccatcctggggaagaatgacatctttggggagcctctgaacctgtatgcaaggcctggcaagtcgaacggggatgtgcgggccctcacctactgtgacctacacaagatccatcgggacgacctgctggaggtgctggacatgtaccctgagttctccgaccacttctggtccagcctggagatcaccttcaacctgcgagataccaacatgatcccgggctcccccggcagtacggagttagagggtggcttcagtcggcaacgcaagcgcaagttgtccttccgcaggcgcacggacaaggacacggagcagccaggggaggtgtcggccttggggccgggccgggcgggggcagggccgagtagccggggccggccgggggggccgtggggggagagcccgtccagtggcccctccagccctgagagcagtgaggatgagggcccaggccgcagctccagccccctccgcctggtgcccttctccagccccaggccccccggagagccgccgggtggggagcccctgatggaggactgcgagaagagcagcgacacttgcaaccccctgtcaggcgccttctcaggagtgtccaacattttcagcttctggggggacagtcggggccgccagtaccaggagctccctcgatgccccgcccccacccccagcctcctcaacatccccctctccagcccgggtcggcggccccggggcgacgtggagagcaggctggatgccctccagcgccagctcaacaggctggagacccggctgagtgcagacatggccactgtcctgcagctgctacagaggcagatgacgctggtcccgcccgcctacagtgctgtgaccaccccggggcctggccccacttccacatccccgctgttgcccgtcagccccctccccaccctcaccttggactcgctttctcaggtttcccagttcatggcgtgtgaggagctgcccccgggggccccagagcttccccaagaaggccccacacgacgcctctccctaccgggccagctgggggccctcacctcccagcccctgcacagacacggctcggacccgggcagttagtggggctgcccagtgtggacacgtggctcacccagggatcaaggcgctgctgggccgctccccttggaggccctgctcaggaggccctgaccgtggaaggggagaggaactcgaaagcacagctcctcccccagcccttgggaccatcttctcctgcagtcccctgggccccagtgagaggggcaggggcagggccggcagtaggtggggcctgtggtccccccactgccctgagggcattagctggtctaactgcccggaggcacccggccctgggccttaggcacctcaaggacttttctgctatttactgctcttattgttaaggataataattaaggatcatatgaataattaatgaagatgctgatgactatgaataataaataattatcctgaggaga

SEQ ID NO: 257 - DNA, 3884 bp, Homo sapiens
  source 1..3884: mol_type = genomic DNA
  misc_feature 1..3884: note = cDNA of KCNH2 gene SNP c.1771G>A (p.Asp591Asn)
atgccggtgcggaggggccacgtcgcgccgcagaacaccttcctggacaccatcatccgcaagtttgagggccagagccgtaagttcatcatcgccaacgctcgggtggagaactgcgccgtcatctactgcaacgacggcttctgcgagctgtgcggctactcgcgggccgaggtgatgcagcgaccctgcacctgcgacttcctgcacgggccgcgcacgcagcgccgcgctgccgcgcagatcgcgcaggcactgctgggcgccgaggagcgcaaagtggaaatcgccttctaccggaaagatgggagctgcttcctatgtctggtggatgtggtgcccgtgaagaacgaggatggggctgtcatcatgttcatcctcaatttcgaggtggtgatggagaaggacatggtggggtccccggctcatgacaccaaccaccggggcccccccaccagctggctggccccaggccgcgccaagaccttccgcctgaagctgcccgcgctgctggcgctgacggcccgggagtcgtcggtgcggtcgggcggcgcgggcggcgcgggcgccccgggggccgtggtggtggacgtggacctgacgcccgcggcacccagcagcgagtcgctggccctggacgaagtgacagccatggacaaccacgtggcagggctcgggcccgcggaggagcggcgtgcgctggtgggtcccggctctccgccccgcagcgcgcccggccagctcccatcgccccgggcgcacagcctcaaccccgacgcctcgggctccagctgcagcctggcccggacgcgctcccgagaaagctgcgccagcgtgcgccgcgcctcgtcggccgacgacatcgaggccatgcgcgccggggtgctgcccccgccaccgcgccacgccagcaccggggccatgcacccactgcgcagcggcttgctcaactccacctcggactccgacctcgtgcgctaccgcaccattagcaagattccccaaatcaccctcaactttgtggacctcaagggcgaccccttcttggcttcgcccaccagtgaccgtgagatcatagcacctaagataaaggagcgaacccacaatgtcactgagaaggtcacccaggtcctgtccctgggcgccgacgtgctgcctgagtacaagctgcaggcaccgcgcatccaccgctggaccatcctgcattacagccccttcaaggccgtgtgggactggctcatcctgctgctggtcatctacacggctgtcttcacaccctactcggctgccttcctgctgaaggagacggaagaaggcccgcctgctaccgagtgtggctacgcctgccagccgctggctgtggtggacctcatcgtggacatcatgttcattgtggacatcctcatcaacttccgcaccacctacgtcaatgccaacgaggaggtggtcagccaccccggccgcatcgccgtccactacttcaagggctggttcctcatcgacatggtggccgccatccccttcgacctgctcatcttcggctctggctctgaggagctgatcgggctgctgaagactgcgcggctgctgcggctggtgcgcgtggcgcggaagctggatcgctactcagagtacggcgcggccgtgctgttcttgctcatgtgcacctttgcgctcatcgcgcactggctagcctgcatctggtacgccatcggcaacatggagcagccacacatggactcacgcatcggctggctgcacaacctgggcaaccagataggcaaaccctacaacagcagcggcctgggcggcccctccatcaaggacaagtatgtgacggcgctctacttcaccttcagcagcctcaccagtgtgggcttcggcaacgtctctcccaacaccaactcagagaagatcttctccatctgcgtcatgctcattggctccctcatgtatgctagcatcttcggcaacgtgtcggccatcatccagcggctgtactcgggcacagcccgctaccacacacagatgctgcgggtgcgggagttcatccgcttccaccagatccccaatcccctgcgccagcgcctcgaggagtacttccagcacgcctggtcctacaccaacggcatcgacatgaacgcggtgctgaagggcttccctgagtgcctgcaggctgacatctgcctgcacctgaaccgctcactgctgcagcactgcaaacccttccgaggggccaccaagggctgccttcgggccctggccatgaagttcaagaccacacatgcaccgccaggggacacactggtgcatgctggggacctgctcaccgccctgtacttcatctcccggggctccatcgagatcctgcggggcgacgtcgtcgtggccatcctggggaagaatgacatctttggggagcctctgaacctgtatgcaaggcctggcaagtcgaacggggatgtgcgggccctcacctactgtgacctacacaagatccatcgggacgacctgctggaggtgctggacatgtaccctgagttctccgaccacttctggtccagcctggagatcaccttcaacctgcgagataccaacatgatcccgggctcccccggcagtacggagttagagggtggcttcagtcggcaacgcaagcgcaagttgtccttccgcaggcgcacggacaaggacacggagcagccaggggaggtgtcggccttggggccgggccgggcgggggcagggccgagtagccggggccggccgggggggccgtggggggagagcccgtccagtggcccctccagccctgagagcagtgaggatgagggcccaggccgcagctccagccccctccgcctggtgcccttctccagccccaggccccccggagagccgccgggtggggagcccctgatggaggactgcgagaagagcagcgacacttgcaaccccctgtcaggcgccttctcaggagtgtccaacattttcagcttctggggggacagtcggggccgccagtaccaggagctccctcgatgccccgcccccacccccagcctcctcaacatccccctctccagcccgggtcggcggccccggggcgacgtggagagcaggctggatgccctccagcgccagctcaacaggctggagacccggctgagtgcagacatggccactgtcctgcagctgctacagaggcagatgacgctggtcccgcccgcctacagtgctgtgaccaccccggggcctggccccacttccacatccccgctgttgcccgtcagccccctccccaccctcaccttggactcgctttctcaggtttcccagttcatggcgtgtgaggagctgcccccgggggccccagagcttccccaagaaggccccacacgacgcctctccctaccgggccagctgggggccctcacctcccagcccctgcacagacacggctcggacccgggcagttagtggggctgcccagtgtggacacgtggctcacccagggatcaaggcgctgctgggccgctccccttggaggccctgctcaggaggccctgaccgtggaaggggagaggaactcgaaagcacagctcctcccccagcccttgggaccatcttctcctgcagtcccctgggccccagtgagaggggcaggggcagggccggcagtaggtggggcctgtggtccccccactgccctgagggcattagctggtctaactgcccggaggcacccggccctgggccttaggcacctcaaggacttttctgctatttactgctcttattgttaaggataataattaaggatcatatgaataattaatgaagatgctgatgactatgaataataaataattatcctgaggaga

SEQ ID NO: 258 - DNA, 3884 bp, Homo sapiens
  source 1..3884: mol_type = genomic DNA
  misc_feature 1..3884: note = cDNA of KCNH2 gene SNP c.1777A>G (p.Ile593Val)
atgccggtgcggaggggccacgtcgcgccgcagaacaccttcctggacaccatcatccgcaagtttgagggccagagccgtaagttcatcatcgccaacgctcgggtggagaactgcgccgtcatctactgcaacgacggcttctgcgagctgtgcggctactcgcgggccgaggtgatgcagcgaccctgcacctgcgacttcctgcacgggccgcgcacgcagcgccgcgctgccgcgcagatcgcgcaggcactgctgggcgccgaggagcgcaaagtggaaatcgccttctaccggaaagatgggagctgcttcctatgtctggtggatgtggtgcccgtgaagaacgaggatggggctgtcatcatgttcatcctcaatttcgaggtggtgatggagaaggacatggtggggtccccggctcatgacaccaaccaccggggcccccccaccagctggctggccccaggccgcgccaagaccttccgcctgaagctgcccgcgctgctggcgctgacggcccgggagtcgtcggtgcggtcgggcggcgcgggcggcgcgggcgccccgggggccgtggtggtggacgtggacctgacgcccgcggcacccagcagcgagtcgctggccctggacgaagtgacagccatggacaaccacgtggcagggctcgggcccgcggaggagcggcgtgcgctggtgggtcccggctctccgccccgcagcgcgcccggccagctcccatcgccccgggcgcacagcctcaaccccgacgcctcgggctccagctgcagcctggcccggacgcgctcccgagaaagctgcgccagcgtgcgccgcgcctcgtcggccgacgacatcgaggccatgcgcgccggggtgctgcccccgccaccgcgccacgccagcaccggggccatgcacccactgcgcagcggcttgctcaactccacctcggactccgacctcgtgcgctaccgcaccattagcaagattccccaaatcaccctcaactttgtggacctcaagggcgaccccttcttggcttcgcccaccagtgaccgtgagatcatagcacctaagataaaggagcgaacccacaatgtcactgagaaggtcacccaggtcctgtccctgggcgccgacgtgctgcctgagtacaagctgcaggcaccgcgcatccaccgctggaccatcctgcattacagccccttcaaggccgtgtgggactggctcatcctgctgctggtcatctacacggctgtcttcacaccctactcggctgccttcctgctgaaggagacggaagaaggcccgcctgctaccgagtgtggctacgcctgccagccgctggctgtggtggacctcatcgtggacatcatgttcattgtggacatcctcatcaacttccgcaccacctacgtcaatgccaacgaggaggtggtcagccaccccggccgcatcgccgtccactacttcaagggctggttcctcatcgacatggtggccgccatccccttcgacctgctcatcttcggctctggctctgaggagctgatcgggctgctgaagactgcgcggctgctgcggctggtgcgcgtggcgcggaagctggatcgctactcagagtacggcgcggccgtgctgttcttgctcatgtgcacctttgcgctcatcgcgcactggctagcctgcatctggtacgccatcggcaacatggagcagccacacatggactcacgcatcggctggctgcacaacctgggcgaccaggtaggcaaaccctacaacagcagcggcctgggcggcccctccatcaaggacaagtatgtgacggcgctctacttcaccttcagcagcctcaccagtgtgggcttcggcaacgtctctcccaacaccaactcagagaagatcttctccatctgcgtcatgctcattggctccctcatgtatgctagcatcttcggcaacgtgtcggccatcatccagcggctgtactcgggcacagcccgctaccacacacagatgctgcgggtgcgggagttcatccgcttccaccagatccccaatcccctgcgccagcgcctcgaggagtacttccagcacgcctggtcctacaccaacggcatcgacatgaacgcggtgctgaagggcttccctgagtgcctgcaggctgacatctgcctgcacctgaaccgctcactgctgcagcactgcaaacccttccgaggggccaccaagggctgccttcgggccctggccatgaagttcaagaccacacatgcaccgccaggggacacactggtgcatgctggggacctgctcaccgccctgtacttcatctcccggggctccatcgagatcctgcggggcgacgtcgtcgtggccatcctggggaagaatgacatctttggggagcctctgaacctgtatgcaaggcctggcaagtcgaacggggatgtgcgggccctcacctactgtgacctacacaagatccatcgggacgacctgctggaggtgctggacatgtaccctgagttctccgaccacttctggtccagcctggagatcaccttcaacctgcgagataccaacatgatcccgggctcccccggcagtacggagttagagggtggcttcagtcggcaacgcaagcgcaagttgtccttccgcaggcgcacggacaaggacacggagcagccaggggaggtgtcggccttggggccgggccgggcgggggcagggccgagtagccggggccggccgggggggccgtggggggagagcccgtccagtggcccctccagccctgagagcagtgaggatgagggcccaggccgcagctccagccccctccgcctggtgcccttctccagccccaggccccccggagagccgccgggtggggagcccctgatggaggactgcgagaagagcagcgacacttgcaaccccctgtcaggcgccttctcaggagtgtccaacattttcagcttctggggggacagtcggggccgccagtaccaggagctccctcgatgccccgcccccacccccagcctcctcaacatccccctctccagcccgggtcggcggccccggggcgacgtggagagcaggctggatgccctccagcgccagctcaacaggctggagacccggctgagtgcagacatggccactgtcctgcagctgctacagaggcagatgacgctggtcccgcccgcctacagtgctgtgaccaccccggggcctggccccacttccacatccccgctgttgcccgtcagccccctccccaccctcaccttggactcgctttctcaggtttcccagttcatggcgtgtgaggagctgcccccgggggccccagagcttccccaagaaggccccacacgacgcctctccctaccgggccagctgggggccctcacctcccagcccctgcacagacacggctcggacccgggcagttagtggggctgcccagtgtggacacgtggctcacccagggatcaaggcgctgctgggccgctccccttggaggccctgctcaggaggccctgaccgtggaaggggagaggaactcgaaagcacagctcctcccccagcccttgggaccatcttctcctgcagtcccctgggccccagtgagaggggcaggggcagggccggcagtaggtggggcctgtggtccccccactgccctgagggcattagctggtctaactgcccggaggcacccggccctgggccttaggcacctcaaggacttttctgctatttactgctcttattgttaaggataataattaaggatcatatgaataattaatgaagatgctgatgactatgaataataaataattatcctgaggaga

SEQ ID NO: 259 - DNA, 3884 bp, Homo sapiens
  source 1..3884: mol_type = genomic DNA
  misc_feature 1..3884: note = cDNA of KCNH2 gene SNP c.1778T>A (p.Ile593Lys)
atgccggtgcggaggggccacgtcgcgccgcagaacaccttcctggacaccatcatccgcaagtttgagggccagagccgtaagttcatcatcgccaacgctcgggtggagaactgcgccgtcatctactgcaacgacggcttctgcgagctgtgcggctactcgcgggccgaggtgatgcagcgaccctgcacctgcgacttcctgcacgggccgcgcacgcagcgccgcgctgccgcgcagatcgcgcaggcactgctgggcgccgaggagcgcaaagtggaaatcgccttctaccggaaagatgggagctgcttcctatgtctggtggatgtggtgcccgtgaagaacgaggatggggctgtcatcatgttcatcctcaatttcgaggtggtgatggagaaggacatggtggggtccccggctcatgacaccaaccaccggggcccccccaccagctggctggccccaggccgcgccaagaccttccgcctgaagctgcccgcgctgctggcgctgacggcccgggagtcgtcggtgcggtcgggcggcgcgggcggcgcgggcgccccgggggccgtggtggtggacgtggacctgacgcccgcggcacccagcagcgagtcgctggccctggacgaagtgacagccatggacaaccacgtggcagggctcgggcccgcggaggagcggcgtgcgctggtgggtcccggctctccgccccgcagcgcgcccggccagctcccatcgccccgggcgcacagcctcaaccccgacgcctcgggctccagctgcagcctggcccggacgcgctcccgagaaagctgcgccagcgtgcgccgcgcctcgtcggccgacgacatcgaggccatgcgcgccggggtgctgcccccgccaccgcgccacgccagcaccggggccatgcacccactgcgcagcggcttgctcaactccacctcggactccgacctcgtgcgctaccgcaccattagcaagattccccaaatcaccctcaactttgtggacctcaagggcgaccccttcttggcttcgcccaccagtgaccgtgagatcatagcacctaagataaaggagcgaacccacaatgtcactgagaaggtcacccaggtcctgtccctgggcgccgacgtgctgcctgagtacaagctgcaggcaccgcgcatccaccgctggaccatcctgcattacagccccttcaaggccgtgtgggactggctcatcctgctgctggtcatctacacggctgtcttcacaccctactcggctgccttcctgctgaaggagacggaagaaggcccgcctgctaccgagtgtggctacgcctgccagccgctggctgtggtggacctcatcgtggacatcatgttcattgtggacatcctcatcaacttccgcaccacctacgtcaatgccaacgaggaggtggtcagccaccccggccgcatcgccgtccactacttcaagggctggttcctcatcgacatggtggccgccatccccttcgacctgctcatcttcggctctggctctgaggagctgatcgggctgctgaagactgcgcggctgctgcggctggtgcgcgtggcgcggaagctggatcgctactcagagtacggcgcggccgtgctgttcttgctcatgtgcacctttgcgctcatcgcgcactggctagcctgcatctggtacgccatcggcaacatggagcagccacacatggactcacgcatcggctggctgcacaacctgggcgaccagaaaggcaaaccctacaacagcagcggcctgggcggcccctccatcaaggacaagtatgtgacggcgctctacttcaccttcagcagcctcaccagtgtgggcttcggcaacgtctctcccaacaccaactcagagaagatcttctccatctgcgtcatgctcattggctccctcatgtatgctagcatcttcggcaacgtgtcggccatcatccagcggctgtactcgggcacagcccgctaccacacacagatgctgcgggtgcgggagttcatccgcttccaccagatccccaatcccctgcgccagcgcctcgaggagtacttccagcacgcctggtcctacaccaacggcatcgacatgaacgcggtgctgaagggcttccctgagtgcctgcaggctgacatctgcctgcacctgaaccgctcactgctgcagcactgcaaacccttccgaggggccaccaagggctgccttcgggccctggccatgaagttcaagaccacacatgcaccgccaggggacacactggtgcatgctggggacctgctcaccgccctgtacttcatctcccggggctccatcgagatcctgcggggcgacgtcgtcgtggccatcctggggaagaatgacatctttggggagcctctgaacctgtatgcaaggcctggcaagtcgaacggggatgtgcgggccctcacctactgtgacctacacaagatccatcgggacgacctgctggaggtgctggacatgtaccctgagttctccgaccacttctggtccagcctggagatcaccttcaacctgcgagataccaacatgatcccgggctcccccggcagtacggagttagagggtggcttcagtcggcaacgcaagcgcaagttgtccttccgcaggcgcacggacaaggacacggagcagccaggggaggtgtcggccttggggccgggccgggcgggggcagggccgagtagccggggccggccgggggggccgtggggggagagcccgtccagtggcccctccagccctgagagcagtgaggatgagggcccaggccgcagctccagccccctccgcctggtgcccttctccagccccaggccccccggagagccgccgggtggggagcccctgatggaggactgcgagaagagcagcgacacttgcaaccccctgtcaggcgccttctcaggagtgtccaacattttcagcttctggggggacagtcggggccgccagtaccaggagctccctcgatgccccgcccccacccccagcctcctcaacatccccctctccagcccgggtcggcggccccggggcgacgtggagagcaggctggatgccctccagcgccagctcaacaggctggagacccggctgagtgcagacatggccactgtcctgcagctgctacagaggcagatgacgctggtcccgcccgcctacagtgctgtgaccaccccggggcctggccccacttccacatccccgctgttgcccgtcagccccctccccaccctcaccttggactcgctttctcaggtttcccagttcatggcgtgtgaggagctgcccccgggggccccagagcttccccaagaaggccccacacgacgcctctccctaccgggccagctgggggccctcacctcccagcccctgcacagacacggctcggacccgggcagttagtggggctgcccagtgtggacacgtggctcacccagggatcaaggcgctgctgggccgctccccttggaggccctgctcaggaggccctgaccgtggaaggggagaggaactcgaaagcacagctcctcccccagcccttgggaccatcttctcctgcagtcccctgggccccagtgagaggggcaggggcagggccggcagtaggtggggcctgtggtccccccactgccctgagggcattagctggtctaactgcccggaggcacccggccctgggccttaggcacctcaaggacttttctgctatttactgctcttattgttaaggataataattaaggatcatatgaataattaatgaagatgctgatgactatgaataataaataattatcctgaggaga

SEQ ID NO: 260 - DNA, 3884 bp, Homo sapiens
  source 1..3884: mol_type = genomic DNA
  misc_feature 1..3884: note = cDNA of KCNH2 gene SNP c.1778T>C (p.Ile593Thr)
atgccggtgcggaggggccacgtcgcgccgcagaacaccttcctggacaccatcatccgcaagtttgagggccagagccgtaagttcatcatcgccaacgctcgggtggagaactgcgccgtcatctactgcaacgacggcttctgcgagctgtgcggctactcgcgggccgaggtgatgcagcgaccctgcacctgcgacttcctgcacgggccgcgcacgcagcgccgcgctgccgcgcagatcgcgcaggcactgctgggcgccgaggagcgcaaagtggaaatcgccttctaccggaaagatgggagctgcttcctatgtctggtggatgtggtgcccgtgaagaacgaggatggggctgtcatcatgttcatcctcaatttcgaggtggtgatggagaaggacatggtggggtccccggctcatgacaccaaccaccggggcccccccaccagctggctggccccaggccgcgccaagaccttccgcctgaagctgcccgcgctgctggcgctgacggcccgggagtcgtcggtgcggtcgggcggcgcgggcggcgcgggcgccccgggggccgtggtggtggacgtggacctgacgcccgcggcacccagcagcgagtcgctggccctggacgaagtgacagccatggacaaccacgtggcagggctcgggcccgcggaggagcggcgtgcgctggtgggtcccggctctccgccccgcagcgcgcccggccagctcccatcgccccgggcgcacagcctcaaccccgacgcctcgggctccagctgcagcctggcccggacgcgctcccgagaaagctgcgccagcgtgcgccgcgcctcgtcggccgacgacatcgaggccatgcgcgccggggtgctgcccccgccaccgcgccacgccagcaccggggccatgcacccactgcgcagcggcttgctcaactccacctcggactccgacctcgtgcgctaccgcaccattagcaagattccccaaatcaccctcaactttgtggacctcaagggcgaccccttcttggcttcgcccaccagtgaccgtgagatcatagcacctaagataaaggagcgaacccacaatgtcactgagaaggtcacccaggtcctgtccctgggcgccgacgtgctgcctgagtacaagctgcaggcaccgcgcatccaccgctggaccatcctgcattacagccccttcaaggccgtgtgggactggctcatcctgctgctggtcatctacacggctgtcttcacaccctactcggctgccttcctgctgaaggagacggaagaaggcccgcctgctaccgagtgtggctacgcctgccagccgctggctgtggtggacctcatcgtggacatcatgttcattgtggacatcctcatcaacttccgcaccacctacgtcaatgccaacgaggaggtggtcagccaccccggccgcatcgccgtccactacttcaagggctggttcctcatcgacatggtggccgccatccccttcgacctgctcatcttcggctctggctctgaggagctgatcgggctgctgaagactgcgcggctgctgcggctggtgcgcgtggcgcggaagctggatcgctactcagagtacggcgcggccgtgctgttcttgctcatgtgcacctttgcgctcatcgcgcactggctagcctgcatctggtacgccatcggcaacatggagcagccacacatggactcacgcatcggctggctgcacaacctgggcgaccagacaggcaaaccctacaacagcagcggcctgggcggcccctccatcaaggacaagtatgtgacggcgctctacttcaccttcagcagcctcaccagtgtgggcttcggcaacgtctctcccaacaccaactcagagaagatcttctccatctgcgtcatgctcattggctccctcatgtatgctagcatcttcggcaacgtgtcggccatcatccagcggctgtactcgggcacagcccgctaccacacacagatgctgcgggtgcgggagttcatccgcttccaccagatccccaatcccctgcgccagcgcctcgaggagtacttccagcacgcctggtcctacaccaacggcatcgacatgaacgcggtgctgaagggcttccctgagtgcctgcaggctgacatctgcctgcacctgaaccgctcactgctgcagcactgcaaacccttccgaggggccaccaagggctgccttcgggccctggccatgaagttcaagaccacacatgcaccgccaggggacacactggtgcatgctggggacctgctcaccgccctgtacttcatctcccggggctccatcgagatcctgcggggcgacgtcgtcgtggccatcctggggaagaatgacatctttggggagcctctgaacctgtatgcaaggcctggcaagtcgaacggggatgtgcgggccctcacctactgtgacctacacaagatccatcgggacgacctgctggaggtgctggacatgtaccctgagttctccgaccacttctggtccagcctggagatcaccttcaacctgcgagataccaacatgatcccgggctcccccggcagtacggagttagagggtggcttcagtcggcaacgcaagcgcaagttgtccttccgcaggcgcacggacaaggacacggagcagccaggggaggtgtcggccttggggccgggccgggcgggggcagggccgagtagccggggccggccgggggggccgtggggggagagcccgtccagtggcccctccagccctgagagcagtgaggatgagggcccaggccgcagctccagccccctccgcctggtgcccttctccagccccaggccccccggagagccgccgggtggggagcccctgatggaggactgcgagaagagcagcgacacttgcaaccccctgtcaggcgccttctcaggagtgtccaacattttcagcttctggggggacagtcggggccgccagtaccaggagctccctcgatgccccgcccccacccccagcctcctcaacatccccctctccagcccgggtcggcggccccggggcgacgtggagagcaggctggatgccctccagcgccagctcaacaggctggagacccggctgagtgcagacatggccactgtcctgcagctgctacagaggcagatgacgctggtcccgcccgcctacagtgctgtgaccaccccggggcctggccccacttccacatccccgctgttgcccgtcagccccctccccaccctcaccttggactcgctttctcaggtttcccagttcatggcgtgtgaggagctgcccccgggggccccagagcttccccaagaaggccccacacgacgcctctccctaccgggccagctgggggccctcacctcccagcccctgcacagacacggctcggacccgggcagttagtggggctgcccagtgtggacacgtggctcacccagggatcaaggcgctgctgggccgctccccttggaggccctgctcaggaggccctgaccgtggaaggggagaggaactcgaaagcacagctcctcccccagcccttgggaccatcttctcctgcagtcccctgggccccagtgagaggggcaggggcagggccggcagtaggtggggcctgtggtccccccactgccctgagggcattagctggtctaactgcccggaggcacccggccctgggccttaggcacctcaaggacttttctgctatttactgctcttattgttaaggataataattaaggatcatatgaataattaatgaagatgctgatgactatgaataataaataattatcctgaggaga

SEQ ID NO: 261 - DNA, 3884 bp, Homo sapiens
  source 1..3884: mol_type = genomic DNA
  misc_feature 1..3884: note = cDNA of KCNH2 gene SNP c.1778T>G (p.Ile593Arg)
atgccggtgcggaggggccacgtcgcgccgcagaacaccttcctggacaccatcatccgcaagtttgagggccagagccgtaagttcatcatcgccaacgctcgggtggagaactgcgccgtcatctactgcaacgacggcttctgcgagctgtgcggctactcgcgggccgaggtgatgcagcgaccctgcacctgcgacttcctgcacgggccgcgcacgcagcgccgcgctgccgcgcagatcgcgcaggcactgctgggcgccgaggagcgcaaagtggaaatcgccttctaccggaaagatgggagctgcttcctatgtctggtggatgtggtgcccgtgaagaacgaggatggggctgtcatcatgttcatcctcaatttcgaggtggtgatggagaaggacatggtggggtccccggctcatgacaccaaccaccggggcccccccaccagctggctggccccaggccgcgccaagaccttccgcctgaagctgcccgcgctgctggcgctgacggcccgggagtcgtcggtgcggtcgggcggcgcgggcggcgcgggcgccccgggggccgtggtggtggacgtggacctgacgcccgcggcacccagcagcgagtcgctggccctggacgaagtgacagccatggacaaccacgtggcagggctcgggcccgcggaggagcggcgtgcgctggtgggtcccggctctccgccccgcagcgcgcccggccagctcccatcgccccgggcgcacagcctcaaccccgacgcctcgggctccagctgcagcctggcccggacgcgctcccgagaaagctgcgccagcgtgcgccgcgcctcgtcggccgacgacatcgaggccatgcgcgccggggtgctgcccccgccaccgcgccacgccagcaccggggccatgcacccactgcgcagcggcttgctcaactccacctcggactccgacctcgtgcgctaccgcaccattagcaagattccccaaatcaccctcaactttgtggacctcaagggcgaccccttcttggcttcgcccaccagtgaccgtgagatcatagcacctaagataaaggagcgaacccacaatgtcactgagaaggtcacccaggtcctgtccctgggcgccgacgtgctgcctgagtacaagctgcaggcaccgcgcatccaccgctggaccatcctgcattacagccccttcaaggccgtgtgggactggctcatcctgctgctggtcatctacacggctgtcttcacaccctactcggctgccttcctgctgaaggagacggaagaaggcccgcctgctaccgagtgtggctacgcctgccagccgctggctgtggtggacctcatcgtggacatcatgttcattgtggacatcctcatcaacttccgcaccacctacgtcaatgccaacgaggaggtggtcagccaccccggccgcatcgccgtccactacttcaagggctggttcctcatcgacatggtggccgccatccccttcgacctgctcatcttcggctctggctctgaggagctgatcgggctgctgaagactgcgcggctgctgcggctggtgcgcgtggcgcggaagctggatcgctactcagagtacggcgcggccgtgctgttcttgctcatgtgcacctttgcgctcatcgcgcactggctagcctgcatctggtacgccatcggcaacatggagcagccacacatggactcacgcatcggctggctgcacaacctgggcgaccagagaggcaaaccctacaacagcagcggcctgggcggcccctccatcaaggacaagtatgtgacggcgctctacttcaccttcagcagcctcaccagtgtgggcttcggcaacgtctctcccaacaccaactcagagaagatcttctccatctgcgtcatgctcattggctccctcatgtatgctagcatcttcggcaacgtgtcggccatcatccagcggctgtactcgggcacagcccgctaccacacacagatgctgcgggtgcgggagttcatccgcttccaccagatccccaatcccctgcgccagcgcctcgaggagtacttccagcacgcctggtcctacaccaacggcatcgacatgaacgcggtgctgaagggcttccctgagtgcctgcaggctgacatctgcctgcacctgaaccgctcactgctgcagcactgcaaacccttccgaggggccaccaagggctgccttcgggccctggccatgaagttcaagaccacacatgcaccgccaggggacacactggtgcatgctggggacctgctcaccgccctgtacttcatctcccggggctccatcgagatcctgcggggcgacgtcgtcgtggccatcctggggaagaatgacatctttggggagcctctgaacctgtatgcaaggcctggcaagtcgaacggggatgtgcgggccctcacctactgtgacctacacaagatccatcgggacgacctgctggaggtgctggacatgtaccctgagttctccgaccacttctggtccagcctggagatcaccttcaacctgcgagataccaacatgatcccgggctcccccggcagtacggagttagagggtggcttcagtcggcaacgcaagcgcaagttgtccttccgcaggcgcacggacaaggacacggagcagccaggggaggtgtcggccttggggccgggccgggcgggggcagggccgagtagccggggccggccgggggggccgtggggggagagcccgtccagtggcccctccagccctgagagcagtgaggatgagggcccaggccgcagctccagccccctccgcctggtgcccttctccagccccaggccccccggagagccgccgggtggggagcccctgatggaggactgcgagaagagcagcgacacttgcaaccccctgtcaggcgccttctcaggagtgtccaacattttcagcttctggggggacagtcggggccgccagtaccaggagctccctcgatgccccgcccccacccccagcctcctcaacatccccctctccagcccgggtcggcggccccggggcgacgtggagagcaggctggatgccctccagcgccagctcaacaggctggagacccggctgagtgcagacatggccactgtcctgcagctgctacagaggcagatgacgctggtcccgcccgcctacagtgctgtgaccaccccggggcctggccccacttccacatccccgctgttgcccgtcagccccctccccaccctcaccttggactcgctttctcaggtttcccagttcatggcgtgtgaggagctgcccccgggggccccagagcttccccaagaaggccccacacgacgcctctccctaccgggccagctgggggccctcacctcccagcccctgcacagacacggctcggacccgggcagttagtggggctgcccagtgtggacacgtggctcacccagggatcaaggcgctgctgggccgctccccttggaggccctgctcaggaggccctgaccgtggaaggggagaggaactcgaaagcacagctcctcccccagcccttgggaccatcttctcctgcagtcccctgggccccagtgagaggggcaggggcagggccggcagtaggtggggcctgtggtccccccactgccctgagggcattagctggtctaactgcccggaggcacccggccctgggccttaggcacctcaaggacttttctgctatttactgctcttattgttaaggataataattaaggatcatatgaataattaatgaagatgctgatgactatgaataataaataattatcctgaggaga

SEQ ID NO: 262 - DNA, 3884 bp, Homo sapiens
  source 1..3884: mol_type = genomic DNA
  misc_feature 1..3884: note = cDNA of KCNH2 gene SNP c.1780G>C (p.Gly594Arg)
atgccggtgcggaggggccacgtcgcgccgcagaacaccttcctggacaccatcatccgcaagtttgagggccagagccgtaagttcatcatcgccaacgctcgggtggagaactgcgccgtcatctactgcaacgacggcttctgcgagctgtgcggctactcgcgggccgaggtgatgcagcgaccctgcacctgcgacttcctgcacgggccgcgcacgcagcgccgcgctgccgcgcagatcgcgcaggcactgctgggcgccgaggagcgcaaagtggaaatcgccttctaccggaaagatgggagctgcttcctatgtctggtggatgtggtgcccgtgaagaacgaggatggggctgtcatcatgttcatcctcaatttcgaggtggtgatggagaaggacatggtggggtccccggctcatgacaccaaccaccggggcccccccaccagctggctggccccaggccgcgccaagaccttccgcctgaagctgcccgcgctgctggcgctgacggcccgggagtcgtcggtgcggtcgggcggcgcgggcggcgcgggcgccccgggggccgtggtggtggacgtggacctgacgcccgcggcacccagcagcgagtcgctggccctggacgaagtgacagccatggacaaccacgtggcagggctcgggcccgcggaggagcggcgtgcgctggtgggtcccggctctccgccccgcagcgcgcccggccagctcccatcgccccgggcgcacagcctcaaccccgacgcctcgggctccagctgcagcctggcccggacgcgctcccgagaaagctgcgccagcgtgcgccgcgcctcgtcggccgacgacatcgaggccatgcgcgccggggtgctgcccccgccaccgcgccacgccagcaccggggccatgcacccactgcgcagcggcttgctcaactccacctcggactccgacctcgtgcgctaccgcaccattagcaagattccccaaatcaccctcaactttgtggacctcaagggcgaccccttcttggcttcgcccaccagtgaccgtgagatcatagcacctaagataaaggagcgaacccacaatgtcactgagaaggtcacccaggtcctgtccctgggcgccgacgtgctgcctgagtacaagctgcaggcaccgcgcatccaccgctggaccatcctgcattacagccccttcaaggccgtgtgggactggctcatcctgctgctggtcatctacacggctgtcttcacaccctactcggctgccttcctgctgaaggagacggaagaaggcccgcctgctaccgagtgtggctacgcctgccagccgctggctgtggtggacctcatcgtggacatcatgttcattgtggacatcctcatcaacttccgcaccacctacgtcaatgccaacgaggaggtggtcagccaccccggccgcatcgccgtccactacttcaagggctggttcctcatcgacatggtggccgccatccccttcgacctgctcatcttcggctctggctctgaggagctgatcgggctgctgaagactgcgcggctgctgcggctggtgcgcgtggcgcggaagctggatcgctactcagagtacggcgcggccgtgctgttcttgctcatgtgcacctttgcgctcatcgcgcactggctagcctgcatctggtacgccatcggcaacatggagcagccacacatggactcacgcatcggctggctgcacaacctgggcgaccagatacgcaaaccctacaacagcagcggcctgggcggcccctccatcaaggacaagtatgtgacggcgctctacttcaccttcagcagcctcaccagtgtgggcttcggcaacgtctctcccaacaccaactcagagaagatcttctccatctgcgtcatgctcattggctccctcatgtatgctagcatcttcggcaacgtgtcggccatcatccagcggctgtactcgggcacagcccgctaccacacacagatgctgcgggtgcgggagttcatccgcttccaccagatccccaatcccctgcgccagcgcctcgaggagtacttccagcacgcctggtcctacaccaacggcatcgacatgaacgcggtgctgaagggcttccctgagtgcctgcaggctgacatctgcctgcacctgaaccgctcactgctgcagcactgcaaacccttccgaggggccaccaagggctgccttcgggccctggccatgaagttcaagaccacacatgcaccgccaggggacacactggtgcatgctggggacctgctcaccgccctgtacttcatctcccggggctccatcgagatcctgcggggcgacgtcgtcgtggccatcctggggaagaatgacatctttggggagcctctgaacctgtatgcaaggcctggcaagtcgaacggggatgtgcgggccctcacctactgtgacctacacaagatccatcgggacgacctgctggaggtgctggacatgtaccctgagttctccgaccacttctggtccagcctggagatcaccttcaacctgcgagataccaacatgatcccgggctcccccggcagtacggagttagagggtggcttcagtcggcaacgcaagcgcaagttgtccttccgcaggcgcacggacaaggacacggagcagccaggggaggtgtcggccttggggccgggccgggcgggggcagggccgagtagccggggccggccgggggggccgtggggggagagcccgtccagtggcccctccagccctgagagcagtgaggatgagggcccaggccgcagctccagccccctccgcctggtgcccttctccagccccaggccccccggagagccgccgggtggggagcccctgatggaggactgcgagaagagcagcgacacttgcaaccccctgtcaggcgccttctcaggagtgtccaacattttcagcttctggggggacagtcggggccgccagtaccaggagctccctcgatgccccgcccccacccccagcctcctcaacatccccctctccagcccgggtcggcggccccggggcgacgtggagagcaggctggatgccctccagcgccagctcaacaggctggagacccggctgagtgcagacatggccactgtcctgcagctgctacagaggcagatgacgctggtcccgcccgcctacagtgctgtgaccaccccggggcctggccccacttccacatccccgctgttgcccgtcagccccctccccaccctcaccttggactcgctttctcaggtttcccagttcatggcgtgtgaggagctgcccccgggggccccagagcttccccaagaaggccccacacgacgcctctccctaccgggccagctgggggccctcacctcccagcccctgcacagacacggctcggacccgggcagttagtggggctgcccagtgtggacacgtggctcacccagggatcaaggcgctgctgggccgctccccttggaggccctgctcaggaggccctgaccgtggaaggggagaggaactcgaaagcacagctcctcccccagcccttgggaccatcttctcctgcagtcccctgggccccagtgagaggggcaggggcagggccggcagtaggtggggcctgtggtccccccactgccctgagggcattagctggtctaactgcccggaggcacccggccctgggccttaggcacctcaaggacttttctgctatttactgctcttattgttaaggataataattaaggatcatatgaataattaatgaagatgctgatgactatgaataataaataattatcctgaggaga

SEQ ID NO: 263 - DNA, 3884 bp, Homo sapiens
  source 1..3884: mol_type = genomic DNA
  misc_feature 1..3884: note = cDNA of KCNH2 gene SNP c.1781G>A (p.Gly594Asp)
atgccggtgcggaggggccacgtcgcgccgcagaacaccttcctggacaccatcatccgcaagtttgagggccagagccgtaagttcatcatcgccaacgctcgggtggagaactgcgccgtcatctactgcaacgacggcttctgcgagctgtgcggctactcgcgggccgaggtgatgcagcgaccctgcacctgcgacttcctgcacgggccgcgcacgcagcgccgcgctgccgcgcagatcgcgcaggcactgctgggcgccgaggagcgcaaagtggaaatcgccttctaccggaaagatgggagctgcttcctatgtctggtggatgtggtgcccgtgaagaacgaggatggggctgtcatcatgttcatcctcaatttcgaggtggtgatggagaaggacatggtggggtccccggctcatgacaccaaccaccggggcccccccaccagctggctggccccaggccgcgccaagaccttccgcctgaagctgcccgcgctgctggcgctgacggcccgggagtcgtcggtgcggtcgggcggcgcgggcggcgcgggcgccccgggggccgtggtggtggacgtggacctgacgcccgcggcacccagcagcgagtcgctggccctggacgaagtgacagccatggacaaccacgtggcagggctcgggcccgcggaggagcggcgtgcgctggtgggtcccggctctccgccccgcagcgcgcccggccagctcccatcgccccgggcgcacagcctcaaccccgacgcctcgggctccagctgcagcctggcccggacgcgctcccgagaaagctgcgccagcgtgcgccgcgcctcgtcggccgacgacatcgaggccatgcgcgccggggtgctgcccccgccaccgcgccacgccagcaccggggccatgcacccactgcgcagcggcttgctcaactccacctcggactccgacctcgtgcgctaccgcaccattagcaagattccccaaatcaccctcaactttgtggacctcaagggcgaccccttcttggcttcgcccaccagtgaccgtgagatcatagcacctaagataaaggagcgaacccacaatgtcactgagaaggtcacccaggtcctgtccctgggcgccgacgtgctgcctgagtacaagctgcaggcaccgcgcatccaccgctggaccatcctgcattacagccccttcaaggccgtgtgggactggctcatcctgctgctggtcatctacacggctgtcttcacaccctactcggctgccttcctgctgaaggagacggaagaaggcccgcctgctaccgagtgtggctacgcctgccagccgctggctgtggtggacctcatcgtggacatcatgttcattgtggacatcctcatcaacttccgcaccacctacgtcaatgccaacgaggaggtggtcagccaccccggccgcatcgccgtccactacttcaagggctggttcctcatcgacatggtggccgccatccccttcgacctgctcatcttcggctctggctctgaggagctgatcgggctgctgaagactgcgcggctgctgcggctggtgcgcgtggcgcggaagctggatcgctactcagagtacggcgcggccgtgctgttcttgctcatgtgcacctttgcgctcatcgcgcactggctagcctgcatctggtacgccatcggcaacatggagcagccacacatggactcacgcatcggctggctgcacaacctgggcgaccagatagacaaaccctacaacagcagcggcctgggcggcccctccatcaaggacaagtatgtgacggcgctctacttcaccttcagcagcctcaccagtgtgggcttcggcaacgtctctcccaacaccaactcagagaagatcttctccatctgcgtcatgctcattggctccctcatgtatgctagcatcttcggcaacgtgtcggccatcatccagcggctgtactcgggcacagcccgctaccacacacagatgctgcgggtgcgggagttcatccgcttccaccagatccccaatcccctgcgccagcgcctcgaggagtacttccagcacgcctggtcctacaccaacggcatcgacatgaacgcggtgctgaagggcttccctgagtgcctgcaggctgacatctgcctgcacctgaaccgctcactgctgcagcactgcaaacccttccgaggggccaccaagggctgccttcgggccctggccatgaagttcaagaccacacatgcaccgccaggggacacactggtgcatgctggggacctgctcaccgccctgtacttcatctcccggggctccatcgagatcctgcggggcgacgtcgtcgtggccatcctggggaagaatgacatctttggggagcctctgaacctgtatgcaaggcctggcaagtcgaacggggatgtgcgggccctcacctactgtgacctacacaagatccatcgggacgacctgctggaggtgctggacatgtaccctgagttctccgaccacttctggtccagcctggagatcaccttcaacctgcgagataccaacatgatcccgggctcccccggcagtacggagttagagggtggcttcagtcggcaacgcaagcgcaagttgtccttccgcaggcgcacggacaaggacacggagcagccaggggaggtgtcggccttggggccgggccgggcgggggcagggccgagtagccggggccggccgggggggccgtggggggagagcccgtccagtggcccctccagccctgagagcagtgaggatgagggcccaggccgcagctccagccccctccgcctggtgcccttctccagccccaggccccccggagagccgccgggtggggagcccctgatggaggactgcgagaagagcagcgacacttgcaaccccctgtcaggcgccttctcaggagtgtccaacattttcagcttctggggggacagtcggggccgccagtaccaggagctccctcgatgccccgcccccacccccagcctcctcaacatccccctctccagcccgggtcggcggccccggggcgacgtggagagcaggctggatgccctccagcgccagctcaacaggctggagacccggctgagtgcagacatggccactgtcctgcagctgctacagaggcagatgacgctggtcccgcccgcctacagtgctgtgaccaccccggggcctggccccacttccacatccccgctgttgcccgtcagccccctccccaccctcaccttggactcgctttctcaggtttcccagttcatggcgtgtgaggagctgcccccgggggccccagagcttccccaagaaggccccacacgacgcctctccctaccgggccagctgggggccctcacctcccagcccctgcacagacacggctcggacccgggcagttagtggggctgcccagtgtggacacgtggctcacccagggatcaaggcgctgctgggccgctccccttggaggccctgctcaggaggccctgaccgtggaaggggagaggaactcgaaagcacagctcctcccccagcccttgggaccatcttctcctgcagtcccctgggccccagtgagaggggcaggggcagggccggcagtaggtggggcctgtggtccccccactgccctgagggcattagctggtctaactgcccggaggcacccggccctgggccttaggcacctcaaggacttttctgctatttactgctcttattgttaaggataataattaaggatcatatgaataattaatgaagatgctgatgactatgaataataaataattatcctgaggaga

SEQ ID NO: 264 - DNA, 3884 bp, Homo sapiens
  source 1..3884: mol_type = genomic DNA
  misc_feature 1..3884: note = cDNA of KCNH2 gene SNP c.1783A>G (p.Lys595Glu)
atgccggtgcggaggggccacgtcgcgccgcagaacaccttcctggacaccatcatccgcaagtttgagggccagagccgtaagttcatcatcgccaacgctcgggtggagaactgcgccgtcatctactgcaacgacggcttctgcgagctgtgcggctactcgcgggccgaggtgatgcagcgaccctgcacctgcgacttcctgcacgggccgcgcacgcagcgccgcgctgccgcgcagatcgcgcaggcactgctgggcgccgaggagcgcaaagtggaaatcgccttctaccggaaagatgggagctgcttcctatgtctggtggatgtggtgcccgtgaagaacgaggatggggctgtcatcatgttcatcctcaatttcgaggtggtgatggagaaggacatggtggggtccccggctcatgacaccaaccaccggggcccccccaccagctggctggccccaggccgcgccaagaccttccgcctgaagctgcccgcgctgctggcgctgacggcccgggagtcgtcggtgcggtcgggcggcgcgggcggcgcgggcgccccgggggccgtggtggtggacgtggacctgacgcccgcggcacccagcagcgagtcgctggccctggacgaagtgacagccatggacaaccacgtggcagggctcgggcccgcggaggagcggcgtgcgctggtgggtcccggctctccgccccgcagcgcgcccggccagctcccatcgccccgggcgcacagcctcaaccccgacgcctcgggctccagctgcagcctggcccggacgcgctcccgagaaagctgcgccagcgtgcgccgcgcctcgtcggccgacgacatcgaggccatgcgcgccggggtgctgcccccgccaccgcgccacgccagcaccggggccatgcacccactgcgcagcggcttgctcaactccacctcggactccgacctcgtgcgctaccgcaccattagcaagattccccaaatcaccctcaactttgtggacctcaagggcgaccccttcttggcttcgcccaccagtgaccgtgagatcatagcacctaagataaaggagcgaacccacaatgtcactgagaaggtcacccaggtcctgtccctgggcgccgacgtgctgcctgagtacaagctgcaggcaccgcgcatccaccgctggaccatcctgcattacagccccttcaaggccgtgtgggactggctcatcctgctgctggtcatctacacggctgtcttcacaccctactcggctgccttcctgctgaaggagacggaagaaggcccgcctgctaccgagtgtggctacgcctgccagccgctggctgtggtggacctcatcgtggacatcatgttcattgtggacatcctcatcaacttccgcaccacctacgtcaatgccaacgaggaggtggtcagccaccccggccgcatcgccgtccactacttcaagggctggttcctcatcgacatggtggccgccatccccttcgacctgctcatcttcggctctggctctgaggagctgatcgggctgctgaagactgcgcggctgctgcggctggtgcgcgtggcgcggaagctggatcgctactcagagtacggcgcggccgtgctgttcttgctcatgtgcacctttgcgctcatcgcgcactggctagcctgcatctggtacgccatcggcaacatggagcagccacacatggactcacgcatcggctggctgcacaacctgggcgaccagataggcgaaccctacaacagcagcggcctgggcggcccctccatcaaggacaagtatgtgacggcgctctacttcaccttcagcagcctcaccagtgtgggcttcggcaacgtctctcccaacaccaactcagagaagatcttctccatctgcgtcatgctcattggctccctcatgtatgctagcatcttcggcaacgtgtcggccatcatccagcggctgtactcgggcacagcccgctaccacacacagatgctgcgggtgcgggagttcatccgcttccaccagatccccaatcccctgcgccagcgcctcgaggagtacttccagcacgcctggtcctacaccaacggcatcgacatgaacgcggtgctgaagggcttccctgagtgcctgcaggctgacatctgcctgcacctgaaccgctcactgctgcagcactgcaaacccttccgaggggccaccaagggctgccttcgggccctggccatgaagttcaagaccacacatgcaccgccaggggacacactggtgcatgctggggacctgctcaccgccctgtacttcatctcccggggctccatcgagatcctgcggggcgacgtcgtcgtggccatcctggggaagaatgacatctttggggagcctctgaacctgtatgcaaggcctggcaagtcgaacggggatgtgcgggccctcacctactgtgacctacacaagatccatcgggacgacctgctggaggtgctggacatgtaccctgagttctccgaccacttctggtccagcctggagatcaccttcaacctgcgagataccaacatgatcccgggctcccccggcagtacggagttagagggtggcttcagtcggcaacgcaagcgcaagttgtccttccgcaggcgcacggacaaggacacggagcagccaggggaggtgtcggccttggggccgggccgggcgggggcagggccgagtagccggggccggccgggggggccgtggggggagagcccgtccagtggcccctccagccctgagagcagtgaggatgagggcccaggccgcagctccagccccctccgcctggtgcccttctccagccccaggccccccggagagccgccgggtggggagcccctgatggaggactgcgagaagagcagcgacacttgcaaccccctgtcaggcgccttctcaggagtgtccaacattttcagcttctggggggacagtcggggccgccagtaccaggagctccctcgatgccccgcccccacccccagcctcctcaacatccccctctccagcccgggtcggcggccccggggcgacgtggagagcaggctggatgccctccagcgccagctcaacaggctggagacccggctgagtgcagacatggccactgtcctgcagctgctacagaggcagatgacgctggtcccgcccgcctacagtgctgtgaccaccccggggcctggccccacttccacatccccgctgttgcccgtcagccccctccccaccctcaccttggactcgctttctcaggtttcccagttcatggcgtgtgaggagctgcccccgggggccccagagcttccccaagaaggccccacacgacgcctctccctaccgggccagctgggggccctcacctcccagcccctgcacagacacggctcggacccgggcagttagtggggctgcccagtgtggacacgtggctcacccagggatcaaggcgctgctgggccgctccccttggaggccctgctcaggaggccctgaccgtggaaggggagaggaactcgaaagcacagctcctcccccagcccttgggaccatcttctcctgcagtcccctgggccccagtgagaggggcaggggcagggccggcagtaggtggggcctgtggtccccccactgccctgagggcattagctggtctaactgcccggaggcacccggccctgggccttaggcacctcaaggacttttctgctatttactgctcttattgttaaggataataattaaggatcatatgaataattaatgaagatgctgatgactatgaataataaataattatcctgaggaga

SEQ ID NO: 265 - DNA, 3884 bp, Homo sapiens
  source 1..3884: mol_type = genomic DNA
  misc_feature 1..3884: note = cDNA of KCNH2 gene SNP c.1785A>T (p.Lys595Asn)
atgccggtgcggaggggccacgtcgcgccgcagaacaccttcctggacaccatcatccgcaagtttgagggccagagccgtaagttcatcatcgccaacgctcgggtggagaactgcgccgtcatctactgcaacgacggcttctgcgagctgtgcggctactcgcgggccgaggtgatgcagcgaccctgcacctgcgacttcctgcacgggccgcgcacgcagcgccgcgctgccgcgcagatcgcgcaggcactgctgggcgccgaggagcgcaaagtggaaatcgccttctaccggaaagatgggagctgcttcctatgtctggtggatgtggtgcccgtgaagaacgaggatggggctgtcatcatgttcatcctcaatttcgaggtggtgatggagaaggacatggtggggtccccggctcatgacaccaaccaccggggcccccccaccagctggctggccccaggccgcgccaagaccttccgcctgaagctgcccgcgctgctggcgctgacggcccgggagtcgtcggtgcggtcgggcggcgcgggcggcgcgggcgccccgggggccgtggtggtggacgtggacctgacgcccgcggcacccagcagcgagtcgctggccctggacgaagtgacagccatggacaaccacgtggcagggctcgggcccgcggaggagcggcgtgcgctggtgggtcccggctctccgccccgcagcgcgcccggccagctcccatcgccccgggcgcacagcctcaaccccgacgcctcgggctccagctgcagcctggcccggacgcgctcccgagaaagctgcgccagcgtgcgccgcgcctcgtcggccgacgacatcgaggccatgcgcgccggggtgctgcccccgccaccgcgccacgccagcaccggggccatgcacccactgcgcagcggcttgctcaactccacctcggactccgacctcgtgcgctaccgcaccattagcaagattccccaaatcaccctcaactttgtggacctcaagggcgaccccttcttggcttcgcccaccagtgaccgtgagatcatagcacctaagataaaggagcgaacccacaatgtcactgagaaggtcacccaggtcctgtccctgggcgccgacgtgctgcctgagtacaagctgcaggcaccgcgcatccaccgctggaccatcctgcattacagccccttcaaggccgtgtgggactggctcatcctgctgctggtcatctacacggctgtcttcacaccctactcggctgccttcctgctgaaggagacggaagaaggcccgcctgctaccgagtgtggctacgcctgccagccgctggctgtggtggacctcatcgtggacatcatgttcattgtggacatcctcatcaacttccgcaccacctacgtcaatgccaacgaggaggtggtcagccaccccggccgcatcgccgtccactacttcaagggctggttcctcatcgacatggtggccgccatccccttcgacctgctcatcttcggctctggctctgaggagctgatcgggctgctgaagactgcgcggctgctgcggctggtgcgcgtggcgcggaagctggatcgctactcagagtacggcgcggccgtgctgttcttgctcatgtgcacctttgcgctcatcgcgcactggctagcctgcatctggtacgccatcggcaacatggagcagccacacatggactcacgcatcggctggctgcacaacctgggcgaccagataggcaatccctacaacagcagcggcctgggcggcccctccatcaaggacaagtatgtgacggcgctctacttcaccttcagcagcctcaccagtgtgggcttcggcaacgtctctcccaacaccaactcagagaagatcttctccatctgcgtcatgctcattggctccctcatgtatgctagcatcttcggcaacgtgtcggccatcatccagcggctgtactcgggcacagcccgctaccacacacagatgctgcgggtgcgggagttcatccgcttccaccagatccccaatcccctgcgccagcgcctcgaggagtacttccagcacgcctggtcctacaccaacggcatcgacatgaacgcggtgctgaagggcttccctgagtgcctgcaggctgacatctgcctgcacctgaaccgctcactgctgcagcactgcaaacccttccgaggggccaccaagggctgccttcgggccctggccatgaagttcaagaccacacatgcaccgccaggggacacactggtgcatgctggggacctgctcaccgccctgtacttcatctcccggggctccatcgagatcctgcggggcgacgtcgtcgtggccatcctggggaagaatgacatctttggggagcctctgaacctgtatgcaaggcctggcaagtcgaacggggatgtgcgggccctcacctactgtgacctacacaagatccatcgggacgacctgctggaggtgctggacatgtaccctgagttctccgaccacttctggtccagcctggagatcaccttcaacctgcgagataccaacatgatcccgggctcccccggcagtacggagttagagggtggcttcagtcggcaacgcaagcgcaagttgtccttccgcaggcgcacggacaaggacacggagcagccaggggaggtgtcggccttggggccgggccgggcgggggcagggccgagtagccggggccggccgggggggccgtggggggagagcccgtccagtggcccctccagccctgagagcagtgaggatgagggcccaggccgcagctccagccccctccgcctggtgcccttctccagccccaggccccccggagagccgccgggtggggagcccctgatggaggactgcgagaagagcagcgacacttgcaaccccctgtcaggcgccttctcaggagtgtccaacattttcagcttctggggggacagtcggggccgccagtaccaggagctccctcgatgccccgcccccacccccagcctcctcaacatccccctctccagcccgggtcggcggccccggggcgacgtggagagcaggctggatgccctccagcgccagctcaacaggctggagacccggctgagtgcagacatggccactgtcctgcagctgctacagaggcagatgacgctggtcccgcccgcctacagtgctgtgaccaccccggggcctggccccacttccacatccccgctgttgcccgtcagccccctccccaccctcaccttggactcgctttctcaggtttcccagttcatggcgtgtgaggagctgcccccgggggccccagagcttccccaagaaggccccacacgacgcctctccctaccgggccagctgggggccctcacctcccagcccctgcacagacacggctcggacccgggcagttagtggggctgcccagtgtggacacgtggctcacccagggatcaaggcgctgctgggccgctccccttggaggccctgctcaggaggccctgaccgtggaaggggagaggaactcgaaagcacagctcctcccccagcccttgggaccatcttctcctgcagtcccctgggccccagtgagaggggcaggggcagggccggcagtaggtggggcctgtggtccccccactgccctgagggcattagctggtctaactgcccggaggcacccggccctgggccttaggcacctcaaggacttttctgctatttactgctcttattgttaaggataataattaaggatcatatgaataattaatgaagatgctgatgactatgaataataaataattatcctgaggaga

SEQ ID NO: 266 - DNA, 3884 bp, Homo sapiens
  source 1..3884: mol_type = genomic DNA
  misc_feature 1..3884: note = cDNA of KCNH2 gene SNP c.1786C>G (p.Pro596Ala)
atgccggtgcggaggggccacgtcgcgccgcagaacaccttcctggacaccatcatccgcaagtttgagggccagagccgtaagttcatcatcgccaacgctcgggtggagaactgcgccgtcatctactgcaacgacggcttctgcgagctgtgcggctactcgcgggccgaggtgatgcagcgaccctgcacctgcgacttcctgcacgggccgcgcacgcagcgccgcgctgccgcgcagatcgcgcaggcactgctgggcgccgaggagcgcaaagtggaaatcgccttctaccggaaagatgggagctgcttcctatgtctggtggatgtggtgcccgtgaagaacgaggatggggctgtcatcatgttcatcctcaatttcgaggtggtgatggagaaggacatggtggggtccccggctcatgacaccaaccaccggggcccccccaccagctggctggccccaggccgcgccaagaccttccgcctgaagctgcccgcgctgctggcgctgacggcccgggagtcgtcggtgcggtcgggcggcgcgggcggcgcgggcgccccgggggccgtggtggtggacgtggacctgacgcccgcggcacccagcagcgagtcgctggccctggacgaagtgacagccatggacaaccacgtggcagggctcgggcccgcggaggagcggcgtgcgctggtgggtcccggctctccgccccgcagcgcgcccggccagctcccatcgccccgggcgcacagcctcaaccccgacgcctcgggctccagctgcagcctggcccggacgcgctcccgagaaagctgcgccagcgtgcgccgcgcctcgtcggccgacgacatcgaggccatgcgcgccggggtgctgcccccgccaccgcgccacgccagcaccggggccatgcacccactgcgcagcggcttgctcaactccacctcggactccgacctcgtgcgctaccgcaccattagcaagattccccaaatcaccctcaactttgtggacctcaagggcgaccccttcttggcttcgcccaccagtgaccgtgagatcatagcacctaagataaaggagcgaacccacaatgtcactgagaaggtcacccaggtcctgtccctgggcgccgacgtgctgcctgagtacaagctgcaggcaccgcgcatccaccgctggaccatcctgcattacagccccttcaaggccgtgtgggactggctcatcctgctgctggtcatctacacggctgtcttcacaccctactcggctgccttcctgctgaaggagacggaagaaggcccgcctgctaccgagtgtggctacgcctgccagccgctggctgtggtggacctcatcgtggacatcatgttcattgtggacatcctcatcaacttccgcaccacctacgtcaatgccaacgaggaggtggtcagccaccccggccgcatcgccgtccactacttcaagggctggttcctcatcgacatggtggccgccatccccttcgacctgctcatcttcggctctggctctgaggagctgatcgggctgctgaagactgcgcggctgctgcggctggtgcgcgtggcgcggaagctggatcgctactcagagtacggcgcggccgtgctgttcttgctcatgtgcacctttgcgctcatcgcgcactggctagcctgcatctggtacgccatcggcaacatggagcagccacacatggactcacgcatcggctggctgcacaacctgggcgaccagataggcaaagcctacaacagcagcggcctgggcggcccctccatcaaggacaagtatgtgacggcgctctacttcaccttcagcagcctcaccagtgtgggcttcggcaacgtctctcccaacaccaactcagagaagatcttctccatctgcgtcatgctcattggctccctcatgtatgctagcatcttcggcaacgtgtcggccatcatccagcggctgtactcgggcacagcccgctaccacacacagatgctgcgggtgcgggagttcatccgcttccaccagatccccaatcccctgcgccagcgcctcgaggagtacttccagcacgcctggtcctacaccaacggcatcgacatgaacgcggtgctgaagggcttccctgagtgcctgcaggctgacatctgcctgcacctgaaccgctcactgctgcagcactgcaaacccttccgaggggccaccaagggctgccttcgggccctggccatgaagttcaagaccacacatgcaccgccaggggacacactggtgcatgctggggacctgctcaccgccctgtacttcatctcccggggctccatcgagatcctgcggggcgacgtcgtcgtggccatcctggggaagaatgacatctttggggagcctctgaacctgtatgcaaggcctggcaagtcgaacggggatgtgcgggccctcacctactgtgacctacacaagatccatcgggacgacctgctggaggtgctggacatgtaccctgagttctccgaccacttctggtccagcctggagatcaccttcaacctgcgagataccaacatgatcccgggctcccccggcagtacggagttagagggtggcttcagtcggcaacgcaagcgcaagttgtccttccgcaggcgcacggacaaggacacggagcagccaggggaggtgtcggccttggggccgggccgggcgggggcagggccgagtagccggggccggccgggggggccgtggggggagagcccgtccagtggcccctccagccctgagagcagtgaggatgagggcccaggccgcagctccagccccctccgcctggtgcccttctccagccccaggccccccggagagccgccgggtggggagcccctgatggaggactgcgagaagagcagcgacacttgcaaccccctgtcaggcgccttctcaggagtgtccaacattttcagcttctggggggacagtcggggccgccagtaccaggagctccctcgatgccccgcccccacccccagcctcctcaacatccccctctccagcccgggtcggcggccccggggcgacgtggagagcaggctggatgccctccagcgccagctcaacaggctggagacccggctgagtgcagacatggccactgtcctgcagctgctacagaggcagatgacgctggtcccgcccgcctacagtgctgtgaccaccccggggcctggccccacttccacatccccgctgttgcccgtcagccccctccccaccctcaccttggactcgctttctcaggtttcccagttcatggcgtgtgaggagctgcccccgggggccccagagcttccccaagaaggccccacacgacgcctctccctaccgggccagctgggggccctcacctcccagcccctgcacagacacggctcggacccgggcagttagtggggctgcccagtgtggacacgtggctcacccagggatcaaggcgctgctgggccgctccccttggaggccctgctcaggaggccctgaccgtggaaggggagaggaactcgaaagcacagctcctcccccagcccttgggaccatcttctcctgcagtcccctgggccccagtgagaggggcaggggcagggccggcagtaggtggggcctgtggtccccccactgccctgagggcattagctggtctaactgcccggaggcacccggccctgggccttaggcacctcaaggacttttctgctatttactgctcttattgttaaggataataattaaggatcatatgaataattaatgaagatgctgatgactatgaataataaataattatcctgaggaga

SEQ ID NO: 267 - DNA, 3884 bp, Homo sapiens
  source 1..3884: mol_type = genomic DNA
  misc_feature 1..3884: note = cDNA of KCNH2 gene SNP c.1787C>A (p.Pro596His)
atgccggtgcggaggggccacgtcgcgccgcagaacaccttcctggacaccatcatccgcaagtttgagggccagagccgtaagttcatcatcgccaacgctcgggtggagaactgcgccgtcatctactgcaacgacggcttctgcgagctgtgcggctactcgcgggccgaggtgatgcagcgaccctgcacctgcgacttcctgcacgggccgcgcacgcagcgccgcgctgccgcgcagatcgcgcaggcactgctgggcgccgaggagcgcaaagtggaaatcgccttctaccggaaagatgggagctgcttcctatgtctggtggatgtggtgcccgtgaagaacgaggatggggctgtcatcatgttcatcctcaatttcgaggtggtgatggagaaggacatggtggggtccccggctcatgacaccaaccaccggggcccccccaccagctggctggccccaggccgcgccaagaccttccgcctgaagctgcccgcgctgctggcgctgacggcccgggagtcgtcggtgcggtcgggcggcgcgggcggcgcgggcgccccgggggccgtggtggtggacgtggacctgacgcccgcggcacccagcagcgagtcgctggccctggacgaagtgacagccatggacaaccacgtggcagggctcgggcccgcggaggagcggcgtgcgctggtgggtcccggctctccgccccgcagcgcgcccggccagctcccatcgccccgggcgcacagcctcaaccccgacgcctcgggctccagctgcagcctggcccggacgcgctcccgagaaagctgcgccagcgtgcgccgcgcctcgtcggccgacgacatcgaggccatgcgcgccggggtgctgcccccgccaccgcgccacgccagcaccggggccatgcacccactgcgcagcggcttgctcaactccacctcggactccgacctcgtgcgctaccgcaccattagcaagattccccaaatcaccctcaactttgtggacctcaagggcgaccccttcttggcttcgcccaccagtgaccgtgagatcatagcacctaagataaaggagcgaacccacaatgtcactgagaaggtcacccaggtcctgtccctgggcgccgacgtgctgcctgagtacaagctgcaggcaccgcgcatccaccgctggaccatcctgcattacagccccttcaaggccgtgtgggactggctcatcctgctgctggtcatctacacggctgtcttcacaccctactcggctgccttcctgctgaaggagacggaagaaggcccgcctgctaccgagtgtggctacgcctgccagccgctggctgtggtggacctcatcgtggacatcatgttcattgtggacatcctcatcaacttccgcaccacctacgtcaatgccaacgaggaggtggtcagccaccccggccgcatcgccgtccactacttcaagggctggttcctcatcgacatggtggccgccatccccttcgacctgctcatcttcggctctggctctgaggagctgatcgggctgctgaagactgcgcggctgctgcggctggtgcgcgtggcgcggaagctggatcgctactcagagtacggcgcggccgtgctgttcttgctcatgtgcacctttgcgctcatcgcgcactggctagcctgcatctggtacgccatcggcaacatggagcagccacacatggactcacgcatcggctggctgcacaacctgggcgaccagataggcaaacactacaacagcagcggcctgggcggcccctccatcaaggacaagtatgtgacggcgctctacttcaccttcagcagcctcaccagtgtgggcttcggcaacgtctctcccaacaccaactcagagaagatcttctccatctgcgtcatgctcattggctccctcatgtatgctagcatcttcggcaacgtgtcggccatcatccagcggctgtactcgggcacagcccgctaccacacacagatgctgcgggtgcgggagttcatccgcttccaccagatccccaatcccctgcgccagcgcctcgaggagtacttccagcacgcctggtcctacaccaacggcatcgacatgaacgcggtgctgaagggcttccctgagtgcctgcaggctgacatctgcctgcacctgaaccgctcactgctgcagcactgcaaacccttccgaggggccaccaagggctgccttcgggccctggccatgaagttcaagaccacacatgcaccgccaggggacacactggtgcatgctggggacctgctcaccgccctgtacttcatctcccggggctccatcgagatcctgcggggcgacgtcgtcgtggccatcctggggaagaatgacatctttggggagcctctgaacctgtatgcaaggcctggcaagtcgaacggggatgtgcgggccctcacctactgtgacctacacaagatccatcgggacgacctgctggaggtgctggacatgtaccctgagttctccgaccacttctggtccagcctggagatcaccttcaacctgcgagataccaacatgatcccgggctcccccggcagtacggagttagagggtggcttcagtcggcaacgcaagcgcaagttgtccttccgcaggcgcacggacaaggacacggagcagccaggggaggtgtcggccttggggccgggccgggcgggggcagggccgagtagccggggccggccgggggggccgtggggggagagcccgtccagtggcccctccagccctgagagcagtgaggatgagggcccaggccgcagctccagccccctccgcctggtgcccttctccagccccaggccccccggagagccgccgggtggggagcccctgatggaggactgcgagaagagcagcgacacttgcaaccccctgtcaggcgccttctcaggagtgtccaacattttcagcttctggggggacagtcggggccgccagtaccaggagctccctcgatgccccgcccccacccccagcctcctcaacatccccctctccagcccgggtcggcggccccggggcgacgtggagagcaggctggatgccctccagcgccagctcaacaggctggagacccggctgagtgcagacatggccactgtcctgcagctgctacagaggcagatgacgctggtcccgcccgcctacagtgctgtgaccaccccggggcctggccccacttccacatccccgctgttgcccgtcagccccctccccaccctcaccttggactcgctttctcaggtttcccagttcatggcgtgtgaggagctgcccccgggggccccagagcttccccaagaaggccccacacgacgcctctccctaccgggccagctgggggccctcacctcccagcccctgcacagacacggctcggacccgggcagttagtggggctgcccagtgtggacacgtggctcacccagggatcaaggcgctgctgggccgctccccttggaggccctgctcaggaggccctgaccgtggaaggggagaggaactcgaaagcacagctcctcccccagcccttgggaccatcttctcctgcagtcccctgggccccagtgagaggggcaggggcagggccggcagtaggtggggcctgtggtccccccactgccctgagggcattagctggtctaactgcccggaggcacccggccctgggccttaggcacctcaaggacttttctgctatttactgctcttattgttaaggataataattaaggatcatatgaataattaatgaagatgctgatgactatgaataataaataattatcctgaggaga

SEQ ID NO: 268 - DNA, 3884 bp, Homo sapiens
  source 1..3884: mol_type = genomic DNA
  misc_feature 1..3884: note = cDNA of KCNH2 gene SNP c.1787C>G (p.Pro596Arg)
atgccggtgcggaggggccacgtcgcgccgcagaacaccttcctggacaccatcatccgcaagtttgagggccagagccgtaagttcatcatcgccaacgctcgggtggagaactgcgccgtcatctactgcaacgacggcttctgcgagctgtgcggctactcgcgggccgaggtgatgcagcgaccctgcacctgcgacttcctgcacgggccgcgcacgcagcgccgcgctgccgcgcagatcgcgcaggcactgctgggcgccgaggagcgcaaagtggaaatcgccttctaccggaaagatgggagctgcttcctatgtctggtggatgtggtgcccgtgaagaacgaggatggggctgtcatcatgttcatcctcaatttcgaggtggtgatggagaaggacatggtggggtccccggctcatgacaccaaccaccggggcccccccaccagctggctggccccaggccgcgccaagaccttccgcctgaagctgcccgcgctgctggcgctgacggcccgggagtcgtcggtgcggtcgggcggcgcgggcggcgcgggcgccccgggggccgtggtggtggacgtggacctgacgcccgcggcacccagcagcgagtcgctggccctggacgaagtgacagccatggacaaccacgtggcagggctcgggcccgcggaggagcggcgtgcgctggtgggtcccggctctccgccccgcagcgcgcccggccagctcccatcgccccgggcgcacagcctcaaccccgacgcctcgggctccagctgcagcctggcccggacgcgctcccgagaaagctgcgccagcgtgcgccgcgcctcgtcggccgacgacatcgaggccatgcgcgccggggtgctgcccccgccaccgcgccacgccagcaccggggccatgcacccactgcgcagcggcttgctcaactccacctcggactccgacctcgtgcgctaccgcaccattagcaagattccccaaatcaccctcaactttgtggacctcaagggcgaccccttcttggcttcgcccaccagtgaccgtgagatcatagcacctaagataaaggagcgaacccacaatgtcactgagaaggtcacccaggtcctgtccctgggcgccgacgtgctgcctgagtacaagctgcaggcaccgcgcatccaccgctggaccatcctgcattacagccccttcaaggccgtgtgggactggctcatcctgctgctggtcatctacacggctgtcttcacaccctactcggctgccttcctgctgaaggagacggaagaaggcccgcctgctaccgagtgtggctacgcctgccagccgctggctgtggtggacctcatcgtggacatcatgttcattgtggacatcctcatcaacttccgcaccacctacgtcaatgccaacgaggaggtggtcagccaccccggccgcatcgccgtccactacttcaagggctggttcctcatcgacatggtggccgccatccccttcgacctgctcatcttcggctctggctctgaggagctgatcgggctgctgaagactgcgcggctgctgcggctggtgcgcgtggcgcggaagctggatcgctactcagagtacggcgcggccgtgctgttcttgctcatgtgcacctttgcgctcatcgcgcactggctagcctgcatctggtacgccatcggcaacatggagcagccacacatggactcacgcatcggctggctgcacaacctgggcgaccagataggcaaacgctacaacagcagcggcctgggcggcccctccatcaaggacaagtatgtgacggcgctctacttcaccttcagcagcctcaccagtgtgggcttcggcaacgtctctcccaacaccaactcagagaagatcttctccatctgcgtcatgctcattggctccctcatgtatgctagcatcttcggcaacgtgtcggccatcatccagcggctgtactcgggcacagcccgctaccacacacagatgctgcgggtgcgggagttcatccgcttccaccagatccccaatcccctgcgccagcgcctcgaggagtacttccagcacgcctggtcctacaccaacggcatcgacatgaacgcggtgctgaagggcttccctgagtgcctgcaggctgacatctgcctgcacctgaaccgctcactgctgcagcactgcaaacccttccgaggggccaccaagggctgccttcgggccctggccatgaagttcaagaccacacatgcaccgccaggggacacactggtgcatgctggggacctgctcaccgccctgtacttcatctcccggggctccatcgagatcctgcggggcgacgtcgtcgtggccatcctggggaagaatgacatctttggggagcctctgaacctgtatgcaaggcctggcaagtcgaacggggatgtgcgggccctcacctactgtgacctacacaagatccatcgggacgacctgctggaggtgctggacatgtaccctgagttctccgaccacttctggtccagcctggagatcaccttcaacctgcgagataccaacatgatcccgggctcccccggcagtacggagttagagggtggcttcagtcggcaacgcaagcgcaagttgtccttccgcaggcgcacggacaaggacacggagcagccaggggaggtgtcggccttggggccgggccgggcgggggcagggccgagtagccggggccggccgggggggccgtggggggagagcccgtccagtggcccctccagccctgagagcagtgaggatgagggcccaggccgcagctccagccccctccgcctggtgcccttctccagccccaggccccccggagagccgccgggtggggagcccctgatggaggactgcgagaagagcagcgacacttgcaaccccctgtcaggcgccttctcaggagtgtccaacattttcagcttctggggggacagtcggggccgccagtaccaggagctccctcgatgccccgcccccacccccagcctcctcaacatccccctctccagcccgggtcggcggccccggggcgacgtggagagcaggctggatgccctccagcgccagctcaacaggctggagacccggctgagtgcagacatggccactgtcctgcagctgctacagaggcagatgacgctggtcccgcccgcctacagtgctgtgaccaccccggggcctggccccacttccacatccccgctgttgcccgtcagccccctccccaccctcaccttggactcgctttctcaggtttcccagttcatggcgtgtgaggagctgcccccgggggccccagagcttccccaagaaggccccacacgacgcctctccctaccgggccagctgggggccctcacctcccagcccctgcacagacacggctcggacccgggcagttagtggggctgcccagtgtggacacgtggctcacccagggatcaaggcgctgctgggccgctccccttggaggccctgctcaggaggccctgaccgtggaaggggagaggaactcgaaagcacagctcctcccccagcccttgggaccatcttctcctgcagtcccctgggccccagtgagaggggcaggggcagggccggcagtaggtggggcctgtggtccccccactgccctgagggcattagctggtctaactgcccggaggcacccggccctgggccttaggcacctcaaggacttttctgctatttactgctcttattgttaaggataataattaaggatcatatgaataattaatgaagatgctgatgactatgaataataaataattatcctgaggaga

SEQ ID NO: 269 - DNA, 3884 bp, Homo sapiens
  source 1..3884: mol_type = genomic DNA
  misc_feature 1..3884: note = cDNA of KCNH2 gene SNP c.1787C>T (p.Pro596Leu)
atgccggtgcggaggggccacgtcgcgccgcagaacaccttcctggacaccatcatccgcaagtttgagggccagagccgtaagttcatcatcgccaacgctcgggtggagaactgcgccgtcatctactgcaacgacggcttctgcgagctgtgcggctactcgcgggccgaggtgatgcagcgaccctgcacctgcgacttcctgcacgggccgcgcacgcagcgccgcgctgccgcgcagatcgcgcaggcactgctgggcgccgaggagcgcaaagtggaaatcgccttctaccggaaagatgggagctgcttcctatgtctggtggatgtggtgcccgtgaagaacgaggatggggctgtcatcatgttcatcctcaatttcgaggtggtgatggagaaggacatggtggggtccccggctcatgacaccaaccaccggggcccccccaccagctggctggccccaggccgcgccaagaccttccgcctgaagctgcccgcgctgctggcgctgacggcccgggagtcgtcggtgcggtcgggcggcgcgggcggcgcgggcgccccgggggccgtggtggtggacgtggacctgacgcccgcggcacccagcagcgagtcgctggccctggacgaagtgacagccatggacaaccacgtggcagggctcgggcccgcggaggagcggcgtgcgctggtgggtcccggctctccgccccgcagcgcgcccggccagctcccatcgccccgggcgcacagcctcaaccccgacgcctcgggctccagctgcagcctggcccggacgcgctcccgagaaagctgcgccagcgtgcgccgcgcctcgtcggccgacgacatcgaggccatgcgcgccggggtgctgcccccgccaccgcgccacgccagcaccggggccatgcacccactgcgcagcggcttgctcaactccacctcggactccgacctcgtgcgctaccgcaccattagcaagattccccaaatcaccctcaactttgtggacctcaagggcgaccccttcttggcttcgcccaccagtgaccgtgagatcatagcacctaagataaaggagcgaacccacaatgtcactgagaaggtcacccaggtcctgtccctgggcgccgacgtgctgcctgagtacaagctgcaggcaccgcgcatccaccgctggaccatcctgcattacagccccttcaaggccgtgtgggactggctcatcctgctgctggtcatctacacggctgtcttcacaccctactcggctgccttcctgctgaaggagacggaagaaggcccgcctgctaccgagtgtggctacgcctgccagccgctggctgtggtggacctcatcgtggacatcatgttcattgtggacatcctcatcaacttccgcaccacctacgtcaatgccaacgaggaggtggtcagccaccccggccgcatcgccgtccactacttcaagggctggttcctcatcgacatggtggccgccatccccttcgacctgctcatcttcggctctggctctgaggagctgatcgggctgctgaagactgcgcggctgctgcggctggtgcgcgtggcgcggaagctggatcgctactcagagtacggcgcggccgtgctgttcttgctcatgtgcacctttgcgctcatcgcgcactggctagcctgcatctggtacgccatcggcaacatggagcagccacacatggactcacgcatcggctggctgcacaacctgggcgaccagataggcaaactctacaacagcagcggcctgggcggcccctccatcaaggacaagtatgtgacggcgctctacttcaccttcagcagcctcaccagtgtgggcttcggcaacgtctctcccaacaccaactcagagaagatcttctccatctgcgtcatgctcattggctccctcatgtatgctagcatcttcggcaacgtgtcggccatcatccagcggctgtactcgggcacagcccgctaccacacacagatgctgcgggtgcgggagttcatccgcttccaccagatccccaatcccctgcgccagcgcctcgaggagtacttccagcacgcctggtcctacaccaacggcatcgacatgaacgcggtgctgaagggcttccctgagtgcctgcaggctgacatctgcctgcacctgaaccgctcactgctgcagcactgcaaacccttccgaggggccaccaagggctgccttcgggccctggccatgaagttcaagaccacacatgcaccgccaggggacacactggtgcatgctggggacctgctcaccgccctgtacttcatctcccggggctccatcgagatcctgcggggcgacgtcgtcgtggccatcctggggaagaatgacatctttggggagcctctgaacctgtatgcaaggcctggcaagtcgaacggggatgtgcgggccctcacctactgtgacctacacaagatccatcgggacgacctgctggaggtgctggacatgtaccctgagttctccgaccacttctggtccagcctggagatcaccttcaacctgcgagataccaacatgatcccgggctcccccggcagtacggagttagagggtggcttcagtcggcaacgcaagcgcaagttgtccttccgcaggcgcacggacaaggacacggagcagccaggggaggtgtcggccttggggccgggccgggcgggggcagggccgagtagccggggccggccgggggggccgtggggggagagcccgtccagtggcccctccagccctgagagcagtgaggatgagggcccaggccgcagctccagccccctccgcctggtgcccttctccagccccaggccccccggagagccgccgggtggggagcccctgatggaggactgcgagaagagcagcgacacttgcaaccccctgtcaggcgccttctcaggagtgtccaacattttcagcttctggggggacagtcggggccgccagtaccaggagctccctcgatgccccgcccccacccccagcctcctcaacatccccctctccagcccgggtcggcggccccggggcgacgtggagagcaggctggatgccctccagcgccagctcaacaggctggagacccggctgagtgcagacatggccactgtcctgcagctgctacagaggcagatgacgctggtcccgcccgcctacagtgctgtgaccaccccggggcctggccccacttccacatccccgctgttgcccgtcagccccctccccaccctcaccttggactcgctttctcaggtttcccagttcatggcgtgtgaggagctgcccccgggggccccagagcttccccaagaaggccccacacgacgcctctccctaccgggccagctgggggccctcacctcccagcccctgcacagacacggctcggacccgggcagttagtggggctgcccagtgtggacacgtggctcacccagggatcaaggcgctgctgggccgctccccttggaggccctgctcaggaggccctgaccgtggaaggggagaggaactcgaaagcacagctcctcccccagcccttgggaccatcttctcctgcagtcccctgggccccagtgagaggggcaggggcagggccggcagtaggtggggcctgtggtccccccactgccctgagggcattagctggtctaactgcccggaggcacccggccctgggccttaggcacctcaaggacttttctgctatttactgctcttattgttaaggataataattaaggatcatatgaataattaatgaagatgctgatgactatgaataataaataattatcctgaggaga

SEQ ID NO: 270 - DNA, 3884 bp, Homo sapiens
  source 1..3884: mol_type = genomic DNA
  misc_feature 1..3884: note = cDNA of KCNH2 gene SNP c.1790A>G (p.Tyr597Cys)
atgccggtgcggaggggccacgtcgcgccgcagaacaccttcctggacaccatcatccgcaagtttgagggccagagccgtaagttcatcatcgccaacgctcgggtggagaactgcgccgtcatctactgcaacgacggcttctgcgagctgtgcggctactcgcgggccgaggtgatgcagcgaccctgcacctgcgacttcctgcacgggccgcgcacgcagcgccgcgctgccgcgcagatcgcgcaggcactgctgggcgccgaggagcgcaaagtggaaatcgccttctaccggaaagatgggagctgcttcctatgtctggtggatgtggtgcccgtgaagaacgaggatggggctgtcatcatgttcatcctcaatttcgaggtggtgatggagaaggacatggtggggtccccggctcatgacaccaaccaccggggcccccccaccagctggctggccccaggccgcgccaagaccttccgcctgaagctgcccgcgctgctggcgctgacggcccgggagtcgtcggtgcggtcgggcggcgcgggcggcgcgggcgccccgggggccgtggtggtggacgtggacctgacgcccgcggcacccagcagcgagtcgctggccctggacgaagtgacagccatggacaaccacgtggcagggctcgggcccgcggaggagcggcgtgcgctggtgggtcccggctctccgccccgcagcgcgcccggccagctcccatcgccccgggcgcacagcctcaaccccgacgcctcgggctccagctgcagcctggcccggacgcgctcccgagaaagctgcgccagcgtgcgccgcgcctcgtcggccgacgacatcgaggccatgcgcgccggggtgctgcccccgccaccgcgccacgccagcaccggggccatgcacccactgcgcagcggcttgctcaactccacctcggactccgacctcgtgcgctaccgcaccattagcaagattccccaaatcaccctcaactttgtggacctcaagggcgaccccttcttggcttcgcccaccagtgaccgtgagatcatagcacctaagataaaggagcgaacccacaatgtcactgagaaggtcacccaggtcctgtccctgggcgccgacgtgctgcctgagtacaagctgcaggcaccgcgcatccaccgctggaccatcctgcattacagccccttcaaggccgtgtgggactggctcatcctgctgctggtcatctacacggctgtcttcacaccctactcggctgccttcctgctgaaggagacggaagaaggcccgcctgctaccgagtgtggctacgcctgccagccgctggctgtggtggacctcatcgtggacatcatgttcattgtggacatcctcatcaacttccgcaccacctacgtcaatgccaacgaggaggtggtcagccaccccggccgcatcgccgtccactacttcaagggctggttcctcatcgacatggtggccgccatccccttcgacctgctcatcttcggctctggctctgaggagctgatcgggctgctgaagactgcgcggctgctgcggctggtgcgcgtggcgcggaagctggatcgctactcagagtacggcgcggccgtgctgttcttgctcatgtgcacctttgcgctcatcgcgcactggctagcctgcatctggtacgccatcggcaacatggagcagccacacatggactcacgcatcggctggctgcacaacctgggcgaccagataggcaaaccctgcaacagcagcggcctgggcggcccctccatcaaggacaagtatgtgacggcgctctacttcaccttcagcagcctcaccagtgtgggcttcggcaacgtctctcccaacaccaactcagagaagatcttctccatctgcgtcatgctcattggctccctcatgtatgctagcatcttcggcaacgtgtcggccatcatccagcggctgtactcgggcacagcccgctaccacacacagatgctgcgggtgcgggagttcatccgcttccaccagatccccaatcccctgcgccagcgcctcgaggagtacttccagcacgcctggtcctacaccaacggcatcgacatgaacgcggtgctgaagggcttccctgagtgcctgcaggctgacatctgcctgcacctgaaccgctcactgctgcagcactgcaaacccttccgaggggccaccaagggctgccttcgggccctggccatgaagttcaagaccacacatgcaccgccaggggacacactggtgcatgctggggacctgctcaccgccctgtacttcatctcccggggctccatcgagatcctgcggggcgacgtcgtcgtggccatcctggggaagaatgacatctttggggagcctctgaacctgtatgcaaggcctggcaagtcgaacggggatgtgcgggccctcacctactgtgacctacacaagatccatcgggacgacctgctggaggtgctggacatgtaccctgagttctccgaccacttctggtccagcctggagatcaccttcaacctgcgagataccaacatgatcccgggctcccccggcagtacggagttagagggtggcttcagtcggcaacgcaagcgcaagttgtccttccgcaggcgcacggacaaggacacggagcagccaggggaggtgtcggccttggggccgggccgggcgggggcagggccgagtagccggggccggccgggggggccgtggggggagagcccgtccagtggcccctccagccctgagagcagtgaggatgagggcccaggccgcagctccagccccctccgcctggtgcccttctccagccccaggccccccggagagccgccgggtggggagcccctgatggaggactgcgagaagagcagcgacacttgcaaccccctgtcaggcgccttctcaggagtgtccaacattttcagcttctggggggacagtcggggccgccagtaccaggagctccctcgatgccccgcccccacccccagcctcctcaacatccccctctccagcccgggtcggcggccccggggcgacgtggagagcaggctggatgccctccagcgccagctcaacaggctggagacccggctgagtgcagacatggccactgtcctgcagctgctacagaggcagatgacgctggtcccgcccgcctacagtgctgtgaccaccccggggcctggccccacttccacatccccgctgttgcccgtcagccccctccccaccctcaccttggactcgctttctcaggtttcccagttcatggcgtgtgaggagctgcccccgggggccccagagcttccccaagaaggccccacacgacgcctctccctaccgggccagctgggggccctcacctcccagcccctgcacagacacggctcggacccgggcagttagtggggctgcccagtgtggacacgtggctcacccagggatcaaggcgctgctgggccgctccccttggaggccctgctcaggaggccctgaccgtggaaggggagaggaactcgaaagcacagctcctcccccagcccttgggaccatcttctcctgcagtcccctgggccccagtgagaggggcaggggcagggccggcagtaggtggggcctgtggtccccccactgccctgagggcattagctggtctaactgcccggaggcacccggccctgggccttaggcacctcaaggacttttctgctatttactgctcttattgttaaggataataattaaggatcatatgaataattaatgaagatgctgatgactatgaataataaataattatcctgaggaga

SEQ ID NO: 271 - DNA, 3884 bp, Homo sapiens
  source 1..3884: mol_type = genomic DNA
  misc_feature 1..3884: note = cDNA of KCNH2 gene SNP c.1796G>A (p.Ser599Asn)
atgccggtgcggaggggccacgtcgcgccgcagaacaccttcctggacaccatcatccgcaagtttgagggccagagccgtaagttcatcatcgccaacgctcgggtggagaactgcgccgtcatctactgcaacgacggcttctgcgagctgtgcggctactcgcgggccgaggtgatgcagcgaccctgcacctgcgacttcctgcacgggccgcgcacgcagcgccgcgctgccgcgcagatcgcgcaggcactgctgggcgccgaggagcgcaaagtggaaatcgccttctaccggaaagatgggagctgcttcctatgtctggtggatgtggtgcccgtgaagaacgaggatggggctgtcatcatgttcatcctcaatttcgaggtggtgatggagaaggacatggtggggtccccggctcatgacaccaaccaccggggcccccccaccagctggctggccccaggccgcgccaagaccttccgcctgaagctgcccgcgctgctggcgctgacggcccgggagtcgtcggtgcggtcgggcggcgcgggcggcgcgggcgccccgggggccgtggtggtggacgtggacctgacgcccgcggcacccagcagcgagtcgctggccctggacgaagtgacagccatggacaaccacgtggcagggctcgggcccgcggaggagcggcgtgcgctggtgggtcccggctctccgccccgcagcgcgcccggccagctcccatcgccccgggcgcacagcctcaaccccgacgcctcgggctccagctgcagcctggcccggacgcgctcccgagaaagctgcgccagcgtgcgccgcgcctcgtcggccgacgacatcgaggccatgcgcgccggggtgctgcccccgccaccgcgccacgccagcaccggggccatgcacccactgcgcagcggcttgctcaactccacctcggactccgacctcgtgcgctaccgcaccattagcaagattccccaaatcaccctcaactttgtggacctcaagggcgaccccttcttggcttcgcccaccagtgaccgtgagatcatagcacctaagataaaggagcgaacccacaatgtcactgagaaggtcacccaggtcctgtccctgggcgccgacgtgctgcctgagtacaagctgcaggcaccgcgcatccaccgctggaccatcctgcattacagccccttcaaggccgtgtgggactggctcatcctgctgctggtcatctacacggctgtcttcacaccctactcggctgccttcctgctgaaggagacggaagaaggcccgcctgctaccgagtgtggctacgcctgccagccgctggctgtggtggacctcatcgtggacatcatgttcattgtggacatcctcatcaacttccgcaccacctacgtcaatgccaacgaggaggtggtcagccaccccggccgcatcgccgtccactacttcaagggctggttcctcatcgacatggtggccgccatccccttcgacctgctcatcttcggctctggctctgaggagctgatcgggctgctgaagactgcgcggctgctgcggctggtgcgcgtggcgcggaagctggatcgctactcagagtacggcgcggccgtgctgttcttgctcatgtgcacctttgcgctcatcgcgcactggctagcctgcatctggtacgccatcggcaacatggagcagccacacatggactcacgcatcggctggctgcacaacctgggcgaccagataggcaaaccctacaacaacagcggcctgggcggcccctccatcaaggacaagtatgtgacggcgctctacttcaccttcagcagcctcaccagtgtgggcttcggcaacgtctctcccaacaccaactcagagaagatcttctccatctgcgtcatgctcattggctccctcatgtatgctagcatcttcggcaacgtgtcggccatcatccagcggctgtactcgggcacagcccgctaccacacacagatgctgcgggtgcgggagttcatccgcttccaccagatccccaatcccctgcgccagcgcctcgaggagtacttccagcacgcctggtcctacaccaacggcatcgacatgaacgcggtgctgaagggcttccctgagtgcctgcaggctgacatctgcctgcacctgaaccgctcactgctgcagcactgcaaacccttccgaggggccaccaagggctgccttcgggccctggccatgaagttcaagaccacacatgcaccgccaggggacacactggtgcatgctggggacctgctcaccgccctgtacttcatctcccggggctccatcgagatcctgcggggcgacgtcgtcgtggccatcctggggaagaatgacatctttggggagcctctgaacctgtatgcaaggcctggcaagtcgaacggggatgtgcgggccctcacctactgtgacctacacaagatccatcgggacgacctgctggaggtgctggacatgtaccctgagttctccgaccacttctggtccagcctggagatcaccttcaacctgcgagataccaacatgatcccgggctcccccggcagtacggagttagagggtggcttcagtcggcaacgcaagcgcaagttgtccttccgcaggcgcacggacaaggacacggagcagccaggggaggtgtcggccttggggccgggccgggcgggggcagggccgagtagccggggccggccgggggggccgtggggggagagcccgtccagtggcccctccagccctgagagcagtgaggatgagggcccaggccgcagctccagccccctccgcctggtgcccttctccagccccaggccccccggagagccgccgggtggggagcccctgatggaggactgcgagaagagcagcgacacttgcaaccccctgtcaggcgccttctcaggagtgtccaacattttcagcttctggggggacagtcggggccgccagtaccaggagctccctcgatgccccgcccccacccccagcctcctcaacatccccctctccagcccgggtcggcggccccggggcgacgtggagagcaggctggatgccctccagcgccagctcaacaggctggagacccggctgagtgcagacatggccactgtcctgcagctgctacagaggcagatgacgctggtcccgcccgcctacagtgctgtgaccaccccggggcctggccccacttccacatccccgctgttgcccgtcagccccctccccaccctcaccttggactcgctttctcaggtttcccagttcatggcgtgtgaggagctgcccccgggggccccagagcttccccaagaaggccccacacgacgcctctccctaccgggccagctgggggccctcacctcccagcccctgcacagacacggctcggacccgggcagttagtggggctgcccagtgtggacacgtggctcacccagggatcaaggcgctgctgggccgctccccttggaggccctgctcaggaggccctgaccgtggaaggggagaggaactcgaaagcacagctcctcccccagcccttgggaccatcttctcctgcagtcccctgggccccagtgagaggggcaggggcagggccggcagtaggtggggcctgtggtccccccactgccctgagggcattagctggtctaactgcccggaggcacccggccctgggccttaggcacctcaaggacttttctgctatttactgctcttattgttaaggataataattaaggatcatatgaataattaatgaagatgctgatgactatgaataataaataattatcctgaggaga

SEQ ID NO: 272 - DNA, 3884 bp, Homo sapiens
  source 1..3884: mol_type = genomic DNA
  misc_feature 1..3884: note = cDNA of KCNH2 gene SNP c.1797C>A (p.Ser599Arg)
atgccggtgcggaggggccacgtcgcgccgcagaacaccttcctggacaccatcatccgcaagtttgagggccagagccgtaagttcatcatcgccaacgctcgggtggagaactgcgccgtcatctactgcaacgacggcttctgcgagctgtgcggctactcgcgggccgaggtgatgcagcgaccctgcacctgcgacttcctgcacgggccgcgcacgcagcgccgcgctgccgcgcagatcgcgcaggcactgctgggcgccgaggagcgcaaagtggaaatcgccttctaccggaaagatgggagctgcttcctatgtctggtggatgtggtgcccgtgaagaacgaggatggggctgtcatcatgttcatcctcaatttcgaggtggtgatggagaaggacatggtggggtccccggctcatgacaccaaccaccggggcccccccaccagctggctggccccaggccgcgccaagaccttccgcctgaagctgcccgcgctgctggcgctgacggcccgggagtcgtcggtgcggtcgggcggcgcgggcggcgcgggcgccccgggggccgtggtggtggacgtggacctgacgcccgcggcacccagcagcgagtcgctggccctggacgaagtgacagccatggacaaccacgtggcagggctcgggcccgcggaggagcggcgtgcgctggtgggtcccggctctccgccccgcagcgcgcccggccagctcccatcgccccgggcgcacagcctcaaccccgacgcctcgggctccagctgcagcctggcccggacgcgctcccgagaaagctgcgccagcgtgcgccgcgcctcgtcggccgacgacatcgaggccatgcgcgccggggtgctgcccccgccaccgcgccacgccagcaccggggccatgcacccactgcgcagcggcttgctcaactccacctcggactccgacctcgtgcgctaccgcaccattagcaagattccccaaatcaccctcaactttgtggacctcaagggcgaccccttcttggcttcgcccaccagtgaccgtgagatcatagcacctaagataaaggagcgaacccacaatgtcactgagaaggtcacccaggtcctgtccctgggcgccgacgtgctgcctgagtacaagctgcaggcaccgcgcatccaccgctggaccatcctgcattacagccccttcaaggccgtgtgggactggctcatcctgctgctggtcatctacacggctgtcttcacaccctactcggctgccttcctgctgaaggagacggaagaaggcccgcctgctaccgagtgtggctacgcctgccagccgctggctgtggtggacctcatcgtggacatcatgttcattgtggacatcctcatcaacttccgcaccacctacgtcaatgccaacgaggaggtggtcagccaccccggccgcatcgccgtccactacttcaagggctggttcctcatcgacatggtggccgccatccccttcgacctgctcatcttcggctctggctctgaggagctgatcgggctgctgaagactgcgcggctgctgcggctggtgcgcgtggcgcggaagctggatcgctactcagagtacggcgcggccgtgctgttcttgctcatgtgcacctttgcgctcatcgcgcactggctagcctgcatctggtacgccatcggcaacatggagcagccacacatggactcacgcatcggctggctgcacaacctgggcgaccagataggcaaaccctacaacagaagcggcctgggcggcccctccatcaaggacaagtatgtgacggcgctctacttcaccttcagcagcctcaccagtgtgggcttcggcaacgtctctcccaacaccaactcagagaagatcttctccatctgcgtcatgctcattggctccctcatgtatgctagcatcttcggcaacgtgtcggccatcatccagcggctgtactcgggcacagcccgctaccacacacagatgctgcgggtgcgggagttcatccgcttccaccagatccccaatcccctgcgccagcgcctcgaggagtacttccagcacgcctggtcctacaccaacggcatcgacatgaacgcggtgctgaagggcttccctgagtgcctgcaggctgacatctgcctgcacctgaaccgctcactgctgcagcactgcaaacccttccgaggggccaccaagggctgccttcgggccctggccatgaagttcaagaccacacatgcaccgccaggggacacactggtgcatgctggggacctgctcaccgccctgtacttcatctcccggggctccatcgagatcctgcggggcgacgtcgtcgtggccatcctggggaagaatgacatctttggggagcctctgaacctgtatgcaaggcctggcaagtcgaacggggatgtgcgggccctcacctactgtgacctacacaagatccatcgggacgacctgctggaggtgctggacatgtaccctgagttctccgaccacttctggtccagcctggagatcaccttcaacctgcgagataccaacatgatcccgggctcccccggcagtacggagttagagggtggcttcagtcggcaacgcaagcgcaagttgtccttccgcaggcgcacggacaaggacacggagcagccaggggaggtgtcggccttggggccgggccgggcgggggcagggccgagtagccggggccggccgggggggccgtggggggagagcccgtccagtggcccctccagccctgagagcagtgaggatgagggcccaggccgcagctccagccccctccgcctggtgcccttctccagccccaggccccccggagagccgccgggtggggagcccctgatggaggactgcgagaagagcagcgacacttgcaaccccctgtcaggcgccttctcaggagtgtccaacattttcagcttctggggggacagtcggggccgccagtaccaggagctccctcgatgccccgcccccacccccagcctcctcaacatccccctctccagcccgggtcggcggccccggggcgacgtggagagcaggctggatgccctccagcgccagctcaacaggctggagacccggctgagtgcagacatggccactgtcctgcagctgctacagaggcagatgacgctggtcccgcccgcctacagtgctgtgaccaccccggggcctggccccacttccacatccccgctgttgcccgtcagccccctccccaccctcaccttggactcgctttctcaggtttcccagttcatggcgtgtgaggagctgcccccgggggccccagagcttccccaagaaggccccacacgacgcctctccctaccgggccagctgggggccctcacctcccagcccctgcacagacacggctcggacccgggcagttagtggggctgcccagtgtggacacgtggctcacccagggatcaaggcgctgctgggccgctccccttggaggccctgctcaggaggccctgaccgtggaaggggagaggaactcgaaagcacagctcctcccccagcccttgggaccatcttctcctgcagtcccctgggccccagtgagaggggcaggggcagggccggcagtaggtggggcctgtggtccccccactgccctgagggcattagctggtctaactgcccggaggcacccggccctgggccttaggcacctcaaggacttttctgctatttactgctcttattgttaaggataataattaaggatcatatgaataattaatgaagatgctgatgactatgaataataaataattatcctgaggaga

SEQ ID NO: 273 - DNA, 3884 bp, Homo sapiens
  source 1..3884: mol_type = genomic DNA
  misc_feature 1..3884: note = cDNA of KCNH2 gene SNP c.1801G>A (p.Gly601Ser)
atgccggtgcggaggggccacgtcgcgccgcagaacaccttcctggacaccatcatccgcaagtttgagggccagagccgtaagttcatcatcgccaacgctcgggtggagaactgcgccgtcatctactgcaacgacggcttctgcgagctgtgcggctactcgcgggccgaggtgatgcagcgaccctgcacctgcgacttcctgcacgggccgcgcacgcagcgccgcgctgccgcgcagatcgcgcaggcactgctgggcgccgaggagcgcaaagtggaaatcgccttctaccggaaagatgggagctgcttcctatgtctggtggatgtggtgcccgtgaagaacgaggatggggctgtcatcatgttcatcctcaatttcgaggtggtgatggagaaggacatggtggggtccccggctcatgacaccaaccaccggggcccccccaccagctggctggccccaggccgcgccaagaccttccgcctgaagctgcccgcgctgctggcgctgacggcccgggagtcgtcggtgcggtcgggcggcgcgggcggcgcgggcgccccgggggccgtggtggtggacgtggacctgacgcccgcggcacccagcagcgagtcgctggccctggacgaagtgacagccatggacaaccacgtggcagggctcgggcccgcggaggagcggcgtgcgctggtgggtcccggctctccgccccgcagcgcgcccggccagctcccatcgccccgggcgcacagcctcaaccccgacgcctcgggctccagctgcagcctggcccggacgcgctcccgagaaagctgcgccagcgtgcgccgcgcctcgtcggccgacgacatcgaggccatgcgcgccggggtgctgcccccgccaccgcgccacgccagcaccggggccatgcacccactgcgcagcggcttgctcaactccacctcggactccgacctcgtgcgctaccgcaccattagcaagattccccaaatcaccctcaactttgtggacctcaagggcgaccccttcttggcttcgcccaccagtgaccgtgagatcatagcacctaagataaaggagcgaacccacaatgtcactgagaaggtcacccaggtcctgtccctgggcgccgacgtgctgcctgagtacaagctgcaggcaccgcgcatccaccgctggaccatcctgcattacagccccttcaaggccgtgtgggactggctcatcctgctgctggtcatctacacggctgtcttcacaccctactcggctgccttcctgctgaaggagacggaagaaggcccgcctgctaccgagtgtggctacgcctgccagccgctggctgtggtggacctcatcgtggacatcatgttcattgtggacatcctcatcaacttccgcaccacctacgtcaatgccaacgaggaggtggtcagccaccccggccgcatcgccgtccactacttcaagggctggttcctcatcgacatggtggccgccatccccttcgacctgctcatcttcggctctggctctgaggagctgatcgggctgctgaagactgcgcggctgctgcggctggtgcgcgtggcgcggaagctggatcgctactcagagtacggcgcggccgtgctgttcttgctcatgtgcacctttgcgctcatcgcgcactggctagcctgcatctggtacgccatcggcaacatggagcagccacacatggactcacgcatcggctggctgcacaacctgggcgaccagataggcaaaccctacaacagcagcagcctgggcggcccctccatcaaggacaagtatgtgacggcgctctacttcaccttcagcagcctcaccagtgtgggcttcggcaacgtctctcccaacaccaactcagagaagatcttctccatctgcgtcatgctcattggctccctcatgtatgctagcatcttcggcaacgtgtcggccatcatccagcggctgtactcgggcacagcccgctaccacacacagatgctgcgggtgcgggagttcatccgcttccaccagatccccaatcccctgcgccagcgcctcgaggagtacttccagcacgcctggtcctacaccaacggcatcgacatgaacgcggtgctgaagggcttccctgagtgcctgcaggctgacatctgcctgcacctgaaccgctcactgctgcagcactgcaaacccttccgaggggccaccaagggctgccttcgggccctggccatgaagttcaagaccacacatgcaccgccaggggacacactggtgcatgctggggacctgctcaccgccctgtacttcatctcccggggctccatcgagatcctgcggggcgacgtcgtcgtggccatcctggggaagaatgacatctttggggagcctctgaacctgtatgcaaggcctggcaagtcgaacggggatgtgcgggccctcacctactgtgacctacacaagatccatcgggacgacctgctggaggtgctggacatgtaccctgagttctccgaccacttctggtccagcctggagatcaccttcaacctgcgagataccaacatgatcccgggctcccccggcagtacggagttagagggtggcttcagtcggcaacgcaagcgcaagttgtccttccgcaggcgcacggacaaggacacggagcagccaggggaggtgtcggccttggggccgggccgggcgggggcagggccgagtagccggggccggccgggggggccgtggggggagagcccgtccagtggcccctccagccctgagagcagtgaggatgagggcccaggccgcagctccagccccctccgcctggtgcccttctccagccccaggccccccggagagccgccgggtggggagcccctgatggaggactgcgagaagagcagcgacacttgcaaccccctgtcaggcgccttctcaggagtgtccaacattttcagcttctggggggacagtcggggccgccagtaccaggagctccctcgatgccccgcccccacccccagcctcctcaacatccccctctccagcccgggtcggcggccccggggcgacgtggagagcaggctggatgccctccagcgccagctcaacaggctggagacccggctgagtgcagacatggccactgtcctgcagctgctacagaggcagatgacgctggtcccgcccgcctacagtgctgtgaccaccccggggcctggccccacttccacatccccgctgttgcccgtcagccccctccccaccctcaccttggactcgctttctcaggtttcccagttcatggcgtgtgaggagctgcccccgggggccccagagcttccccaagaaggccccacacgacgcctctccctaccgggccagctgggggccctcacctcccagcccctgcacagacacggctcggacccgggcagttagtggggctgcccagtgtggacacgtggctcacccagggatcaaggcgctgctgggccgctccccttggaggccctgctcaggaggccctgaccgtggaaggggagaggaactcgaaagcacagctcctcccccagcccttgggaccatcttctcctgcagtcccctgggccccagtgagaggggcaggggcagggccggcagtaggtggggcctgtggtccccccactgccctgagggcattagctggtctaactgcccggaggcacccggccctgggccttaggcacctcaaggacttttctgctatttactgctcttattgttaaggataataattaaggatcatatgaataattaatgaagatgctgatgactatgaataataaataattatcctgaggaga

SEQ ID NO: 274 - DNA, 3884 bp, Homo sapiens
  source 1..3884: mol_type = genomic DNA
  misc_feature 1..3884: note = cDNA of KCNH2 gene SNP c.1801G>T (p.Gly601Cys)
atgccggtgcggaggggccacgtcgcgccgcagaacaccttcctggacaccatcatccgcaagtttgagggccagagccgtaagttcatcatcgccaacgctcgggtggagaactgcgccgtcatctactgcaacgacggcttctgcgagctgtgcggctactcgcgggccgaggtgatgcagcgaccctgcacctgcgacttcctgcacgggccgcgcacgcagcgccgcgctgccgcgcagatcgcgcaggcactgctgggcgccgaggagcgcaaagtggaaatcgccttctaccggaaagatgggagctgcttcctatgtctggtggatgtggtgcccgtgaagaacgaggatggggctgtcatcatgttcatcctcaatttcgaggtggtgatggagaaggacatggtggggtccccggctcatgacaccaaccaccggggcccccccaccagctggctggccccaggccgcgccaagaccttccgcctgaagctgcccgcgctgctggcgctgacggcccgggagtcgtcggtgcggtcgggcggcgcgggcggcgcgggcgccccgggggccgtggtggtggacgtggacctgacgcccgcggcacccagcagcgagtcgctggccctggacgaagtgacagccatggacaaccacgtggcagggctcgggcccgcggaggagcggcgtgcgctggtgggtcccggctctccgccccgcagcgcgcccggccagctcccatcgccccgggcgcacagcctcaaccccgacgcctcgggctccagctgcagcctggcccggacgcgctcccgagaaagctgcgccagcgtgcgccgcgcctcgtcggccgacgacatcgaggccatgcgcgccggggtgctgcccccgccaccgcgccacgccagcaccggggccatgcacccactgcgcagcggcttgctcaactccacctcggactccgacctcgtgcgctaccgcaccattagcaagattccccaaatcaccctcaactttgtggacctcaagggcgaccccttcttggcttcgcccaccagtgaccgtgagatcatagcacctaagataaaggagcgaacccacaatgtcactgagaaggtcacccaggtcctgtccctgggcgccgacgtgctgcctgagtacaagctgcaggcaccgcgcatccaccgctggaccatcctgcattacagccccttcaaggccgtgtgggactggctcatcctgctgctggtcatctacacggctgtcttcacaccctactcggctgccttcctgctgaaggagacggaagaaggcccgcctgctaccgagtgtggctacgcctgccagccgctggctgtggtggacctcatcgtggacatcatgttcattgtggacatcctcatcaacttccgcaccacctacgtcaatgccaacgaggaggtggtcagccaccccggccgcatcgccgtccactacttcaagggctggttcctcatcgacatggtggccgccatccccttcgacctgctcatcttcggctctggctctgaggagctgatcgggctgctgaagactgcgcggctgctgcggctggtgcgcgtggcgcggaagctggatcgctactcagagtacggcgcggccgtgctgttcttgctcatgtgcacctttgcgctcatcgcgcactggctagcctgcatctggtacgccatcggcaacatggagcagccacacatggactcacgcatcggctggctgcacaacctgggcgaccagataggcaaaccctacaacagcagctgcctgggcggcccctccatcaaggacaagtatgtgacggcgctctacttcaccttcagcagcctcaccagtgtgggcttcggcaacgtctctcccaacaccaactcagagaagatcttctccatctgcgtcatgctcattggctccctcatgtatgctagcatcttcggcaacgtgtcggccatcatccagcggctgtactcgggcacagcccgctaccacacacagatgctgcgggtgcgggagttcatccgcttccaccagatccccaatcccctgcgccagcgcctcgaggagtacttccagcacgcctggtcctacaccaacggcatcgacatgaacgcggtgctgaagggcttccctgagtgcctgcaggctgacatctgcctgcacctgaaccgctcactgctgcagcactgcaaacccttccgaggggccaccaagggctgccttcgggccctggccatgaagttcaagaccacacatgcaccgccaggggacacactggtgcatgctggggacctgctcaccgccctgtacttcatctcccggggctccatcgagatcctgcggggcgacgtcgtcgtggccatcctggggaagaatgacatctttggggagcctctgaacctgtatgcaaggcctggcaagtcgaacggggatgtgcgggccctcacctactgtgacctacacaagatccatcgggacgacctgctggaggtgctggacatgtaccctgagttctccgaccacttctggtccagcctggagatcaccttcaacctgcgagataccaacatgatcccgggctcccccggcagtacggagttagagggtggcttcagtcggcaacgcaagcgcaagttgtccttccgcaggcgcacggacaaggacacggagcagccaggggaggtgtcggccttggggccgggccgggcgggggcagggccgagtagccggggccggccgggggggccgtggggggagagcccgtccagtggcccctccagccctgagagcagtgaggatgagggcccaggccgcagctccagccccctccgcctggtgcccttctccagccccaggccccccggagagccgccgggtggggagcccctgatggaggactgcgagaagagcagcgacacttgcaaccccctgtcaggcgccttctcaggagtgtccaacattttcagcttctggggggacagtcggggccgccagtaccaggagctccctcgatgccccgcccccacccccagcctcctcaacatccccctctccagcccgggtcggcggccccggggcgacgtggagagcaggctggatgccctccagcgccagctcaacaggctggagacccggctgagtgcagacatggccactgtcctgcagctgctacagaggcagatgacgctggtcccgcccgcctacagtgctgtgaccaccccggggcctggccccacttccacatccccgctgttgcccgtcagccccctccccaccctcaccttggactcgctttctcaggtttcccagttcatggcgtgtgaggagctgcccccgggggccccagagcttccccaagaaggccccacacgacgcctctccctaccgggccagctgggggccctcacctcccagcccctgcacagacacggctcggacccgggcagttagtggggctgcccagtgtggacacgtggctcacccagggatcaaggcgctgctgggccgctccccttggaggccctgctcaggaggccctgaccgtggaaggggagaggaactcgaaagcacagctcctcccccagcccttgggaccatcttctcctgcagtcccctgggccccagtgagaggggcaggggcagggccggcagtaggtggggcctgtggtccccccactgccctgagggcattagctggtctaactgcccggaggcacccggccctgggccttaggcacctcaaggacttttctgctatttactgctcttattgttaaggataataattaaggatcatatgaataattaatgaagatgctgatgactatgaataataaataattatcctgaggaga

SEQ ID NO: 275 - DNA, 3884 bp, Homo sapiens
  source 1..3884: mol_type = genomic DNA
  misc_feature 1..3884: note = cDNA of KCNH2 gene SNP c.1802G>A (p.Gly601Asp)
atgccggtgcggaggggccacgtcgcgccgcagaacaccttcctggacaccatcatccgcaagtttgagggccagagccgtaagttcatcatcgccaacgctcgggtggagaactgcgccgtcatctactgcaacgacggcttctgcgagctgtgcggctactcgcgggccgaggtgatgcagcgaccctgcacctgcgacttcctgcacgggccgcgcacgcagcgccgcgctgccgcgcagatcgcgcaggcactgctgggcgccgaggagcgcaaagtggaaatcgccttctaccggaaagatgggagctgcttcctatgtctggtggatgtggtgcccgtgaagaacgaggatggggctgtcatcatgttcatcctcaatttcgaggtggtgatggagaaggacatggtggggtccccggctcatgacaccaaccaccggggcccccccaccagctggctggccccaggccgcgccaagaccttccgcctgaagctgcccgcgctgctggcgctgacggcccgggagtcgtcggtgcggtcgggcggcgcgggcggcgcgggcgccccgggggccgtggtggtggacgtggacctgacgcccgcggcacccagcagcgagtcgctggccctggacgaagtgacagccatggacaaccacgtggcagggctcgggcccgcggaggagcggcgtgcgctggtgggtcccggctctccgccccgcagcgcgcccggccagctcccatcgccccgggcgcacagcctcaaccccgacgcctcgggctccagctgcagcctggcccggacgcgctcccgagaaagctgcgccagcgtgcgccgcgcctcgtcggccgacgacatcgaggccatgcgcgccggggtgctgcccccgccaccgcgccacgccagcaccggggccatgcacccactgcgcagcggcttgctcaactccacctcggactccgacctcgtgcgctaccgcaccattagcaagattccccaaatcaccctcaactttgtggacctcaagggcgaccccttcttggcttcgcccaccagtgaccgtgagatcatagcacctaagataaaggagcgaacccacaatgtcactgagaaggtcacccaggtcctgtccctgggcgccgacgtgctgcctgagtacaagctgcaggcaccgcgcatccaccgctggaccatcctgcattacagccccttcaaggccgtgtgggactggctcatcctgctgctggtcatctacacggctgtcttcacaccctactcggctgccttcctgctgaaggagacggaagaaggcccgcctgctaccgagtgtggctacgcctgccagccgctggctgtggtggacctcatcgtggacatcatgttcattgtggacatcctcatcaacttccgcaccacctacgtcaatgccaacgaggaggtggtcagccaccccggccgcatcgccgtccactacttcaagggctggttcctcatcgacatggtggccgccatccccttcgacctgctcatcttcggctctggctctgaggagctgatcgggctgctgaagactgcgcggctgctgcggctggtgcgcgtggcgcggaagctggatcgctactcagagtacggcgcggccgtgctgttcttgctcatgtgcacctttgcgctcatcgcgcactggctagcctgcatctggtacgccatcggcaacatggagcagccacacatggactcacgcatcggctggctgcacaacctgggcgaccagataggcaaaccctacaacagcagcgacctgggcggcccctccatcaaggacaagtatgtgacggcgctctacttcaccttcagcagcctcaccagtgtgggcttcggcaacgtctctcccaacaccaactcagagaagatcttctccatctgcgtcatgctcattggctccctcatgtatgctagcatcttcggcaacgtgtcggccatcatccagcggctgtactcgggcacagcccgctaccacacacagatgctgcgggtgcgggagttcatccgcttccaccagatccccaatcccctgcgccagcgcctcgaggagtacttccagcacgcctggtcctacaccaacggcatcgacatgaacgcggtgctgaagggcttccctgagtgcctgcaggctgacatctgcctgcacctgaaccgctcactgctgcagcactgcaaacccttccgaggggccaccaagggctgccttcgggccctggccatgaagttcaagaccacacatgcaccgccaggggacacactggtgcatgctggggacctgctcaccgccctgtacttcatctcccggggctccatcgagatcctgcggggcgacgtcgtcgtggccatcctggggaagaatgacatctttggggagcctctgaacctgtatgcaaggcctggcaagtcgaacggggatgtgcgggccctcacctactgtgacctacacaagatccatcgggacgacctgctggaggtgctggacatgtaccctgagttctccgaccacttctggtccagcctggagatcaccttcaacctgcgagataccaacatgatcccgggctcccccggcagtacggagttagagggtggcttcagtcggcaacgcaagcgcaagttgtccttccgcaggcgcacggacaaggacacggagcagccaggggaggtgtcggccttggggccgggccgggcgggggcagggccgagtagccggggccggccgggggggccgtggggggagagcccgtccagtggcccctccagccctgagagcagtgaggatgagggcccaggccgcagctccagccccctccgcctggtgcccttctccagccccaggccccccggagagccgccgggtggggagcccctgatggaggactgcgagaagagcagcgacacttgcaaccccctgtcaggcgccttctcaggagtgtccaacattttcagcttctggggggacagtcggggccgccagtaccaggagctccctcgatgccccgcccccacccccagcctcctcaacatccccctctccagcccgggtcggcggccccggggcgacgtggagagcaggctggatgccctccagcgccagctcaacaggctggagacccggctgagtgcagacatggccactgtcctgcagctgctacagaggcagatgacgctggtcccgcccgcctacagtgctgtgaccaccccggggcctggccccacttccacatccccgctgttgcccgtcagccccctccccaccctcaccttggactcgctttctcaggtttcccagttcatggcgtgtgaggagctgcccccgggggccccagagcttccccaagaaggccccacacgacgcctctccctaccgggccagctgggggccctcacctcccagcccctgcacagacacggctcggacccgggcagttagtggggctgcccagtgtggacacgtggctcacccagggatcaaggcgctgctgggccgctccccttggaggccctgctcaggaggccctgaccgtggaaggggagaggaactcgaaagcacagctcctcccccagcccttgggaccatcttctcctgcagtcccctgggccccagtgagaggggcaggggcagggccggcagtaggtggggcctgtggtccccccactgccctgagggcattagctggtctaactgcccggaggcacccggccctgggccttaggcacctcaaggacttttctgctatttactgctcttattgttaaggataataattaaggatcatatgaataattaatgaagatgctgatgactatgaataataaataattatcctgaggaga

SEQ ID NO: 276 - DNA, 3884 bp, Homo sapiens
  source 1..3884: mol_type = genomic DNA
  misc_feature 1..3884: note = cDNA of KCNH2 gene SNP c.1805T>C (p.Leu602Pro)
atgccggtgcggaggggccacgtcgcgccgcagaacaccttcctggacaccatcatccgcaagtttgagggccagagccgtaagttcatcatcgccaacgctcgggtggagaactgcgccgtcatctactgcaacgacggcttctgcgagctgtgcggctactcgcgggccgaggtgatgcagcgaccctgcacctgcgacttcctgcacgggccgcgcacgcagcgccgcgctgccgcgcagatcgcgcaggcactgctgggcgccgaggagcgcaaagtggaaatcgccttctaccggaaagatgggagctgcttcctatgtctggtggatgtggtgcccgtgaagaacgaggatggggctgtcatcatgttcatcctcaatttcgaggtggtgatggagaaggacatggtggggtccccggctcatgacaccaaccaccggggcccccccaccagctggctggccccaggccgcgccaagaccttccgcctgaagctgcccgcgctgctggcgctgacggcccgggagtcgtcggtgcggtcgggcggcgcgggcggcgcgggcgccccgggggccgtggtggtggacgtggacctgacgcccgcggcacccagcagcgagtcgctggccctggacgaagtgacagccatggacaaccacgtggcagggctcgggcccgcggaggagcggcgtgcgctggtgggtcccggctctccgccccgcagcgcgcccggccagctcccatcgccccgggcgcacagcctcaaccccgacgcctcgggctccagctgcagcctggcccggacgcgctcccgagaaagctgcgccagcgtgcgccgcgcctcgtcggccgacgacatcgaggccatgcgcgccggggtgctgcccccgccaccgcgccacgccagcaccggggccatgcacccactgcgcagcggcttgctcaactccacctcggactccgacctcgtgcgctaccgcaccattagcaagattccccaaatcaccctcaactttgtggacctcaagggcgaccccttcttggcttcgcccaccagtgaccgtgagatcatagcacctaagataaaggagcgaacccacaatgtcactgagaaggtcacccaggtcctgtccctgggcgccgacgtgctgcctgagtacaagctgcaggcaccgcgcatccaccgctggaccatcctgcattacagccccttcaaggccgtgtgggactggctcatcctgctgctggtcatctacacggctgtcttcacaccctactcggctgccttcctgctgaaggagacggaagaaggcccgcctgctaccgagtgtggctacgcctgccagccgctggctgtggtggacctcatcgtggacatcatgttcattgtggacatcctcatcaacttccgcaccacctacgtcaatgccaacgaggaggtggtcagccaccccggccgcatcgccgtccactacttcaagggctggttcctcatcgacatggtggccgccatccccttcgacctgctcatcttcggctctggctctgaggagctgatcgggctgctgaagactgcgcggctgctgcggctggtgcgcgtggcgcggaagctggatcgctactcagagtacggcgcggccgtgctgttcttgctcatgtgcacctttgcgctcatcgcgcactggctagcctgcatctggtacgccatcggcaacatggagcagccacacatggactcacgcatcggctggctgcacaacctgggcgaccagataggcaaaccctacaacagcagcggcccgggcggcccctccatcaaggacaagtatgtgacggcgctctacttcaccttcagcagcctcaccagtgtgggcttcggcaacgtctctcccaacaccaactcagagaagatcttctccatctgcgtcatgctcattggctccctcatgtatgctagcatcttcggcaacgtgtcggccatcatccagcggctgtactcgggcacagcccgctaccacacacagatgctgcgggtgcgggagttcatccgcttccaccagatccccaatcccctgcgccagcgcctcgaggagtacttccagcacgcctggtcctacaccaacggcatcgacatgaacgcggtgctgaagggcttccctgagtgcctgcaggctgacatctgcctgcacctgaaccgctcactgctgcagcactgcaaacccttccgaggggccaccaagggctgccttcgggccctggccatgaagttcaagaccacacatgcaccgccaggggacacactggtgcatgctggggacctgctcaccgccctgtacttcatctcccggggctccatcgagatcctgcggggcgacgtcgtcgtggccatcctggggaagaatgacatctttggggagcctctgaacctgtatgcaaggcctggcaagtcgaacggggatgtgcgggccctcacctactgtgacctacacaagatccatcgggacgacctgctggaggtgctggacatgtaccctgagttctccgaccacttctggtccagcctggagatcaccttcaacctgcgagataccaacatgatcccgggctcccccggcagtacggagttagagggtggcttcagtcggcaacgcaagcgcaagttgtccttccgcaggcgcacggacaaggacacggagcagccaggggaggtgtcggccttggggccgggccgggcgggggcagggccgagtagccggggccggccgggggggccgtggggggagagcccgtccagtggcccctccagccctgagagcagtgaggatgagggcccaggccgcagctccagccccctccgcctggtgcccttctccagccccaggccccccggagagccgccgggtggggagcccctgatggaggactgcgagaagagcagcgacacttgcaaccccctgtcaggcgccttctcaggagtgtccaacattttcagcttctggggggacagtcggggccgccagtaccaggagctccctcgatgccccgcccccacccccagcctcctcaacatccccctctccagcccgggtcggcggccccggggcgacgtggagagcaggctggatgccctccagcgccagctcaacaggctggagacccggctgagtgcagacatggccactgtcctgcagctgctacagaggcagatgacgctggtcccgcccgcctacagtgctgtgaccaccccggggcctggccccacttccacatccccgctgttgcccgtcagccccctccccaccctcaccttggactcgctttctcaggtttcccagttcatggcgtgtgaggagctgcccccgggggccccagagcttccccaagaaggccccacacgacgcctctccctaccgggccagctgggggccctcacctcccagcccctgcacagacacggctcggacccgggcagttagtggggctgcccagtgtggacacgtggctcacccagggatcaaggcgctgctgggccgctccccttggaggccctgctcaggaggccctgaccgtggaaggggagaggaactcgaaagcacagctcctcccccagcccttgggaccatcttctcctgcagtcccctgggccccagtgagaggggcaggggcagggccggcagtaggtggggcctgtggtccccccactgccctgagggcattagctggtctaactgcccggaggcacccggccctgggccttaggcacctcaaggacttttctgctatttactgctcttattgttaaggataataattaaggatcatatgaataattaatgaagatgctgatgactatgaataataaataattatcctgaggaga

SEQ ID NO: 277 - DNA, 3884 bp, Homo sapiens
  source 1..3884: mol_type = genomic DNA
  misc_feature 1..3884: note = cDNA of KCNH2 gene SNP c.1808G>A (p.Gly603Asp)
atgccggtgcggaggggccacgtcgcgccgcagaacaccttcctggacaccatcatccgcaagtttgagggccagagccgtaagttcatcatcgccaacgctcgggtggagaactgcgccgtcatctactgcaacgacggcttctgcgagctgtgcggctactcgcgggccgaggtgatgcagcgaccctgcacctgcgacttcctgcacgggccgcgcacgcagcgccgcgctgccgcgcagatcgcgcaggcactgctgggcgccgaggagcgcaaagtggaaatcgccttctaccggaaagatgggagctgcttcctatgtctggtggatgtggtgcccgtgaagaacgaggatggggctgtcatcatgttcatcctcaatttcgaggtggtgatggagaaggacatggtggggtccccggctcatgacaccaaccaccggggcccccccaccagctggctggccccaggccgcgccaagaccttccgcctgaagctgcccgcgctgctggcgctgacggcccgggagtcgtcggtgcggtcgggcggcgcgggcggcgcgggcgccccgggggccgtggtggtggacgtggacctgacgcccgcggcacccagcagcgagtcgctggccctggacgaagtgacagccatggacaaccacgtggcagggctcgggcccgcggaggagcggcgtgcgctggtgggtcccggctctccgccccgcagcgcgcccggccagctcccatcgccccgggcgcacagcctcaaccccgacgcctcgggctccagctgcagcctggcccggacgcgctcccgagaaagctgcgccagcgtgcgccgcgcctcgtcggccgacgacatcgaggccatgcgcgccggggtgctgcccccgccaccgcgccacgccagcaccggggccatgcacccactgcgcagcggcttgctcaactccacctcggactccgacctcgtgcgctaccgcaccattagcaagattccccaaatcaccctcaactttgtggacctcaagggcgaccccttcttggcttcgcccaccagtgaccgtgagatcatagcacctaagataaaggagcgaacccacaatgtcactgagaaggtcacccaggtcctgtccctgggcgccgacgtgctgcctgagtacaagctgcaggcaccgcgcatccaccgctggaccatcctgcattacagccccttcaaggccgtgtgggactggctcatcctgctgctggtcatctacacggctgtcttcacaccctactcggctgccttcctgctgaaggagacggaagaaggcccgcctgctaccgagtgtggctacgcctgccagccgctggctgtggtggacctcatcgtggacatcatgttcattgtggacatcctcatcaacttccgcaccacctacgtcaatgccaacgaggaggtggtcagccaccccggccgcatcgccgtccactacttcaagggctggttcctcatcgacatggtggccgccatccccttcgacctgctcatcttcggctctggctctgaggagctgatcgggctgctgaagactgcgcggctgctgcggctggtgcgcgtggcgcggaagctggatcgctactcagagtacggcgcggccgtgctgttcttgctcatgtgcacctttgcgctcatcgcgcactggctagcctgcatctggtacgccatcggcaacatggagcagccacacatggactcacgcatcggctggctgcacaacctgggcgaccagataggcaaaccctacaacagcagcggcctggacggcccctccatcaaggacaagtatgtgacggcgctctacttcaccttcagcagcctcaccagtgtgggcttcggcaacgtctctcccaacaccaactcagagaagatcttctccatctgcgtcatgctcattggctccctcatgtatgctagcatcttcggcaacgtgtcggccatcatccagcggctgtactcgggcacagcccgctaccacacacagatgctgcgggtgcgggagttcatccgcttccaccagatccccaatcccctgcgccagcgcctcgaggagtacttccagcacgcctggtcctacaccaacggcatcgacatgaacgcggtgctgaagggcttccctgagtgcctgcaggctgacatctgcctgcacctgaaccgctcactgctgcagcactgcaaacccttccgaggggccaccaagggctgccttcgggccctggccatgaagttcaagaccacacatgcaccgccaggggacacactggtgcatgctggggacctgctcaccgccctgtacttcatctcccggggctccatcgagatcctgcggggcgacgtcgtcgtggccatcctggggaagaatgacatctttggggagcctctgaacctgtatgcaaggcctggcaagtcgaacggggatgtgcgggccctcacctactgtgacctacacaagatccatcgggacgacctgctggaggtgctggacatgtaccctgagttctccgaccacttctggtccagcctggagatcaccttcaacctgcgagataccaacatgatcccgggctcccccggcagtacggagttagagggtggcttcagtcggcaacgcaagcgcaagttgtccttccgcaggcgcacggacaaggacacggagcagccaggggaggtgtcggccttggggccgggccgggcgggggcagggccgagtagccggggccggccgggggggccgtggggggagagcccgtccagtggcccctccagccctgagagcagtgaggatgagggcccaggccgcagctccagccccctccgcctggtgcccttctccagccccaggccccccggagagccgccgggtggggagcccctgatggaggactgcgagaagagcagcgacacttgcaaccccctgtcaggcgccttctcaggagtgtccaacattttcagcttctggggggacagtcggggccgccagtaccaggagctccctcgatgccccgcccccacccccagcctcctcaacatccccctctccagcccgggtcggcggccccggggcgacgtggagagcaggctggatgccctccagcgccagctcaacaggctggagacccggctgagtgcagacatggccactgtcctgcagctgctacagaggcagatgacgctggtcccgcccgcctacagtgctgtgaccaccccggggcctggccccacttccacatccccgctgttgcccgtcagccccctccccaccctcaccttggactcgctttctcaggtttcccagttcatggcgtgtgaggagctgcccccgggggccccagagcttccccaagaaggccccacacgacgcctctccctaccgggccagctgggggccctcacctcccagcccctgcacagacacggctcggacccgggcagttagtggggctgcccagtgtggacacgtggctcacccagggatcaaggcgctgctgggccgctccccttggaggccctgctcaggaggccctgaccgtggaaggggagaggaactcgaaagcacagctcctcccccagcccttgggaccatcttctcctgcagtcccctgggccccagtgagaggggcaggggcagggccggcagtaggtggggcctgtggtccccccactgccctgagggcattagctggtctaactgcccggaggcacccggccctgggccttaggcacctcaaggacttttctgctatttactgctcttattgttaaggataataattaaggatcatatgaataattaatgaagatgctgatgactatgaataataaataattatcctgaggaga

SEQ ID NO: 278 - DNA, 3884 bp, Homo sapiens
  source 1..3884: mol_type = genomic DNA
  misc_feature 1..3884: note = cDNA of KCNH2 gene SNP c.1810G>A (p.Gly604Ser)
atgccggtgcggaggggccacgtcgcgccgcagaacaccttcctggacaccatcatccgcaagtttgagggccagagccgtaagttcatcatcgccaacgctcgggtggagaactgcgccgtcatctactgcaacgacggcttctgcgagctgtgcggctactcgcgggccgaggtgatgcagcgaccctgcacctgcgacttcctgcacgggccgcgcacgcagcgccgcgctgccgcgcagatcgcgcaggcactgctgggcgccgaggagcgcaaagtggaaatcgccttctaccggaaagatgggagctgcttcctatgtctggtggatgtggtgcccgtgaagaacgaggatggggctgtcatcatgttcatcctcaatttcgaggtggtgatggagaaggacatggtggggtccccggctcatgacaccaaccaccggggcccccccaccagctggctggccccaggccgcgccaagaccttccgcctgaagctgcccgcgctgctggcgctgacggcccgggagtcgtcggtgcggtcgggcggcgcgggcggcgcgggcgccccgggggccgtggtggtggacgtggacctgacgcccgcggcacccagcagcgagtcgctggccctggacgaagtgacagccatggacaaccacgtggcagggctcgggcccgcggaggagcggcgtgcgctggtgggtcccggctctccgccccgcagcgcgcccggccagctcccatcgccccgggcgcacagcctcaaccccgacgcctcgggctccagctgcagcctggcccggacgcgctcccgagaaagctgcgccagcgtgcgccgcgcctcgtcggccgacgacatcgaggccatgcgcgccggggtgctgcccccgccaccgcgccacgccagcaccggggccatgcacccactgcgcagcggcttgctcaactccacctcggactccgacctcgtgcgctaccgcaccattagcaagattccccaaatcaccctcaactttgtggacctcaagggcgaccccttcttggcttcgcccaccagtgaccgtgagatcatagcacctaagataaaggagcgaacccacaatgtcactgagaaggtcacccaggtcctgtccctgggcgccgacgtgctgcctgagtacaagctgcaggcaccgcgcatccaccgctggaccatcctgcattacagccccttcaaggccgtgtgggactggctcatcctgctgctggtcatctacacggctgtcttcacaccctactcggctgccttcctgctgaaggagacggaagaaggcccgcctgctaccgagtgtggctacgcctgccagccgctggctgtggtggacctcatcgtggacatcatgttcattgtggacatcctcatcaacttccgcaccacctacgtcaatgccaacgaggaggtggtcagccaccccggccgcatcgccgtccactacttcaagggctggttcctcatcgacatggtggccgccatccccttcgacctgctcatcttcggctctggctctgaggagctgatcgggctgctgaagactgcgcggctgctgcggctggtgcgcgtggcgcggaagctggatcgctactcagagtacggcgcggccgtgctgttcttgctcatgtgcacctttgcgctcatcgcgcactggctagcctgcatctggtacgccatcggcaacatggagcagccacacatggactcacgcatcggctggctgcacaacctgggcgaccagataggcaaaccctacaacagcagcggcctgggcagcccctccatcaaggacaagtatgtgacggcgctctacttcaccttcagcagcctcaccagtgtgggcttcggcaacgtctctcccaacaccaactcagagaagatcttctccatctgcgtcatgctcattggctccctcatgtatgctagcatcttcggcaacgtgtcggccatcatccagcggctgtactcgggcacagcccgctaccacacacagatgctgcgggtgcgggagttcatccgcttccaccagatccccaatcccctgcgccagcgcctcgaggagtacttccagcacgcctggtcctacaccaacggcatcgacatgaacgcggtgctgaagggcttccctgagtgcctgcaggctgacatctgcctgcacctgaaccgctcactgctgcagcactgcaaacccttccgaggggccaccaagggctgccttcgggccctggccatgaagttcaagaccacacatgcaccgccaggggacacactggtgcatgctggggacctgctcaccgccctgtacttcatctcccggggctccatcgagatcctgcggggcgacgtcgtcgtggccatcctggggaagaatgacatctttggggagcctctgaacctgtatgcaaggcctggcaagtcgaacggggatgtgcgggccctcacctactgtgacctacacaagatccatcgggacgacctgctggaggtgctggacatgtaccctgagttctccgaccacttctggtccagcctggagatcaccttcaacctgcgagataccaacatgatcccgggctcccccggcagtacggagttagagggtggcttcagtcggcaacgcaagcgcaagttgtccttccgcaggcgcacggacaaggacacggagcagccaggggaggtgtcggccttggggccgggccgggcgggggcagggccgagtagccggggccggccgggggggccgtggggggagagcccgtccagtggcccctccagccctgagagcagtgaggatgagggcccaggccgcagctccagccccctccgcctggtgcccttctccagccccaggccccccggagagccgccgggtggggagcccctgatggaggactgcgagaagagcagcgacacttgcaaccccctgtcaggcgccttctcaggagtgtccaacattttcagcttctggggggacagtcggggccgccagtaccaggagctccctcgatgccccgcccccacccccagcctcctcaacatccccctctccagcccgggtcggcggccccggggcgacgtggagagcaggctggatgccctccagcgccagctcaacaggctggagacccggctgagtgcagacatggccactgtcctgcagctgctacagaggcagatgacgctggtcccgcccgcctacagtgctgtgaccaccccggggcctggccccacttccacatccccgctgttgcccgtcagccccctccccaccctcaccttggactcgctttctcaggtttcccagttcatggcgtgtgaggagctgcccccgggggccccagagcttccccaagaaggccccacacgacgcctctccctaccgggccagctgggggccctcacctcccagcccctgcacagacacggctcggacccgggcagttagtggggctgcccagtgtggacacgtggctcacccagggatcaaggcgctgctgggccgctccccttggaggccctgctcaggaggccctgaccgtggaaggggagaggaactcgaaagcacagctcctcccccagcccttgggaccatcttctcctgcagtcccctgggccccagtgagaggggcaggggcagggccggcagtaggtggggcctgtggtccccccactgccctgagggcattagctggtctaactgcccggaggcacccggccctgggccttaggcacctcaaggacttttctgctatttactgctcttattgttaaggataataattaaggatcatatgaataattaatgaagatgctgatgactatgaataataaataattatcctgaggaga

SEQ ID NO: 279 - DNA, 3884 bp, Homo sapiens
  source 1..3884: mol_type = genomic DNA
  misc_feature 1..3884: note = cDNA of KCNH2 gene SNP c.1811G>A (p.Gly604Asp)
atgccggtgcggaggggccacgtcgcgccgcagaacaccttcctggacaccatcatccgcaagtttgagggccagagccgtaagttcatcatcgccaacgctcgggtggagaactgcgccgtcatctactgcaacgacggcttctgcgagctgtgcggctactcgcgggccgaggtgatgcagcgaccctgcacctgcgacttcctgcacgggccgcgcacgcagcgccgcgctgccgcgcagatcgcgcaggcactgctgggcgccgaggagcgcaaagtggaaatcgccttctaccggaaagatgggagctgcttcctatgtctggtggatgtggtgcccgtgaagaacgaggatggggctgtcatcatgttcatcctcaatttcgaggtggtgatggagaaggacatggtggggtccccggctcatgacaccaaccaccggggcccccccaccagctggctggccccaggccgcgccaagaccttccgcctgaagctgcccgcgctgctggcgctgacggcccgggagtcgtcggtgcggtcgggcggcgcgggcggcgcgggcgccccgggggccgtggtggtggacgtggacctgacgcccgcggcacccagcagcgagtcgctggccctggacgaagtgacagccatggacaaccacgtggcagggctcgggcccgcggaggagcggcgtgcgctggtgggtcccggctctccgccccgcagcgcgcccggccagctcccatcgccccgggcgcacagcctcaaccccgacgcctcgggctccagctgcagcctggcccggacgcgctcccgagaaagctgcgccagcgtgcgccgcgcctcgtcggccgacgacatcgaggccatgcgcgccggggtgctgcccccgccaccgcgccacgccagcaccggggccatgcacccactgcgcagcggcttgctcaactccacctcggactccgacctcgtgcgctaccgcaccattagcaagattccccaaatcaccctcaactttgtggacctcaagggcgaccccttcttggcttcgcccaccagtgaccgtgagatcatagcacctaagataaaggagcgaacccacaatgtcactgagaaggtcacccaggtcctgtccctgggcgccgacgtgctgcctgagtacaagctgcaggcaccgcgcatccaccgctggaccatcctgcattacagccccttcaaggccgtgtgggactggctcatcctgctgctggtcatctacacggctgtcttcacaccctactcggctgccttcctgctgaaggagacggaagaaggcccgcctgctaccgagtgtggctacgcctgccagccgctggctgtggtggacctcatcgtggacatcatgttcattgtggacatcctcatcaacttccgcaccacctacgtcaatgccaacgaggaggtggtcagccaccccggccgcatcgccgtccactacttcaagggctggttcctcatcgacatggtggccgccatccccttcgacctgctcatcttcggctctggctctgaggagctgatcgggctgctgaagactgcgcggctgctgcggctggtgcgcgtggcgcggaagctggatcgctactcagagtacggcgcggccgtgctgttcttgctcatgtgcacctttgcgctcatcgcgcactggctagcctgcatctggtacgccatcggcaacatggagcagccacacatggactcacgcatcggctggctgcacaacctgggcgaccagataggcaaaccctacaacagcagcggcctgggcgacccctccatcaaggacaagtatgtgacggcgctctacttcaccttcagcagcctcaccagtgtgggcttcggcaacgtctctcccaacaccaactcagagaagatcttctccatctgcgtcatgctcattggctccctcatgtatgctagcatcttcggcaacgtgtcggccatcatccagcggctgtactcgggcacagcccgctaccacacacagatgctgcgggtgcgggagttcatccgcttccaccagatccccaatcccctgcgccagcgcctcgaggagtacttccagcacgcctggtcctacaccaacggcatcgacatgaacgcggtgctgaagggcttccctgagtgcctgcaggctgacatctgcctgcacctgaaccgctcactgctgcagcactgcaaacccttccgaggggccaccaagggctgccttcgggccctggccatgaagttcaagaccacacatgcaccgccaggggacacactggtgcatgctggggacctgctcaccgccctgtacttcatctcccggggctccatcgagatcctgcggggcgacgtcgtcgtggccatcctggggaagaatgacatctttggggagcctctgaacctgtatgcaaggcctggcaagtcgaacggggatgtgcgggccctcacctactgtgacctacacaagatccatcgggacgacctgctggaggtgctggacatgtaccctgagttctccgaccacttctggtccagcctggagatcaccttcaacctgcgagataccaacatgatcccgggctcccccggcagtacggagttagagggtggcttcagtcggcaacgcaagcgcaagttgtccttccgcaggcgcacggacaaggacacggagcagccaggggaggtgtcggccttggggccgggccgggcgggggcagggccgagtagccggggccggccgggggggccgtggggggagagcccgtccagtggcccctccagccctgagagcagtgaggatgagggcccaggccgcagctccagccccctccgcctggtgcccttctccagccccaggccccccggagagccgccgggtggggagcccctgatggaggactgcgagaagagcagcgacacttgcaaccccctgtcaggcgccttctcaggagtgtccaacattttcagcttctggggggacagtcggggccgccagtaccaggagctccctcgatgccccgcccccacccccagcctcctcaacatccccctctccagcccgggtcggcggccccggggcgacgtggagagcaggctggatgccctccagcgccagctcaacaggctggagacccggctgagtgcagacatggccactgtcctgcagctgctacagaggcagatgacgctggtcccgcccgcctacagtgctgtgaccaccccggggcctggccccacttccacatccccgctgttgcccgtcagccccctccccaccctcaccttggactcgctttctcaggtttcccagttcatggcgtgtgaggagctgcccccgggggccccagagcttccccaagaaggccccacacgacgcctctccctaccgggccagctgggggccctcacctcccagcccctgcacagacacggctcggacccgggcagttagtggggctgcccagtgtggacacgtggctcacccagggatcaaggcgctgctgggccgctccccttggaggccctgctcaggaggccctgaccgtggaaggggagaggaactcgaaagcacagctcctcccccagcccttgggaccatcttctcctgcagtcccctgggccccagtgagaggggcaggggcagggccggcagtaggtggggcctgtggtccccccactgccctgagggcattagctggtctaactgcccggaggcacccggccctgggccttaggcacctcaaggacttttctgctatttactgctcttattgttaaggataataattaaggatcatatgaataattaatgaagatgctgatgactatgaataataaataattatcctgaggaga

SEQ ID NO: 280 - DNA, 3884 bp, Homo sapiens
  source 1..3884: mol_type = genomic DNA
  misc_feature 1..3884: note = cDNA of KCNH2 gene SNP c.1811G>T (p.Gly604Val)
atgccggtgcggaggggccacgtcgcgccgcagaacaccttcctggacaccatcatccgcaagtttgagggccagagccgtaagttcatcatcgccaacgctcgggtggagaactgcgccgtcatctactgcaacgacggcttctgcgagctgtgcggctactcgcgggccgaggtgatgcagcgaccctgcacctgcgacttcctgcacgggccgcgcacgcagcgccgcgctgccgcgcagatcgcgcaggcactgctgggcgccgaggagcgcaaagtggaaatcgccttctaccggaaagatgggagctgcttcctatgtctggtggatgtggtgcccgtgaagaacgaggatggggctgtcatcatgttcatcctcaatttcgaggtggtgatggagaaggacatggtggggtccccggctcatgacaccaaccaccggggcccccccaccagctggctggccccaggccgcgccaagaccttccgcctgaagctgcccgcgctgctggcgctgacggcccgggagtcgtcggtgcggtcgggcggcgcgggcggcgcgggcgccccgggggccgtggtggtggacgtggacctgacgcccgcggcacccagcagcgagtcgctggccctggacgaagtgacagccatggacaaccacgtggcagggctcgggcccgcggaggagcggcgtgcgctggtgggtcccggctctccgccccgcagcgcgcccggccagctcccatcgccccgggcgcacagcctcaaccccgacgcctcgggctccagctgcagcctggcccggacgcgctcccgagaaagctgcgccagcgtgcgccgcgcctcgtcggccgacgacatcgaggccatgcgcgccggggtgctgcccccgccaccgcgccacgccagcaccggggccatgcacccactgcgcagcggcttgctcaactccacctcggactccgacctcgtgcgctaccgcaccattagcaagattccccaaatcaccctcaactttgtggacctcaagggcgaccccttcttggcttcgcccaccagtgaccgtgagatcatagcacctaagataaaggagcgaacccacaatgtcactgagaaggtcacccaggtcctgtccctgggcgccgacgtgctgcctgagtacaagctgcaggcaccgcgcatccaccgctggaccatcctgcattacagccccttcaaggccgtgtgggactggctcatcctgctgctggtcatctacacggctgtcttcacaccctactcggctgccttcctgctgaaggagacggaagaaggcccgcctgctaccgagtgtggctacgcctgccagccgctggctgtggtggacctcatcgtggacatcatgttcattgtggacatcctcatcaacttccgcaccacctacgtcaatgccaacgaggaggtggtcagccaccccggccgcatcgccgtccactacttcaagggctggttcctcatcgacatggtggccgccatccccttcgacctgctcatcttcggctctggctctgaggagctgatcgggctgctgaagactgcgcggctgctgcggctggtgcgcgtggcgcggaagctggatcgctactcagagtacggcgcggccgtgctgttcttgctcatgtgcacctttgcgctcatcgcgcactggctagcctgcatctggtacgccatcggcaacatggagcagccacacatggactcacgcatcggctggctgcacaacctgggcgaccagataggcaaaccctacaacagcagcggcctgggcgtcccctccatcaaggacaagtatgtgacggcgctctacttcaccttcagcagcctcaccagtgtgggcttcggcaacgtctctcccaacaccaactcagagaagatcttctccatctgcgtcatgctcattggctccctcatgtatgctagcatcttcggcaacgtgtcggccatcatccagcggctgtactcgggcacagcccgctaccacacacagatgctgcgggtgcgggagttcatccgcttccaccagatccccaatcccctgcgccagcgcctcgaggagtacttccagcacgcctggtcctacaccaacggcatcgacatgaacgcggtgctgaagggcttccctgagtgcctgcaggctgacatctgcctgcacctgaaccgctcactgctgcagcactgcaaacccttccgaggggccaccaagggctgccttcgggccctggccatgaagttcaagaccacacatgcaccgccaggggacacactggtgcatgctggggacctgctcaccgccctgtacttcatctcccggggctccatcgagatcctgcggggcgacgtcgtcgtggccatcctggggaagaatgacatctttggggagcctctgaacctgtatgcaaggcctggcaagtcgaacggggatgtgcgggccctcacctactgtgacctacacaagatccatcgggacgacctgctggaggtgctggacatgtaccctgagttctccgaccacttctggtccagcctggagatcaccttcaacctgcgagataccaacatgatcccgggctcccccggcagtacggagttagagggtggcttcagtcggcaacgcaagcgcaagttgtccttccgcaggcgcacggacaaggacacggagcagccaggggaggtgtcggccttggggccgggccgggcgggggcagggccgagtagccggggccggccgggggggccgtggggggagagcccgtccagtggcccctccagccctgagagcagtgaggatgagggcccaggccgcagctccagccccctccgcctggtgcccttctccagccccaggccccccggagagccgccgggtggggagcccctgatggaggactgcgagaagagcagcgacacttgcaaccccctgtcaggcgccttctcaggagtgtccaacattttcagcttctggggggacagtcggggccgccagtaccaggagctccctcgatgccccgcccccacccccagcctcctcaacatccccctctccagcccgggtcggcggccccggggcgacgtggagagcaggctggatgccctccagcgccagctcaacaggctggagacccggctgagtgcagacatggccactgtcctgcagctgctacagaggcagatgacgctggtcccgcccgcctacagtgctgtgaccaccccggggcctggccccacttccacatccccgctgttgcccgtcagccccctccccaccctcaccttggactcgctttctcaggtttcccagttcatggcgtgtgaggagctgcccccgggggccccagagcttccccaagaaggccccacacgacgcctctccctaccgggccagctgggggccctcacctcccagcccctgcacagacacggctcggacccgggcagttagtggggctgcccagtgtggacacgtggctcacccagggatcaaggcgctgctgggccgctccccttggaggccctgctcaggaggccctgaccgtggaaggggagaggaactcgaaagcacagctcctcccccagcccttgggaccatcttctcctgcagtcccctgggccccagtgagaggggcaggggcagggccggcagtaggtggggcctgtggtccccccactgccctgagggcattagctggtctaactgcccggaggcacccggccctgggccttaggcacctcaaggacttttctgctatttactgctcttattgttaaggataataattaaggatcatatgaataattaatgaagatgctgatgactatgaataataaataattatcctgaggaga

SEQ ID NO: 281 - DNA, 3884 bp, Homo sapiens
  source 1..3884: mol_type = genomic DNA
  misc_feature 1..3884: note = cDNA of KCNH2 gene SNP c.1813C>T (p.Pro605Ser)
atgccggtgcggaggggccacgtcgcgccgcagaacaccttcctggacaccatcatccgcaagtttgagggccagagccgtaagttcatcatcgccaacgctcgggtggagaactgcgccgtcatctactgcaacgacggcttctgcgagctgtgcggctactcgcgggccgaggtgatgcagcgaccctgcacctgcgacttcctgcacgggccgcgcacgcagcgccgcgctgccgcgcagatcgcgcaggcactgctgggcgccgaggagcgcaaagtggaaatcgccttctaccggaaagatgggagctgcttcctatgtctggtggatgtggtgcccgtgaagaacgaggatggggctgtcatcatgttcatcctcaatttcgaggtggtgatggagaaggacatggtggggtccccggctcatgacaccaaccaccggggcccccccaccagctggctggccccaggccgcgccaagaccttccgcctgaagctgcccgcgctgctggcgctgacggcccgggagtcgtcggtgcggtcgggcggcgcgggcggcgcgggcgccccgggggccgtggtggtggacgtggacctgacgcccgcggcacccagcagcgagtcgctggccctggacgaagtgacagccatggacaaccacgtggcagggctcgggcccgcggaggagcggcgtgcgctggtgggtcccggctctccgccccgcagcgcgcccggccagctcccatcgccccgggcgcacagcctcaaccccgacgcctcgggctccagctgcagcctggcccggacgcgctcccgagaaagctgcgccagcgtgcgccgcgcctcgtcggccgacgacatcgaggccatgcgcgccggggtgctgcccccgccaccgcgccacgccagcaccggggccatgcacccactgcgcagcggcttgctcaactccacctcggactccgacctcgtgcgctaccgcaccattagcaagattccccaaatcaccctcaactttgtggacctcaagggcgaccccttcttggcttcgcccaccagtgaccgtgagatcatagcacctaagataaaggagcgaacccacaatgtcactgagaaggtcacccaggtcctgtccctgggcgccgacgtgctgcctgagtacaagctgcaggcaccgcgcatccaccgctggaccatcctgcattacagccccttcaaggccgtgtgggactggctcatcctgctgctggtcatctacacggctgtcttcacaccctactcggctgccttcctgctgaaggagacggaagaaggcccgcctgctaccgagtgtggctacgcctgccagccgctggctgtggtggacctcatcgtggacatcatgttcattgtggacatcctcatcaacttccgcaccacctacgtcaatgccaacgaggaggtggtcagccaccccggccgcatcgccgtccactacttcaagggctggttcctcatcgacatggtggccgccatccccttcgacctgctcatcttcggctctggctctgaggagctgatcgggctgctgaagactgcgcggctgctgcggctggtgcgcgtggcgcggaagctggatcgctactcagagtacggcgcggccgtgctgttcttgctcatgtgcacctttgcgctcatcgcgcactggctagcctgcatctggtacgccatcggcaacatggagcagccacacatggactcacgcatcggctggctgcacaacctgggcgaccagataggcaaaccctacaacagcagcggcctgggcggctcctccatcaaggacaagtatgtgacggcgctctacttcaccttcagcagcctcaccagtgtgggcttcggcaacgtctctcccaacaccaactcagagaagatcttctccatctgcgtcatgctcattggctccctcatgtatgctagcatcttcggcaacgtgtcggccatcatccagcggctgtactcgggcacagcccgctaccacacacagatgctgcgggtgcgggagttcatccgcttccaccagatccccaatcccctgcgccagcgcctcgaggagtacttccagcacgcctggtcctacaccaacggcatcgacatgaacgcggtgctgaagggcttccctgagtgcctgcaggctgacatctgcctgcacctgaaccgctcactgctgcagcactgcaaacccttccgaggggccaccaagggctgccttcgggccctggccatgaagttcaagaccacacatgcaccgccaggggacacactggtgcatgctggggacctgctcaccgccctgtacttcatctcccggggctccatcgagatcctgcggggcgacgtcgtcgtggccatcctggggaagaatgacatctttggggagcctctgaacctgtatgcaaggcctggcaagtcgaacggggatgtgcgggccctcacctactgtgacctacacaagatccatcgggacgacctgctggaggtgctggacatgtaccctgagttctccgaccacttctggtccagcctggagatcaccttcaacctgcgagataccaacatgatcccgggctcccccggcagtacggagttagagggtggcttcagtcggcaacgcaagcgcaagttgtccttccgcaggcgcacggacaaggacacggagcagccaggggaggtgtcggccttggggccgggccgggcgggggcagggccgagtagccggggccggccgggggggccgtggggggagagcccgtccagtggcccctccagccctgagagcagtgaggatgagggcccaggccgcagctccagccccctccgcctggtgcccttctccagccccaggccccccggagagccgccgggtggggagcccctgatggaggactgcgagaagagcagcgacacttgcaaccccctgtcaggcgccttctcaggagtgtccaacattttcagcttctggggggacagtcggggccgccagtaccaggagctccctcgatgccccgcccccacccccagcctcctcaacatccccctctccagcccgggtcggcggccccggggcgacgtggagagcaggctggatgccctccagcgccagctcaacaggctggagacccggctgagtgcagacatggccactgtcctgcagctgctacagaggcagatgacgctggtcccgcccgcctacagtgctgtgaccaccccggggcctggccccacttccacatccccgctgttgcccgtcagccccctccccaccctcaccttggactcgctttctcaggtttcccagttcatggcgtgtgaggagctgcccccgggggccccagagcttccccaagaaggccccacacgacgcctctccctaccgggccagctgggggccctcacctcccagcccctgcacagacacggctcggacccgggcagttagtggggctgcccagtgtggacacgtggctcacccagggatcaaggcgctgctgggccgctccccttggaggccctgctcaggaggccctgaccgtggaaggggagaggaactcgaaagcacagctcctcccccagcccttgggaccatcttctcctgcagtcccctgggccccagtgagaggggcaggggcagggccggcagtaggtggggcctgtggtccccccactgccctgagggcattagctggtctaactgcccggaggcacccggccctgggccttaggcacctcaaggacttttctgctatttactgctcttattgttaaggataataattaaggatcatatgaataattaatgaagatgctgatgactatgaataataaataattatcctgaggaga

SEQ ID NO: 282 - DNA, 3884 bp, Homo sapiens
  source 1..3884: mol_type = genomic DNA
  misc_feature 1..3884: note = cDNA of KCNH2 gene SNP c.1814C>A (p.Pro605His)
atgccggtgcggaggggccacgtcgcgccgcagaacaccttcctggacaccatcatccgcaagtttgagggccagagccgtaagttcatcatcgccaacgctcgggtggagaactgcgccgtcatctactgcaacgacggcttctgcgagctgtgcggctactcgcgggccgaggtgatgcagcgaccctgcacctgcgacttcctgcacgggccgcgcacgcagcgccgcgctgccgcgcagatcgcgcaggcactgctgggcgccgaggagcgcaaagtggaaatcgccttctaccggaaagatgggagctgcttcctatgtctggtggatgtggtgcccgtgaagaacgaggatggggctgtcatcatgttcatcctcaatttcgaggtggtgatggagaaggacatggtggggtccccggctcatgacaccaaccaccggggcccccccaccagctggctggccccaggccgcgccaagaccttccgcctgaagctgcccgcgctgctggcgctgacggcccgggagtcgtcggtgcggtcgggcggcgcgggcggcgcgggcgccccgggggccgtggtggtggacgtggacctgacgcccgcggcacccagcagcgagtcgctggccctggacgaagtgacagccatggacaaccacgtggcagggctcgggcccgcggaggagcggcgtgcgctggtgggtcccggctctccgccccgcagcgcgcccggccagctcccatcgccccgggcgcacagcctcaaccccgacgcctcgggctccagctgcagcctggcccggacgcgctcccgagaaagctgcgccagcgtgcgccgcgcctcgtcggccgacgacatcgaggccatgcgcgccggggtgctgcccccgccaccgcgccacgccagcaccggggccatgcacccactgcgcagcggcttgctcaactccacctcggactccgacctcgtgcgctaccgcaccattagcaagattccccaaatcaccctcaactttgtggacctcaagggcgaccccttcttggcttcgcccaccagtgaccgtgagatcatagcacctaagataaaggagcgaacccacaatgtcactgagaaggtcacccaggtcctgtccctgggcgccgacgtgctgcctgagtacaagctgcaggcaccgcgcatccaccgctggaccatcctgcattacagccccttcaaggccgtgtgggactggctcatcctgctgctggtcatctacacggctgtcttcacaccctactcggctgccttcctgctgaaggagacggaagaaggcccgcctgctaccgagtgtggctacgcctgccagccgctggctgtggtggacctcatcgtggacatcatgttcattgtggacatcctcatcaacttccgcaccacctacgtcaatgccaacgaggaggtggtcagccaccccggccgcatcgccgtccactacttcaagggctggttcctcatcgacatggtggccgccatccccttcgacctgctcatcttcggctctggctctgaggagctgatcgggctgctgaagactgcgcggctgctgcggctggtgcgcgtggcgcggaagctggatcgctactcagagtacggcgcggccgtgctgttcttgctcatgtgcacctttgcgctcatcgcgcactggctagcctgcatctggtacgccatcggcaacatggagcagccacacatggactcacgcatcggctggctgcacaacctgggcgaccagataggcaaaccctacaacagcagcggcctgggcggccactccatcaaggacaagtatgtgacggcgctctacttcaccttcagcagcctcaccagtgtgggcttcggcaacgtctctcccaacaccaactcagagaagatcttctccatctgcgtcatgctcattggctccctcatgtatgctagcatcttcggcaacgtgtcggccatcatccagcggctgtactcgggcacagcccgctaccacacacagatgctgcgggtgcgggagttcatccgcttccaccagatccccaatcccctgcgccagcgcctcgaggagtacttccagcacgcctggtcctacaccaacggcatcgacatgaacgcggtgctgaagggcttccctgagtgcctgcaggctgacatctgcctgcacctgaaccgctcactgctgcagcactgcaaacccttccgaggggccaccaagggctgccttcgggccctggccatgaagttcaagaccacacatgcaccgccaggggacacactggtgcatgctggggacctgctcaccgccctgtacttcatctcccggggctccatcgagatcctgcggggcgacgtcgtcgtggccatcctggggaagaatgacatctttggggagcctctgaacctgtatgcaaggcctggcaagtcgaacggggatgtgcgggccctcacctactgtgacctacacaagatccatcgggacgacctgctggaggtgctggacatgtaccctgagttctccgaccacttctggtccagcctggagatcaccttcaacctgcgagataccaacatgatcccgggctcccccggcagtacggagttagagggtggcttcagtcggcaacgcaagcgcaagttgtccttccgcaggcgcacggacaaggacacggagcagccaggggaggtgtcggccttggggccgggccgggcgggggcagggccgagtagccggggccggccgggggggccgtggggggagagcccgtccagtggcccctccagccctgagagcagtgaggatgagggcccaggccgcagctccagccccctccgcctggtgcccttctccagccccaggccccccggagagccgccgggtggggagcccctgatggaggactgcgagaagagcagcgacacttgcaaccccctgtcaggcgccttctcaggagtgtccaacattttcagcttctggggggacagtcggggccgccagtaccaggagctccctcgatgccccgcccccacccccagcctcctcaacatccccctctccagcccgggtcggcggccccggggcgacgtggagagcaggctggatgccctccagcgccagctcaacaggctggagacccggctgagtgcagacatggccactgtcctgcagctgctacagaggcagatgacgctggtcccgcccgcctacagtgctgtgaccaccccggggcctggccccacttccacatccccgctgttgcccgtcagccccctccccaccctcaccttggactcgctttctcaggtttcccagttcatggcgtgtgaggagctgcccccgggggccccagagcttccccaagaaggccccacacgacgcctctccctaccgggccagctgggggccctcacctcccagcccctgcacagacacggctcggacccgggcagttagtggggctgcccagtgtggacacgtggctcacccagggatcaaggcgctgctgggccgctccccttggaggccctgctcaggaggccctgaccgtggaaggggagaggaactcgaaagcacagctcctcccccagcccttgggaccatcttctcctgcagtcccctgggccccagtgagaggggcaggggcagggccggcagtaggtggggcctgtggtccccccactgccctgagggcattagctggtctaactgcccggaggcacccggccctgggccttaggcacctcaaggacttttctgctatttactgctcttattgttaaggataataattaaggatcatatgaataattaatgaagatgctgatgactatgaataataaataattatcctgaggaga

SEQ ID NO: 283 - DNA, 3884 bp, Homo sapiens
  source 1..3884: mol_type = genomic DNA
  misc_feature 1..3884: note = cDNA of KCNH2 gene SNP c.1814C>T (p.Pro605Leu)
atgccggtgcggaggggccacgtcgcgccgcagaacaccttcctggacaccatcatccgcaagtttgagggccagagccgtaagttcatcatcgccaacgctcgggtggagaactgcgccgtcatctactgcaacgacggcttctgcgagctgtgcggctactcgcgggccgaggtgatgcagcgaccctgcacctgcgacttcctgcacgggccgcgcacgcagcgccgcgctgccgcgcagatcgcgcaggcactgctgggcgccgaggagcgcaaagtggaaatcgccttctaccggaaagatgggagctgcttcctatgtctggtggatgtggtgcccgtgaagaacgaggatggggctgtcatcatgttcatcctcaatttcgaggtggtgatggagaaggacatggtggggtccccggctcatgacaccaaccaccggggcccccccaccagctggctggccccaggccgcgccaagaccttccgcctgaagctgcccgcgctgctggcgctgacggcccgggagtcgtcggtgcggtcgggcggcgcgggcggcgcgggcgccccgggggccgtggtggtggacgtggacctgacgcccgcggcacccagcagcgagtcgctggccctggacgaagtgacagccatggacaaccacgtggcagggctcgggcccgcggaggagcggcgtgcgctggtgggtcccggctctccgccccgcagcgcgcccggccagctcccatcgccccgggcgcacagcctcaaccccgacgcctcgggctccagctgcagcctggcccggacgcgctcccgagaaagctgcgccagcgtgcgccgcgcctcgtcggccgacgacatcgaggccatgcgcgccggggtgctgcccccgccaccgcgccacgccagcaccggggccatgcacccactgcgcagcggcttgctcaactccacctcggactccgacctcgtgcgctaccgcaccattagcaagattccccaaatcaccctcaactttgtggacctcaagggcgaccccttcttggcttcgcccaccagtgaccgtgagatcatagcacctaagataaaggagcgaacccacaatgtcactgagaaggtcacccaggtcctgtccctgggcgccgacgtgctgcctgagtacaagctgcaggcaccgcgcatccaccgctggaccatcctgcattacagccccttcaaggccgtgtgggactggctcatcctgctgctggtcatctacacggctgtcttcacaccctactcggctgccttcctgctgaaggagacggaagaaggcccgcctgctaccgagtgtggctacgcctgccagccgctggctgtggtggacctcatcgtggacatcatgttcattgtggacatcctcatcaacttccgcaccacctacgtcaatgccaacgaggaggtggtcagccaccccggccgcatcgccgtccactacttcaagggctggttcctcatcgacatggtggccgccatccccttcgacctgctcatcttcggctctggctctgaggagctgatcgggctgctgaagactgcgcggctgctgcggctggtgcgcgtggcgcggaagctggatcgctactcagagtacggcgcggccgtgctgttcttgctcatgtgcacctttgcgctcatcgcgcactggctagcctgcatctggtacgccatcggcaacatggagcagccacacatggactcacgcatcggctggctgcacaacctgggcgaccagataggcaaaccctacaacagcagcggcctgggcggcctctccatcaaggacaagtatgtgacggcgctctacttcaccttcagcagcctcaccagtgtgggcttcggcaacgtctctcccaacaccaactcagagaagatcttctccatctgcgtcatgctcattggctccctcatgtatgctagcatcttcggcaacgtgtcggccatcatccagcggctgtactcgggcacagcccgctaccacacacagatgctgcgggtgcgggagttcatccgcttccaccagatccccaatcccctgcgccagcgcctcgaggagtacttccagcacgcctggtcctacaccaacggcatcgacatgaacgcggtgctgaagggcttccctgagtgcctgcaggctgacatctgcctgcacctgaaccgctcactgctgcagcactgcaaacccttccgaggggccaccaagggctgccttcgggccctggccatgaagttcaagaccacacatgcaccgccaggggacacactggtgcatgctggggacctgctcaccgccctgtacttcatctcccggggctccatcgagatcctgcggggcgacgtcgtcgtggccatcctggggaagaatgacatctttggggagcctctgaacctgtatgcaaggcctggcaagtcgaacggggatgtgcgggccctcacctactgtgacctacacaagatccatcgggacgacctgctggaggtgctggacatgtaccctgagttctccgaccacttctggtccagcctggagatcaccttcaacctgcgagataccaacatgatcccgggctcccccggcagtacggagttagagggtggcttcagtcggcaacgcaagcgcaagttgtccttccgcaggcgcacggacaaggacacggagcagccaggggaggtgtcggccttggggccgggccgggcgggggcagggccgagtagccggggccggccgggggggccgtggggggagagcccgtccagtggcccctccagccctgagagcagtgaggatgagggcccaggccgcagctccagccccctccgcctggtgcccttctccagccccaggccccccggagagccgccgggtggggagcccctgatggaggactgcgagaagagcagcgacacttgcaaccccctgtcaggcgccttctcaggagtgtccaacattttcagcttctggggggacagtcggggccgccagtaccaggagctccctcgatgccccgcccccacccccagcctcctcaacatccccctctccagcccgggtcggcggccccggggcgacgtggagagcaggctggatgccctccagcgccagctcaacaggctggagacccggctgagtgcagacatggccactgtcctgcagctgctacagaggcagatgacgctggtcccgcccgcctacagtgctgtgaccaccccggggcctggccccacttccacatccccgctgttgcccgtcagccccctccccaccctcaccttggactcgctttctcaggtttcccagttcatggcgtgtgaggagctgcccccgggggccccagagcttccccaagaaggccccacacgacgcctctccctaccgggccagctgggggccctcacctcccagcccctgcacagacacggctcggacccgggcagttagtggggctgcccagtgtggacacgtggctcacccagggatcaaggcgctgctgggccgctccccttggaggccctgctcaggaggccctgaccgtggaaggggagaggaactcgaaagcacagctcctcccccagcccttgggaccatcttctcctgcagtcccctgggccccagtgagaggggcaggggcagggccggcagtaggtggggcctgtggtccccccactgccctgagggcattagctggtctaactgcccggaggcacccggccctgggccttaggcacctcaaggacttttctgctatttactgctcttattgttaaggataataattaaggatcatatgaataattaatgaagatgctgatgactatgaataataaataattatcctgaggaga

SEQ ID NO: 284 - DNA, 3884 bp, Homo sapiens
  source 1..3884: mol_type = genomic DNA
  misc_feature 1..3884: note = cDNA of KCNH2 gene SNP c.1816T>C (p.Ser606Pro)
atgccggtgcggaggggccacgtcgcgccgcagaacaccttcctggacaccatcatccgcaagtttgagggccagagccgtaagttcatcatcgccaacgctcgggtggagaactgcgccgtcatctactgcaacgacggcttctgcgagctgtgcggctactcgcgggccgaggtgatgcagcgaccctgcacctgcgacttcctgcacgggccgcgcacgcagcgccgcgctgccgcgcagatcgcgcaggcactgctgggcgccgaggagcgcaaagtggaaatcgccttctaccggaaagatgggagctgcttcctatgtctggtggatgtggtgcccgtgaagaacgaggatggggctgtcatcatgttcatcctcaatttcgaggtggtgatggagaaggacatggtggggtccccggctcatgacaccaaccaccggggcccccccaccagctggctggccccaggccgcgccaagaccttccgcctgaagctgcccgcgctgctggcgctgacggcccgggagtcgtcggtgcggtcgggcggcgcgggcggcgcgggcgccccgggggccgtggtggtggacgtggacctgacgcccgcggcacccagcagcgagtcgctggccctggacgaagtgacagccatggacaaccacgtggcagggctcgggcccgcggaggagcggcgtgcgctggtgggtcccggctctccgccccgcagcgcgcccggccagctcccatcgccccgggcgcacagcctcaaccccgacgcctcgggctccagctgcagcctggcccggacgcgctcccgagaaagctgcgccagcgtgcgccgcgcctcgtcggccgacgacatcgaggccatgcgcgccggggtgctgcccccgccaccgcgccacgccagcaccggggccatgcacccactgcgcagcggcttgctcaactccacctcggactccgacctcgtgcgctaccgcaccattagcaagattccccaaatcaccctcaactttgtggacctcaagggcgaccccttcttggcttcgcccaccagtgaccgtgagatcatagcacctaagataaaggagcgaacccacaatgtcactgagaaggtcacccaggtcctgtccctgggcgccgacgtgctgcctgagtacaagctgcaggcaccgcgcatccaccgctggaccatcctgcattacagccccttcaaggccgtgtgggactggctcatcctgctgctggtcatctacacggctgtcttcacaccctactcggctgccttcctgctgaaggagacggaagaaggcccgcctgctaccgagtgtggctacgcctgccagccgctggctgtggtggacctcatcgtggacatcatgttcattgtggacatcctcatcaacttccgcaccacctacgtcaatgccaacgaggaggtggtcagccaccccggccgcatcgccgtccactacttcaagggctggttcctcatcgacatggtggccgccatccccttcgacctgctcatcttcggctctggctctgaggagctgatcgggctgctgaagactgcgcggctgctgcggctggtgcgcgtggcgcggaagctggatcgctactcagagtacggcgcggccgtgctgttcttgctcatgtgcacctttgcgctcatcgcgcactggctagcctgcatctggtacgccatcggcaacatggagcagccacacatggactcacgcatcggctggctgcacaacctgggcgaccagataggcaaaccctacaacagcagcggcctgggcggcccccccatcaaggacaagtatgtgacggcgctctacttcaccttcagcagcctcaccagtgtgggcttcggcaacgtctctcccaacaccaactcagagaagatcttctccatctgcgtcatgctcattggctccctcatgtatgctagcatcttcggcaacgtgtcggccatcatccagcggctgtactcgggcacagcccgctaccacacacagatgctgcgggtgcgggagttcatccgcttccaccagatccccaatcccctgcgccagcgcctcgaggagtacttccagcacgcctggtcctacaccaacggcatcgacatgaacgcggtgctgaagggcttccctgagtgcctgcaggctgacatctgcctgcacctgaaccgctcactgctgcagcactgcaaacccttccgaggggccaccaagggctgccttcgggccctggccatgaagttcaagaccacacatgcaccgccaggggacacactggtgcatgctggggacctgctcaccgccctgtacttcatctcccggggctccatcgagatcctgcggggcgacgtcgtcgtggccatcctggggaagaatgacatctttggggagcctctgaacctgtatgcaaggcctggcaagtcgaacggggatgtgcgggccctcacctactgtgacctacacaagatccatcgggacgacctgctggaggtgctggacatgtaccctgagttctccgaccacttctggtccagcctggagatcaccttcaacctgcgagataccaacatgatcccgggctcccccggcagtacggagttagagggtggcttcagtcggcaacgcaagcgcaagttgtccttccgcaggcgcacggacaaggacacggagcagccaggggaggtgtcggccttggggccgggccgggcgggggcagggccgagtagccggggccggccgggggggccgtggggggagagcccgtccagtggcccctccagccctgagagcagtgaggatgagggcccaggccgcagctccagccccctccgcctggtgcccttctccagccccaggccccccggagagccgccgggtggggagcccctgatggaggactgcgagaagagcagcgacacttgcaaccccctgtcaggcgccttctcaggagtgtccaacattttcagcttctggggggacagtcggggccgccagtaccaggagctccctcgatgccccgcccccacccccagcctcctcaacatccccctctccagcccgggtcggcggccccggggcgacgtggagagcaggctggatgccctccagcgccagctcaacaggctggagacccggctgagtgcagacatggccactgtcctgcagctgctacagaggcagatgacgctggtcccgcccgcctacagtgctgtgaccaccccggggcctggccccacttccacatccccgctgttgcccgtcagccccctccccaccctcaccttggactcgctttctcaggtttcccagttcatggcgtgtgaggagctgcccccgggggccccagagcttccccaagaaggccccacacgacgcctctccctaccgggccagctgggggccctcacctcccagcccctgcacagacacggctcggacccgggcagttagtggggctgcccagtgtggacacgtggctcacccagggatcaaggcgctgctgggccgctccccttggaggccctgctcaggaggccctgaccgtggaaggggagaggaactcgaaagcacagctcctcccccagcccttgggaccatcttctcctgcagtcccctgggccccagtgagaggggcaggggcagggccggcagtaggtggggcctgtggtccccccactgccctgagggcattagctggtctaactgcccggaggcacccggccctgggccttaggcacctcaaggacttttctgctatttactgctcttattgttaaggataataattaaggatcatatgaataattaatgaagatgctgatgactatgaataataaataattatcctgaggaga

SEQ ID NO: 285 - DNA, 3884 bp, Homo sapiens
  source 1..3884: mol_type = genomic DNA
  misc_feature 1..3884: note = cDNA of KCNH2 gene SNP c.1819A>T (p.Ile607Phe)
atgccggtgcggaggggccacgtcgcgccgcagaacaccttcctggacaccatcatccgcaagtttgagggccagagccgtaagttcatcatcgccaacgctcgggtggagaactgcgccgtcatctactgcaacgacggcttctgcgagctgtgcggctactcgcgggccgaggtgatgcagcgaccctgcacctgcgacttcctgcacgggccgcgcacgcagcgccgcgctgccgcgcagatcgcgcaggcactgctgggcgccgaggagcgcaaagtggaaatcgccttctaccggaaagatgggagctgcttcctatgtctggtggatgtggtgcccgtgaagaacgaggatggggctgtcatcatgttcatcctcaatttcgaggtggtgatggagaaggacatggtggggtccccggctcatgacaccaaccaccggggcccccccaccagctggctggccccaggccgcgccaagaccttccgcctgaagctgcccgcgctgctggcgctgacggcccgggagtcgtcggtgcggtcgggcggcgcgggcggcgcgggcgccccgggggccgtggtggtggacgtggacctgacgcccgcggcacccagcagcgagtcgctggccctggacgaagtgacagccatggacaaccacgtggcagggctcgggcccgcggaggagcggcgtgcgctggtgggtcccggctctccgccccgcagcgcgcccggccagctcccatcgccccgggcgcacagcctcaaccccgacgcctcgggctccagctgcagcctggcccggacgcgctcccgagaaagctgcgccagcgtgcgccgcgcctcgtcggccgacgacatcgaggccatgcgcgccggggtgctgcccccgccaccgcgccacgccagcaccggggccatgcacccactgcgcagcggcttgctcaactccacctcggactccgacctcgtgcgctaccgcaccattagcaagattccccaaatcaccctcaactttgtggacctcaagggcgaccccttcttggcttcgcccaccagtgaccgtgagatcatagcacctaagataaaggagcgaacccacaatgtcactgagaaggtcacccaggtcctgtccctgggcgccgacgtgctgcctgagtacaagctgcaggcaccgcgcatccaccgctggaccatcctgcattacagccccttcaaggccgtgtgggactggctcatcctgctgctggtcatctacacggctgtcttcacaccctactcggctgccttcctgctgaaggagacggaagaaggcccgcctgctaccgagtgtggctacgcctgccagccgctggctgtggtggacctcatcgtggacatcatgttcattgtggacatcctcatcaacttccgcaccacctacgtcaatgccaacgaggaggtggtcagccaccccggccgcatcgccgtccactacttcaagggctggttcctcatcgacatggtggccgccatccccttcgacctgctcatcttcggctctggctctgaggagctgatcgggctgctgaagactgcgcggctgctgcggctggtgcgcgtggcgcggaagctggatcgctactcagagtacggcgcggccgtgctgttcttgctcatgtgcacctttgcgctcatcgcgcactggctagcctgcatctggtacgccatcggcaacatggagcagccacacatggactcacgcatcggctggctgcacaacctgggcgaccagataggcaaaccctacaacagcagcggcctgggcggcccctccttcaaggacaagtatgtgacggcgctctacttcaccttcagcagcctcaccagtgtgggcttcggcaacgtctctcccaacaccaactcagagaagatcttctccatctgcgtcatgctcattggctccctcatgtatgctagcatcttcggcaacgtgtcggccatcatccagcggctgtactcgggcacagcccgctaccacacacagatgctgcgggtgcgggagttcatccgcttccaccagatccccaatcccctgcgccagcgcctcgaggagtacttccagcacgcctggtcctacaccaacggcatcgacatgaacgcggtgctgaagggcttccctgagtgcctgcaggctgacatctgcctgcacctgaaccgctcactgctgcagcactgcaaacccttccgaggggccaccaagggctgccttcgggccctggccatgaagttcaagaccacacatgcaccgccaggggacacactggtgcatgctggggacctgctcaccgccctgtacttcatctcccggggctccatcgagatcctgcggggcgacgtcgtcgtggccatcctggggaagaatgacatctttggggagcctctgaacctgtatgcaaggcctggcaagtcgaacggggatgtgcgggccctcacctactgtgacctacacaagatccatcgggacgacctgctggaggtgctggacatgtaccctgagttctccgaccacttctggtccagcctggagatcaccttcaacctgcgagataccaacatgatcccgggctcccccggcagtacggagttagagggtggcttcagtcggcaacgcaagcgcaagttgtccttccgcaggcgcacggacaaggacacggagcagccaggggaggtgtcggccttggggccgggccgggcgggggcagggccgagtagccggggccggccgggggggccgtggggggagagcccgtccagtggcccctccagccctgagagcagtgaggatgagggcccaggccgcagctccagccccctccgcctggtgcccttctccagccccaggccccccggagagccgccgggtggggagcccctgatggaggactgcgagaagagcagcgacacttgcaaccccctgtcaggcgccttctcaggagtgtccaacattttcagcttctggggggacagtcggggccgccagtaccaggagctccctcgatgccccgcccccacccccagcctcctcaacatccccctctccagcccgggtcggcggccccggggcgacgtggagagcaggctggatgccctccagcgccagctcaacaggctggagacccggctgagtgcagacatggccactgtcctgcagctgctacagaggcagatgacgctggtcccgcccgcctacagtgctgtgaccaccccggggcctggccccacttccacatccccgctgttgcccgtcagccccctccccaccctcaccttggactcgctttctcaggtttcccagttcatggcgtgtgaggagctgcccccgggggccccagagcttccccaagaaggccccacacgacgcctctccctaccgggccagctgggggccctcacctcccagcccctgcacagacacggctcggacccgggcagttagtggggctgcccagtgtggacacgtggctcacccagggatcaaggcgctgctgggccgctccccttggaggccctgctcaggaggccctgaccgtggaaggggagaggaactcgaaagcacagctcctcccccagcccttgggaccatcttctcctgcagtcccctgggccccagtgagaggggcaggggcagggccggcagtaggtggggcctgtggtccccccactgccctgagggcattagctggtctaactgcccggaggcacccggccctgggccttaggcacctcaaggacttttctgctatttactgctcttattgttaaggataataattaaggatcatatgaataattaatgaagatgctgatgactatgaataataaataattatcctgaggaga

SEQ ID NO: 286 - DNA, 3884 bp, Homo sapiens
  source 1..3884: mol_type = genomic DNA
  misc_feature 1..3884: note = cDNA of KCNH2 gene SNP c.1825G>A (p.Asp609Asn)
atgccggtgcggaggggccacgtcgcgccgcagaacaccttcctggacaccatcatccgcaagtttgagggccagagccgtaagttcatcatcgccaacgctcgggtggagaactgcgccgtcatctactgcaacgacggcttctgcgagctgtgcggctactcgcgggccgaggtgatgcagcgaccctgcacctgcgacttcctgcacgggccgcgcacgcagcgccgcgctgccgcgcagatcgcgcaggcactgctgggcgccgaggagcgcaaagtggaaatcgccttctaccggaaagatgggagctgcttcctatgtctggtggatgtggtgcccgtgaagaacgaggatggggctgtcatcatgttcatcctcaatttcgaggtggtgatggagaaggacatggtggggtccccggctcatgacaccaaccaccggggcccccccaccagctggctggccccaggccgcgccaagaccttccgcctgaagctgcccgcgctgctggcgctgacggcccgggagtcgtcggtgcggtcgggcggcgcgggcggcgcgggcgccccgggggccgtggtggtggacgtggacctgacgcccgcggcacccagcagcgagtcgctggccctggacgaagtgacagccatggacaaccacgtggcagggctcgggcccgcggaggagcggcgtgcgctggtgggtcccggctctccgccccgcagcgcgcccggccagctcccatcgccccgggcgcacagcctcaaccccgacgcctcgggctccagctgcagcctggcccggacgcgctcccgagaaagctgcgccagcgtgcgccgcgcctcgtcggccgacgacatcgaggccatgcgcgccggggtgctgcccccgccaccgcgccacgccagcaccggggccatgcacccactgcgcagcggcttgctcaactccacctcggactccgacctcgtgcgctaccgcaccattagcaagattccccaaatcaccctcaactttgtggacctcaagggcgaccccttcttggcttcgcccaccagtgaccgtgagatcatagcacctaagataaaggagcgaacccacaatgtcactgagaaggtcacccaggtcctgtccctgggcgccgacgtgctgcctgagtacaagctgcaggcaccgcgcatccaccgctggaccatcctgcattacagccccttcaaggccgtgtgggactggctcatcctgctgctggtcatctacacggctgtcttcacaccctactcggctgccttcctgctgaaggagacggaagaaggcccgcctgctaccgagtgtggctacgcctgccagccgctggctgtggtggacctcatcgtggacatcatgttcattgtggacatcctcatcaacttccgcaccacctacgtcaatgccaacgaggaggtggtcagccaccccggccgcatcgccgtccactacttcaagggctggttcctcatcgacatggtggccgccatccccttcgacctgctcatcttcggctctggctctgaggagctgatcgggctgctgaagactgcgcggctgctgcggctggtgcgcgtggcgcggaagctggatcgctactcagagtacggcgcggccgtgctgttcttgctcatgtgcacctttgcgctcatcgcgcactggctagcctgcatctggtacgccatcggcaacatggagcagccacacatggactcacgcatcggctggctgcacaacctgggcgaccagataggcaaaccctacaacagcagcggcctgggcggcccctccatcaagaacaagtatgtgacggcgctctacttcaccttcagcagcctcaccagtgtgggcttcggcaacgtctctcccaacaccaactcagagaagatcttctccatctgcgtcatgctcattggctccctcatgtatgctagcatcttcggcaacgtgtcggccatcatccagcggctgtactcgggcacagcccgctaccacacacagatgctgcgggtgcgggagttcatccgcttccaccagatccccaatcccctgcgccagcgcctcgaggagtacttccagcacgcctggtcctacaccaacggcatcgacatgaacgcggtgctgaagggcttccctgagtgcctgcaggctgacatctgcctgcacctgaaccgctcactgctgcagcactgcaaacccttccgaggggccaccaagggctgccttcgggccctggccatgaagttcaagaccacacatgcaccgccaggggacacactggtgcatgctggggacctgctcaccgccctgtacttcatctcccggggctccatcgagatcctgcggggcgacgtcgtcgtggccatcctggggaagaatgacatctttggggagcctctgaacctgtatgcaaggcctggcaagtcgaacggggatgtgcgggccctcacctactgtgacctacacaagatccatcgggacgacctgctggaggtgctggacatgtaccctgagttctccgaccacttctggtccagcctggagatcaccttcaacctgcgagataccaacatgatcccgggctcccccggcagtacggagttagagggtggcttcagtcggcaacgcaagcgcaagttgtccttccgcaggcgcacggacaaggacacggagcagccaggggaggtgtcggccttggggccgggccgggcgggggcagggccgagtagccggggccggccgggggggccgtggggggagagcccgtccagtggcccctccagccctgagagcagtgaggatgagggcccaggccgcagctccagccccctccgcctggtgcccttctccagccccaggccccccggagagccgccgggtggggagcccctgatggaggactgcgagaagagcagcgacacttgcaaccccctgtcaggcgccttctcaggagtgtccaacattttcagcttctggggggacagtcggggccgccagtaccaggagctccctcgatgccccgcccccacccccagcctcctcaacatccccctctccagcccgggtcggcggccccggggcgacgtggagagcaggctggatgccctccagcgccagctcaacaggctggagacccggctgagtgcagacatggccactgtcctgcagctgctacagaggcagatgacgctggtcccgcccgcctacagtgctgtgaccaccccggggcctggccccacttccacatccccgctgttgcccgtcagccccctccccaccctcaccttggactcgctttctcaggtttcccagttcatggcgtgtgaggagctgcccccgggggccccagagcttccccaagaaggccccacacgacgcctctccctaccgggccagctgggggccctcacctcccagcccctgcacagacacggctcggacccgggcagttagtggggctgcccagtgtggacacgtggctcacccagggatcaaggcgctgctgggccgctccccttggaggccctgctcaggaggccctgaccgtggaaggggagaggaactcgaaagcacagctcctcccccagcccttgggaccatcttctcctgcagtcccctgggccccagtgagaggggcaggggcagggccggcagtaggtggggcctgtggtccccccactgccctgagggcattagctggtctaactgcccggaggcacccggccctgggccttaggcacctcaaggacttttctgctatttactgctcttattgttaaggataataattaaggatcatatgaataattaatgaagatgctgatgactatgaataataaataattatcctgaggaga

SEQ ID NO: 287 - DNA, 3884 bp, Homo sapiens
  source 1..3884: mol_type = genomic DNA
  misc_feature 1..3884: note = cDNA of KCNH2 gene SNP c.1825G>C (p.Asp609His)
atgccggtgcggaggggccacgtcgcgccgcagaacaccttcctggacaccatcatccgcaagtttgagggccagagccgtaagttcatcatcgccaacgctcgggtggagaactgcgccgtcatctactgcaacgacggcttctgcgagctgtgcggctactcgcgggccgaggtgatgcagcgaccctgcacctgcgacttcctgcacgggccgcgcacgcagcgccgcgctgccgcgcagatcgcgcaggcactgctgggcgccgaggagcgcaaagtggaaatcgccttctaccggaaagatgggagctgcttcctatgtctggtggatgtggtgcccgtgaagaacgaggatggggctgtcatcatgttcatcctcaatttcgaggtggtgatggagaaggacatggtggggtccccggctcatgacaccaaccaccggggcccccccaccagctggctggccccaggccgcgccaagaccttccgcctgaagctgcccgcgctgctggcgctgacggcccgggagtcgtcggtgcggtcgggcggcgcgggcggcgcgggcgccccgggggccgtggtggtggacgtggacctgacgcccgcggcacccagcagcgagtcgctggccctggacgaagtgacagccatggacaaccacgtggcagggctcgggcccgcggaggagcggcgtgcgctggtgggtcccggctctccgccccgcagcgcgcccggccagctcccatcgccccgggcgcacagcctcaaccccgacgcctcgggctccagctgcagcctggcccggacgcgctcccgagaaagctgcgccagcgtgcgccgcgcctcgtcggccgacgacatcgaggccatgcgcgccggggtgctgcccccgccaccgcgccacgccagcaccggggccatgcacccactgcgcagcggcttgctcaactccacctcggactccgacctcgtgcgctaccgcaccattagcaagattccccaaatcaccctcaactttgtggacctcaagggcgaccccttcttggcttcgcccaccagtgaccgtgagatcatagcacctaagataaaggagcgaacccacaatgtcactgagaaggtcacccaggtcctgtccctgggcgccgacgtgctgcctgagtacaagctgcaggcaccgcgcatccaccgctggaccatcctgcattacagccccttcaaggccgtgtgggactggctcatcctgctgctggtcatctacacggctgtcttcacaccctactcggctgccttcctgctgaaggagacggaagaaggcccgcctgctaccgagtgtggctacgcctgccagccgctggctgtggtggacctcatcgtggacatcatgttcattgtggacatcctcatcaacttccgcaccacctacgtcaatgccaacgaggaggtggtcagccaccccggccgcatcgccgtccactacttcaagggctggttcctcatcgacatggtggccgccatccccttcgacctgctcatcttcggctctggctctgaggagctgatcgggctgctgaagactgcgcggctgctgcggctggtgcgcgtggcgcggaagctggatcgctactcagagtacggcgcggccgtgctgttcttgctcatgtgcacctttgcgctcatcgcgcactggctagcctgcatctggtacgccatcggcaacatggagcagccacacatggactcacgcatcggctggctgcacaacctgggcgaccagataggcaaaccctacaacagcagcggcctgggcggcccctccatcaagcacaagtatgtgacggcgctctacttcaccttcagcagcctcaccagtgtgggcttcggcaacgtctctcccaacaccaactcagagaagatcttctccatctgcgtcatgctcattggctccctcatgtatgctagcatcttcggcaacgtgtcggccatcatccagcggctgtactcgggcacagcccgctaccacacacagatgctgcgggtgcgggagttcatccgcttccaccagatccccaatcccctgcgccagcgcctcgaggagtacttccagcacgcctggtcctacaccaacggcatcgacatgaacgcggtgctgaagggcttccctgagtgcctgcaggctgacatctgcctgcacctgaaccgctcactgctgcagcactgcaaacccttccgaggggccaccaagggctgccttcgggccctggccatgaagttcaagaccacacatgcaccgccaggggacacactggtgcatgctggggacctgctcaccgccctgtacttcatctcccggggctccatcgagatcctgcggggcgacgtcgtcgtggccatcctggggaagaatgacatctttggggagcctctgaacctgtatgcaaggcctggcaagtcgaacggggatgtgcgggccctcacctactgtgacctacacaagatccatcgggacgacctgctggaggtgctggacatgtaccctgagttctccgaccacttctggtccagcctggagatcaccttcaacctgcgagataccaacatgatcccgggctcccccggcagtacggagttagagggtggcttcagtcggcaacgcaagcgcaagttgtccttccgcaggcgcacggacaaggacacggagcagccaggggaggtgtcggccttggggccgggccgggcgggggcagggccgagtagccggggccggccgggggggccgtggggggagagcccgtccagtggcccctccagccctgagagcagtgaggatgagggcccaggccgcagctccagccccctccgcctggtgcccttctccagccccaggccccccggagagccgccgggtggggagcccctgatggaggactgcgagaagagcagcgacacttgcaaccccctgtcaggcgccttctcaggagtgtccaacattttcagcttctggggggacagtcggggccgccagtaccaggagctccctcgatgccccgcccccacccccagcctcctcaacatccccctctccagcccgggtcggcggccccggggcgacgtggagagcaggctggatgccctccagcgccagctcaacaggctggagacccggctgagtgcagacatggccactgtcctgcagctgctacagaggcagatgacgctggtcccgcccgcctacagtgctgtgaccaccccggggcctggccccacttccacatccccgctgttgcccgtcagccccctccccaccctcaccttggactcgctttctcaggtttcccagttcatggcgtgtgaggagctgcccccgggggccccagagcttccccaagaaggccccacacgacgcctctccctaccgggccagctgggggccctcacctcccagcccctgcacagacacggctcggacccgggcagttagtggggctgcccagtgtggacacgtggctcacccagggatcaaggcgctgctgggccgctccccttggaggccctgctcaggaggccctgaccgtggaaggggagaggaactcgaaagcacagctcctcccccagcccttgggaccatcttctcctgcagtcccctgggccccagtgagaggggcaggggcagggccggcagtaggtggggcctgtggtccccccactgccctgagggcattagctggtctaactgcccggaggcacccggccctgggccttaggcacctcaaggacttttctgctatttactgctcttattgttaaggataataattaaggatcatatgaataattaatgaagatgctgatgactatgaataataaataattatcctgaggaga

SEQ ID NO: 288 - DNA, 3884 bp, Homo sapiens
  source 1..3884: mol_type = genomic DNA
  misc_feature 1..3884: note = cDNA of KCNH2 gene SNP c.1825G>T (p.Asp609Tyr)
atgccggtgcggaggggccacgtcgcgccgcagaacaccttcctggacaccatcatccgcaagtttgagggccagagccgtaagttcatcatcgccaacgctcgggtggagaactgcgccgtcatctactgcaacgacggcttctgcgagctgtgcggctactcgcgggccgaggtgatgcagcgaccctgcacctgcgacttcctgcacgggccgcgcacgcagcgccgcgctgccgcgcagatcgcgcaggcactgctgggcgccgaggagcgcaaagtggaaatcgccttctaccggaaagatgggagctgcttcctatgtctggtggatgtggtgcccgtgaagaacgaggatggggctgtcatcatgttcatcctcaatttcgaggtggtgatggagaaggacatggtggggtccccggctcatgacaccaaccaccggggcccccccaccagctggctggccccaggccgcgccaagaccttccgcctgaagctgcccgcgctgctggcgctgacggcccgggagtcgtcggtgcggtcgggcggcgcgggcggcgcgggcgccccgggggccgtggtggtggacgtggacctgacgcccgcggcacccagcagcgagtcgctggccctggacgaagtgacagccatggacaaccacgtggcagggctcgggcccgcggaggagcggcgtgcgctggtgggtcccggctctccgccccgcagcgcgcccggccagctcccatcgccccgggcgcacagcctcaaccccgacgcctcgggctccagctgcagcctggcccggacgcgctcccgagaaagctgcgccagcgtgcgccgcgcctcgtcggccgacgacatcgaggccatgcgcgccggggtgctgcccccgccaccgcgccacgccagcaccggggccatgcacccactgcgcagcggcttgctcaactccacctcggactccgacctcgtgcgctaccgcaccattagcaagattccccaaatcaccctcaactttgtggacctcaagggcgaccccttcttggcttcgcccaccagtgaccgtgagatcatagcacctaagataaaggagcgaacccacaatgtcactgagaaggtcacccaggtcctgtccctgggcgccgacgtgctgcctgagtacaagctgcaggcaccgcgcatccaccgctggaccatcctgcattacagccccttcaaggccgtgtgggactggctcatcctgctgctggtcatctacacggctgtcttcacaccctactcggctgccttcctgctgaaggagacggaagaaggcccgcctgctaccgagtgtggctacgcctgccagccgctggctgtggtggacctcatcgtggacatcatgttcattgtggacatcctcatcaacttccgcaccacctacgtcaatgccaacgaggaggtggtcagccaccccggccgcatcgccgtccactacttcaagggctggttcctcatcgacatggtggccgccatccccttcgacctgctcatcttcggctctggctctgaggagctgatcgggctgctgaagactgcgcggctgctgcggctggtgcgcgtggcgcggaagctggatcgctactcagagtacggcgcggccgtgctgttcttgctcatgtgcacctttgcgctcatcgcgcactggctagcctgcatctggtacgccatcggcaacatggagcagccacacatggactcacgcatcggctggctgcacaacctgggcgaccagataggcaaaccctacaacagcagcggcctgggcggcccctccatcaagtacaagtatgtgacggcgctctacttcaccttcagcagcctcaccagtgtgggcttcggcaacgtctctcccaacaccaactcagagaagatcttctccatctgcgtcatgctcattggctccctcatgtatgctagcatcttcggcaacgtgtcggccatcatccagcggctgtactcgggcacagcccgctaccacacacagatgctgcgggtgcgggagttcatccgcttccaccagatccccaatcccctgcgccagcgcctcgaggagtacttccagcacgcctggtcctacaccaacggcatcgacatgaacgcggtgctgaagggcttccctgagtgcctgcaggctgacatctgcctgcacctgaaccgctcactgctgcagcactgcaaacccttccgaggggccaccaagggctgccttcgggccctggccatgaagttcaagaccacacatgcaccgccaggggacacactggtgcatgctggggacctgctcaccgccctgtacttcatctcccggggctccatcgagatcctgcggggcgacgtcgtcgtggccatcctggggaagaatgacatctttggggagcctctgaacctgtatgcaaggcctggcaagtcgaacggggatgtgcgggccctcacctactgtgacctacacaagatccatcgggacgacctgctggaggtgctggacatgtaccctgagttctccgaccacttctggtccagcctggagatcaccttcaacctgcgagataccaacatgatcccgggctcccccggcagtacggagttagagggtggcttcagtcggcaacgcaagcgcaagttgtccttccgcaggcgcacggacaaggacacggagcagccaggggaggtgtcggccttggggccgggccgggcgggggcagggccgagtagccggggccggccgggggggccgtggggggagagcccgtccagtggcccctccagccctgagagcagtgaggatgagggcccaggccgcagctccagccccctccgcctggtgcccttctccagccccaggccccccggagagccgccgggtggggagcccctgatggaggactgcgagaagagcagcgacacttgcaaccccctgtcaggcgccttctcaggagtgtccaacattttcagcttctggggggacagtcggggccgccagtaccaggagctccctcgatgccccgcccccacccccagcctcctcaacatccccctctccagcccgggtcggcggccccggggcgacgtggagagcaggctggatgccctccagcgccagctcaacaggctggagacccggctgagtgcagacatggccactgtcctgcagctgctacagaggcagatgacgctggtcccgcccgcctacagtgctgtgaccaccccggggcctggccccacttccacatccccgctgttgcccgtcagccccctccccaccctcaccttggactcgctttctcaggtttcccagttcatggcgtgtgaggagctgcccccgggggccccagagcttccccaagaaggccccacacgacgcctctccctaccgggccagctgggggccctcacctcccagcccctgcacagacacggctcggacccgggcagttagtggggctgcccagtgtggacacgtggctcacccagggatcaaggcgctgctgggccgctccccttggaggccctgctcaggaggccctgaccgtggaaggggagaggaactcgaaagcacagctcctcccccagcccttgggaccatcttctcctgcagtcccctgggccccagtgagaggggcaggggcagggccggcagtaggtggggcctgtggtccccccactgccctgagggcattagctggtctaactgcccggaggcacccggccctgggccttaggcacctcaaggacttttctgctatttactgctcttattgttaaggataataattaaggatcatatgaataattaatgaagatgctgatgactatgaataataaataattatcctgaggaga

SEQ ID NO: 289 - DNA, 3884 bp, Homo sapiens
  source 1..3884: mol_type = genomic DNA
  misc_feature 1..3884: note = cDNA of KCNH2 gene SNP c.1826A>C (p.Asp609Ala)
atgccggtgcggaggggccacgtcgcgccgcagaacaccttcctggacaccatcatccgcaagtttgagggccagagccgtaagttcatcatcgccaacgctcgggtggagaactgcgccgtcatctactgcaacgacggcttctgcgagctgtgcggctactcgcgggccgaggtgatgcagcgaccctgcacctgcgacttcctgcacgggccgcgcacgcagcgccgcgctgccgcgcagatcgcgcaggcactgctgggcgccgaggagcgcaaagtggaaatcgccttctaccggaaagatgggagctgcttcctatgtctggtggatgtggtgcccgtgaagaacgaggatggggctgtcatcatgttcatcctcaatttcgaggtggtgatggagaaggacatggtggggtccccggctcatgacaccaaccaccggggcccccccaccagctggctggccccaggccgcgccaagaccttccgcctgaagctgcccgcgctgctggcgctgacggcccgggagtcgtcggtgcggtcgggcggcgcgggcggcgcgggcgccccgggggccgtggtggtggacgtggacctgacgcccgcggcacccagcagcgagtcgctggccctggacgaagtgacagccatggacaaccacgtggcagggctcgggcccgcggaggagcggcgtgcgctggtgggtcccggctctccgccccgcagcgcgcccggccagctcccatcgccccgggcgcacagcctcaaccccgacgcctcgggctccagctgcagcctggcccggacgcgctcccgagaaagctgcgccagcgtgcgccgcgcctcgtcggccgacgacatcgaggccatgcgcgccggggtgctgcccccgccaccgcgccacgccagcaccggggccatgcacccactgcgcagcggcttgctcaactccacctcggactccgacctcgtgcgctaccgcaccattagcaagattccccaaatcaccctcaactttgtggacctcaagggcgaccccttcttggcttcgcccaccagtgaccgtgagatcatagcacctaagataaaggagcgaacccacaatgtcactgagaaggtcacccaggtcctgtccctgggcgccgacgtgctgcctgagtacaagctgcaggcaccgcgcatccaccgctggaccatcctgcattacagccccttcaaggccgtgtgggactggctcatcctgctgctggtcatctacacggctgtcttcacaccctactcggctgccttcctgctgaaggagacggaagaaggcccgcctgctaccgagtgtggctacgcctgccagccgctggctgtggtggacctcatcgtggacatcatgttcattgtggacatcctcatcaacttccgcaccacctacgtcaatgccaacgaggaggtggtcagccaccccggccgcatcgccgtccactacttcaagggctggttcctcatcgacatggtggccgccatccccttcgacctgctcatcttcggctctggctctgaggagctgatcgggctgctgaagactgcgcggctgctgcggctggtgcgcgtggcgcggaagctggatcgctactcagagtacggcgcggccgtgctgttcttgctcatgtgcacctttgcgctcatcgcgcactggctagcctgcatctggtacgccatcggcaacatggagcagccacacatggactcacgcatcggctggctgcacaacctgggcgaccagataggcaaaccctacaacagcagcggcctgggcggcccctccatcaaggccaagtatgtgacggcgctctacttcaccttcagcagcctcaccagtgtgggcttcggcaacgtctctcccaacaccaactcagagaagatcttctccatctgcgtcatgctcattggctccctcatgtatgctagcatcttcggcaacgtgtcggccatcatccagcggctgtactcgggcacagcccgctaccacacacagatgctgcgggtgcgggagttcatccgcttccaccagatccccaatcccctgcgccagcgcctcgaggagtacttccagcacgcctggtcctacaccaacggcatcgacatgaacgcggtgctgaagggcttccctgagtgcctgcaggctgacatctgcctgcacctgaaccgctcactgctgcagcactgcaaacccttccgaggggccaccaagggctgccttcgggccctggccatgaagttcaagaccacacatgcaccgccaggggacacactggtgcatgctggggacctgctcaccgccctgtacttcatctcccggggctccatcgagatcctgcggggcgacgtcgtcgtggccatcctggggaagaatgacatctttggggagcctctgaacctgtatgcaaggcctggcaagtcgaacggggatgtgcgggccctcacctactgtgacctacacaagatccatcgggacgacctgctggaggtgctggacatgtaccctgagttctccgaccacttctggtccagcctggagatcaccttcaacctgcgagataccaacatgatcccgggctcccccggcagtacggagttagagggtggcttcagtcggcaacgcaagcgcaagttgtccttccgcaggcgcacggacaaggacacggagcagccaggggaggtgtcggccttggggccgggccgggcgggggcagggccgagtagccggggccggccgggggggccgtggggggagagcccgtccagtggcccctccagccctgagagcagtgaggatgagggcccaggccgcagctccagccccctccgcctggtgcccttctccagccccaggccccccggagagccgccgggtggggagcccctgatggaggactgcgagaagagcagcgacacttgcaaccccctgtcaggcgccttctcaggagtgtccaacattttcagcttctggggggacagtcggggccgccagtaccaggagctccctcgatgccccgcccccacccccagcctcctcaacatccccctctccagcccgggtcggcggccccggggcgacgtggagagcaggctggatgccctccagcgccagctcaacaggctggagacccggctgagtgcagacatggccactgtcctgcagctgctacagaggcagatgacgctggtcccgcccgcctacagtgctgtgaccaccccggggcctggccccacttccacatccccgctgttgcccgtcagccccctccccaccctcaccttggactcgctttctcaggtttcccagttcatggcgtgtgaggagctgcccccgggggccccagagcttccccaagaaggccccacacgacgcctctccctaccgggccagctgggggccctcacctcccagcccctgcacagacacggctcggacccgggcagttagtggggctgcccagtgtggacacgtggctcacccagggatcaaggcgctgctgggccgctccccttggaggccctgctcaggaggccctgaccgtggaaggggagaggaactcgaaagcacagctcctcccccagcccttgggaccatcttctcctgcagtcccctgggccccagtgagaggggcaggggcagggccggcagtaggtggggcctgtggtccccccactgccctgagggcattagctggtctaactgcccggaggcacccggccctgggccttaggcacctcaaggacttttctgctatttactgctcttattgttaaggataataattaaggatcatatgaataattaatgaagatgctgatgactatgaataataaataattatcctgaggaga

SEQ ID NO: 290 - DNA, 3884 bp, Homo sapiens
  source 1..3884: mol_type = genomic DNA
  misc_feature 1..3884: note = cDNA of KCNH2 gene SNP c.1826A>G (p.Asp609Gly)
atgccggtgcggaggggccacgtcgcgccgcagaacaccttcctggacaccatcatccgcaagtttgagggccagagccgtaagttcatcatcgccaacgctcgggtggagaactgcgccgtcatctactgcaacgacggcttctgcgagctgtgcggctactcgcgggccgaggtgatgcagcgaccctgcacctgcgacttcctgcacgggccgcgcacgcagcgccgcgctgccgcgcagatcgcgcaggcactgctgggcgccgaggagcgcaaagtggaaatcgccttctaccggaaagatgggagctgcttcctatgtctggtggatgtggtgcccgtgaagaacgaggatggggctgtcatcatgttcatcctcaatttcgaggtggtgatggagaaggacatggtggggtccccggctcatgacaccaaccaccggggcccccccaccagctggctggccccaggccgcgccaagaccttccgcctgaagctgcccgcgctgctggcgctgacggcccgggagtcgtcggtgcggtcgggcggcgcgggcggcgcgggcgccccgggggccgtggtggtggacgtggacctgacgcccgcggcacccagcagcgagtcgctggccctggacgaagtgacagccatggacaaccacgtggcagggctcgggcccgcggaggagcggcgtgcgctggtgggtcccggctctccgccccgcagcgcgcccggccagctcccatcgccccgggcgcacagcctcaaccccgacgcctcgggctccagctgcagcctggcccggacgcgctcccgagaaagctgcgccagcgtgcgccgcgcctcgtcggccgacgacatcgaggccatgcgcgccggggtgctgcccccgccaccgcgccacgccagcaccggggccatgcacccactgcgcagcggcttgctcaactccacctcggactccgacctcgtgcgctaccgcaccattagcaagattccccaaatcaccctcaactttgtggacctcaagggcgaccccttcttggcttcgcccaccagtgaccgtgagatcatagcacctaagataaaggagcgaacccacaatgtcactgagaaggtcacccaggtcctgtccctgggcgccgacgtgctgcctgagtacaagctgcaggcaccgcgcatccaccgctggaccatcctgcattacagccccttcaaggccgtgtgggactggctcatcctgctgctggtcatctacacggctgtcttcacaccctactcggctgccttcctgctgaaggagacggaagaaggcccgcctgctaccgagtgtggctacgcctgccagccgctggctgtggtggacctcatcgtggacatcatgttcattgtggacatcctcatcaacttccgcaccacctacgtcaatgccaacgaggaggtggtcagccaccccggccgcatcgccgtccactacttcaagggctggttcctcatcgacatggtggccgccatccccttcgacctgctcatcttcggctctggctctgaggagctgatcgggctgctgaagactgcgcggctgctgcggctggtgcgcgtggcgcggaagctggatcgctactcagagtacggcgcggccgtgctgttcttgctcatgtgcacctttgcgctcatcgcgcactggctagcctgcatctggtacgccatcggcaacatggagcagccacacatggactcacgcatcggctggctgcacaacctgggcgaccagataggcaaaccctacaacagcagcggcctgggcggcccctccatcaagggcaagtatgtgacggcgctctacttcaccttcagcagcctcaccagtgtgggcttcggcaacgtctctcccaacaccaactcagagaagatcttctccatctgcgtcatgctcattggctccctcatgtatgctagcatcttcggcaacgtgtcggccatcatccagcggctgtactcgggcacagcccgctaccacacacagatgctgcgggtgcgggagttcatccgcttccaccagatccccaatcccctgcgccagcgcctcgaggagtacttccagcacgcctggtcctacaccaacggcatcgacatgaacgcggtgctgaagggcttccctgagtgcctgcaggctgacatctgcctgcacctgaaccgctcactgctgcagcactgcaaacccttccgaggggccaccaagggctgccttcgggccctggccatgaagttcaagaccacacatgcaccgccaggggacacactggtgcatgctggggacctgctcaccgccctgtacttcatctcccggggctccatcgagatcctgcggggcgacgtcgtcgtggccatcctggggaagaatgacatctttggggagcctctgaacctgtatgcaaggcctggcaagtcgaacggggatgtgcgggccctcacctactgtgacctacacaagatccatcgggacgacctgctggaggtgctggacatgtaccctgagttctccgaccacttctggtccagcctggagatcaccttcaacctgcgagataccaacatgatcccgggctcccccggcagtacggagttagagggtggcttcagtcggcaacgcaagcgcaagttgtccttccgcaggcgcacggacaaggacacggagcagccaggggaggtgtcggccttggggccgggccgggcgggggcagggccgagtagccggggccggccgggggggccgtggggggagagcccgtccagtggcccctccagccctgagagcagtgaggatgagggcccaggccgcagctccagccccctccgcctggtgcccttctccagccccaggccccccggagagccgccgggtggggagcccctgatggaggactgcgagaagagcagcgacacttgcaaccccctgtcaggcgccttctcaggagtgtccaacattttcagcttctggggggacagtcggggccgccagtaccaggagctccctcgatgccccgcccccacccccagcctcctcaacatccccctctccagcccgggtcggcggccccggggcgacgtggagagcaggctggatgccctccagcgccagctcaacaggctggagacccggctgagtgcagacatggccactgtcctgcagctgctacagaggcagatgacgctggtcccgcccgcctacagtgctgtgaccaccccggggcctggccccacttccacatccccgctgttgcccgtcagccccctccccaccctcaccttggactcgctttctcaggtttcccagttcatggcgtgtgaggagctgcccccgggggccccagagcttccccaagaaggccccacacgacgcctctccctaccgggccagctgggggccctcacctcccagcccctgcacagacacggctcggacccgggcagttagtggggctgcccagtgtggacacgtggctcacccagggatcaaggcgctgctgggccgctccccttggaggccctgctcaggaggccctgaccgtggaaggggagaggaactcgaaagcacagctcctcccccagcccttgggaccatcttctcctgcagtcccctgggccccagtgagaggggcaggggcagggccggcagtaggtggggcctgtggtccccccactgccctgagggcattagctggtctaactgcccggaggcacccggccctgggccttaggcacctcaaggacttttctgctatttactgctcttattgttaaggataataattaaggatcatatgaataattaatgaagatgctgatgactatgaataataaataattatcctgaggaga

SEQ ID NO: 291 - DNA, 3884 bp, Homo sapiens
  source 1..3884: mol_type = genomic DNA
  misc_feature 1..3884: note = cDNA of KCNH2 gene SNP c.1828A>G (p.Lys610Glu)
atgccggtgcggaggggccacgtcgcgccgcagaacaccttcctggacaccatcatccgcaagtttgagggccagagccgtaagttcatcatcgccaacgctcgggtggagaactgcgccgtcatctactgcaacgacggcttctgcgagctgtgcggctactcgcgggccgaggtgatgcagcgaccctgcacctgcgacttcctgcacgggccgcgcacgcagcgccgcgctgccgcgcagatcgcgcaggcactgctgggcgccgaggagcgcaaagtggaaatcgccttctaccggaaagatgggagctgcttcctatgtctggtggatgtggtgcccgtgaagaacgaggatggggctgtcatcatgttcatcctcaatttcgaggtggtgatggagaaggacatggtggggtccccggctcatgacaccaaccaccggggcccccccaccagctggctggccccaggccgcgccaagaccttccgcctgaagctgcccgcgctgctggcgctgacggcccgggagtcgtcggtgcggtcgggcggcgcgggcggcgcgggcgccccgggggccgtggtggtggacgtggacctgacgcccgcggcacccagcagcgagtcgctggccctggacgaagtgacagccatggacaaccacgtggcagggctcgggcccgcggaggagcggcgtgcgctggtgggtcccggctctccgccccgcagcgcgcccggccagctcccatcgccccgggcgcacagcctcaaccccgacgcctcgggctccagctgcagcctggcccggacgcgctcccgagaaagctgcgccagcgtgcgccgcgcctcgtcggccgacgacatcgaggccatgcgcgccggggtgctgcccccgccaccgcgccacgccagcaccggggccatgcacccactgcgcagcggcttgctcaactccacctcggactccgacctcgtgcgctaccgcaccattagcaagattccccaaatcaccctcaactttgtggacctcaagggcgaccccttcttggcttcgcccaccagtgaccgtgagatcatagcacctaagataaaggagcgaacccacaatgtcactgagaaggtcacccaggtcctgtccctgggcgccgacgtgctgcctgagtacaagctgcaggcaccgcgcatccaccgctggaccatcctgcattacagccccttcaaggccgtgtgggactggctcatcctgctgctggtcatctacacggctgtcttcacaccctactcggctgccttcctgctgaaggagacggaagaaggcccgcctgctaccgagtgtggctacgcctgccagccgctggctgtggtggacctcatcgtggacatcatgttcattgtggacatcctcatcaacttccgcaccacctacgtcaatgccaacgaggaggtggtcagccaccccggccgcatcgccgtccactacttcaagggctggttcctcatcgacatggtggccgccatccccttcgacctgctcatcttcggctctggctctgaggagctgatcgggctgctgaagactgcgcggctgctgcggctggtgcgcgtggcgcggaagctggatcgctactcagagtacggcgcggccgtgctgttcttgctcatgtgcacctttgcgctcatcgcgcactggctagcctgcatctggtacgccatcggcaacatggagcagccacacatggactcacgcatcggctggctgcacaacctgggcgaccagataggcaaaccctacaacagcagcggcctgggcggcccctccatcaaggacgagtatgtgacggcgctctacttcaccttcagcagcctcaccagtgtgggcttcggcaacgtctctcccaacaccaactcagagaagatcttctccatctgcgtcatgctcattggctccctcatgtatgctagcatcttcggcaacgtgtcggccatcatccagcggctgtactcgggcacagcccgctaccacacacagatgctgcgggtgcgggagttcatccgcttccaccagatccccaatcccctgcgccagcgcctcgaggagtacttccagcacgcctggtcctacaccaacggcatcgacatgaacgcggtgctgaagggcttccctgagtgcctgcaggctgacatctgcctgcacctgaaccgctcactgctgcagcactgcaaacccttccgaggggccaccaagggctgccttcgggccctggccatgaagttcaagaccacacatgcaccgccaggggacacactggtgcatgctggggacctgctcaccgccctgtacttcatctcccggggctccatcgagatcctgcggggcgacgtcgtcgtggccatcctggggaagaatgacatctttggggagcctctgaacctgtatgcaaggcctggcaagtcgaacggggatgtgcgggccctcacctactgtgacctacacaagatccatcgggacgacctgctggaggtgctggacatgtaccctgagttctccgaccacttctggtccagcctggagatcaccttcaacctgcgagataccaacatgatcccgggctcccccggcagtacggagttagagggtggcttcagtcggcaacgcaagcgcaagttgtccttccgcaggcgcacggacaaggacacggagcagccaggggaggtgtcggccttggggccgggccgggcgggggcagggccgagtagccggggccggccgggggggccgtggggggagagcccgtccagtggcccctccagccctgagagcagtgaggatgagggcccaggccgcagctccagccccctccgcctggtgcccttctccagccccaggccccccggagagccgccgggtggggagcccctgatggaggactgcgagaagagcagcgacacttgcaaccccctgtcaggcgccttctcaggagtgtccaacattttcagcttctggggggacagtcggggccgccagtaccaggagctccctcgatgccccgcccccacccccagcctcctcaacatccccctctccagcccgggtcggcggccccggggcgacgtggagagcaggctggatgccctccagcgccagctcaacaggctggagacccggctgagtgcagacatggccactgtcctgcagctgctacagaggcagatgacgctggtcccgcccgcctacagtgctgtgaccaccccggggcctggccccacttccacatccccgctgttgcccgtcagccccctccccaccctcaccttggactcgctttctcaggtttcccagttcatggcgtgtgaggagctgcccccgggggccccagagcttccccaagaaggccccacacgacgcctctccctaccgggccagctgggggccctcacctcccagcccctgcacagacacggctcggacccgggcagttagtggggctgcccagtgtggacacgtggctcacccagggatcaaggcgctgctgggccgctccccttggaggccctgctcaggaggccctgaccgtggaaggggagaggaactcgaaagcacagctcctcccccagcccttgggaccatcttctcctgcagtcccctgggccccagtgagaggggcaggggcagggccggcagtaggtggggcctgtggtccccccactgccctgagggcattagctggtctaactgcccggaggcacccggccctgggccttaggcacctcaaggacttttctgctatttactgctcttattgttaaggataataattaaggatcatatgaataattaatgaagatgctgatgactatgaataataaataattatcctgaggaga

SEQ ID NO: 292 - DNA, 3884 bp, Homo sapiens
  source 1..3884: mol_type = genomic DNA
  misc_feature 1..3884: note = cDNA of KCNH2 gene SNP c.1831T>C (p.Tyr611His)
atgccggtgcggaggggccacgtcgcgccgcagaacaccttcctggacaccatcatccgcaagtttgagggccagagccgtaagttcatcatcgccaacgctcgggtggagaactgcgccgtcatctactgcaacgacggcttctgcgagctgtgcggctactcgcgggccgaggtgatgcagcgaccctgcacctgcgacttcctgcacgggccgcgcacgcagcgccgcgctgccgcgcagatcgcgcaggcactgctgggcgccgaggagcgcaaagtggaaatcgccttctaccggaaagatgggagctgcttcctatgtctggtggatgtggtgcccgtgaagaacgaggatggggctgtcatcatgttcatcctcaatttcgaggtggtgatggagaaggacatggtggggtccccggctcatgacaccaaccaccggggcccccccaccagctggctggccccaggccgcgccaagaccttccgcctgaagctgcccgcgctgctggcgctgacggcccgggagtcgtcggtgcggtcgggcggcgcgggcggcgcgggcgccccgggggccgtggtggtggacgtggacctgacgcccgcggcacccagcagcgagtcgctggccctggacgaagtgacagccatggacaaccacgtggcagggctcgggcccgcggaggagcggcgtgcgctggtgggtcccggctctccgccccgcagcgcgcccggccagctcccatcgccccgggcgcacagcctcaaccccgacgcctcgggctccagctgcagcctggcccggacgcgctcccgagaaagctgcgccagcgtgcgccgcgcctcgtcggccgacgacatcgaggccatgcgcgccggggtgctgcccccgccaccgcgccacgccagcaccggggccatgcacccactgcgcagcggcttgctcaactccacctcggactccgacctcgtgcgctaccgcaccattagcaagattccccaaatcaccctcaactttgtggacctcaagggcgaccccttcttggcttcgcccaccagtgaccgtgagatcatagcacctaagataaaggagcgaacccacaatgtcactgagaaggtcacccaggtcctgtccctgggcgccgacgtgctgcctgagtacaagctgcaggcaccgcgcatccaccgctggaccatcctgcattacagccccttcaaggccgtgtgggactggctcatcctgctgctggtcatctacacggctgtcttcacaccctactcggctgccttcctgctgaaggagacggaagaaggcccgcctgctaccgagtgtggctacgcctgccagccgctggctgtggtggacctcatcgtggacatcatgttcattgtggacatcctcatcaacttccgcaccacctacgtcaatgccaacgaggaggtggtcagccaccccggccgcatcgccgtccactacttcaagggctggttcctcatcgacatggtggccgccatccccttcgacctgctcatcttcggctctggctctgaggagctgatcgggctgctgaagactgcgcggctgctgcggctggtgcgcgtggcgcggaagctggatcgctactcagagtacggcgcggccgtgctgttcttgctcatgtgcacctttgcgctcatcgcgcactggctagcctgcatctggtacgccatcggcaacatggagcagccacacatggactcacgcatcggctggctgcacaacctgggcgaccagataggcaaaccctacaacagcagcggcctgggcggcccctccatcaaggacaagcatgtgacggcgctctacttcaccttcagcagcctcaccagtgtgggcttcggcaacgtctctcccaacaccaactcagagaagatcttctccatctgcgtcatgctcattggctccctcatgtatgctagcatcttcggcaacgtgtcggccatcatccagcggctgtactcgggcacagcccgctaccacacacagatgctgcgggtgcgggagttcatccgcttccaccagatccccaatcccctgcgccagcgcctcgaggagtacttccagcacgcctggtcctacaccaacggcatcgacatgaacgcggtgctgaagggcttccctgagtgcctgcaggctgacatctgcctgcacctgaaccgctcactgctgcagcactgcaaacccttccgaggggccaccaagggctgccttcgggccctggccatgaagttcaagaccacacatgcaccgccaggggacacactggtgcatgctggggacctgctcaccgccctgtacttcatctcccggggctccatcgagatcctgcggggcgacgtcgtcgtggccatcctggggaagaatgacatctttggggagcctctgaacctgtatgcaaggcctggcaagtcgaacggggatgtgcgggccctcacctactgtgacctacacaagatccatcgggacgacctgctggaggtgctggacatgtaccctgagttctccgaccacttctggtccagcctggagatcaccttcaacctgcgagataccaacatgatcccgggctcccccggcagtacggagttagagggtggcttcagtcggcaacgcaagcgcaagttgtccttccgcaggcgcacggacaaggacacggagcagccaggggaggtgtcggccttggggccgggccgggcgggggcagggccgagtagccggggccggccgggggggccgtggggggagagcccgtccagtggcccctccagccctgagagcagtgaggatgagggcccaggccgcagctccagccccctccgcctggtgcccttctccagccccaggccccccggagagccgccgggtggggagcccctgatggaggactgcgagaagagcagcgacacttgcaaccccctgtcaggcgccttctcaggagtgtccaacattttcagcttctggggggacagtcggggccgccagtaccaggagctccctcgatgccccgcccccacccccagcctcctcaacatccccctctccagcccgggtcggcggccccggggcgacgtggagagcaggctggatgccctccagcgccagctcaacaggctggagacccggctgagtgcagacatggccactgtcctgcagctgctacagaggcagatgacgctggtcccgcccgcctacagtgctgtgaccaccccggggcctggccccacttccacatccccgctgttgcccgtcagccccctccccaccctcaccttggactcgctttctcaggtttcccagttcatggcgtgtgaggagctgcccccgggggccccagagcttccccaagaaggccccacacgacgcctctccctaccgggccagctgggggccctcacctcccagcccctgcacagacacggctcggacccgggcagttagtggggctgcccagtgtggacacgtggctcacccagggatcaaggcgctgctgggccgctccccttggaggccctgctcaggaggccctgaccgtggaaggggagaggaactcgaaagcacagctcctcccccagcccttgggaccatcttctcctgcagtcccctgggccccagtgagaggggcaggggcagggccggcagtaggtggggcctgtggtccccccactgccctgagggcattagctggtctaactgcccggaggcacccggccctgggccttaggcacctcaaggacttttctgctatttactgctcttattgttaaggataataattaaggatcatatgaataattaatgaagatgctgatgactatgaataataaataattatcctgaggaga

SEQ ID NO: 293 - DNA, 3884 bp, Homo sapiens
  source 1..3884: mol_type = genomic DNA
  misc_feature 1..3884: note = cDNA of KCNH2 gene SNP c.1831T>G (p.Tyr611Asp)
atgccggtgcggaggggccacgtcgcgccgcagaacaccttcctggacaccatcatccgcaagtttgagggccagagccgtaagttcatcatcgccaacgctcgggtggagaactgcgccgtcatctactgcaacgacggcttctgcgagctgtgcggctactcgcgggccgaggtgatgcagcgaccctgcacctgcgacttcctgcacgggccgcgcacgcagcgccgcgctgccgcgcagatcgcgcaggcactgctgggcgccgaggagcgcaaagtggaaatcgccttctaccggaaagatgggagctgcttcctatgtctggtggatgtggtgcccgtgaagaacgaggatggggctgtcatcatgttcatcctcaatttcgaggtggtgatggagaaggacatggtggggtccccggctcatgacaccaaccaccggggcccccccaccagctggctggccccaggccgcgccaagaccttccgcctgaagctgcccgcgctgctggcgctgacggcccgggagtcgtcggtgcggtcgggcggcgcgggcggcgcgggcgccccgggggccgtggtggtggacgtggacctgacgcccgcggcacccagcagcgagtcgctggccctggacgaagtgacagccatggacaaccacgtggcagggctcgggcccgcggaggagcggcgtgcgctggtgggtcccggctctccgccccgcagcgcgcccggccagctcccatcgccccgggcgcacagcctcaaccccgacgcctcgggctccagctgcagcctggcccggacgcgctcccgagaaagctgcgccagcgtgcgccgcgcctcgtcggccgacgacatcgaggccatgcgcgccggggtgctgcccccgccaccgcgccacgccagcaccggggccatgcacccactgcgcagcggcttgctcaactccacctcggactccgacctcgtgcgctaccgcaccattagcaagattccccaaatcaccctcaactttgtggacctcaagggcgaccccttcttggcttcgcccaccagtgaccgtgagatcatagcacctaagataaaggagcgaacccacaatgtcactgagaaggtcacccaggtcctgtccctgggcgccgacgtgctgcctgagtacaagctgcaggcaccgcgcatccaccgctggaccatcctgcattacagccccttcaaggccgtgtgggactggctcatcctgctgctggtcatctacacggctgtcttcacaccctactcggctgccttcctgctgaaggagacggaagaaggcccgcctgctaccgagtgtggctacgcctgccagccgctggctgtggtggacctcatcgtggacatcatgttcattgtggacatcctcatcaacttccgcaccacctacgtcaatgccaacgaggaggtggtcagccaccccggccgcatcgccgtccactacttcaagggctggttcctcatcgacatggtggccgccatccccttcgacctgctcatcttcggctctggctctgaggagctgatcgggctgctgaagactgcgcggctgctgcggctggtgcgcgtggcgcggaagctggatcgctactcagagtacggcgcggccgtgctgttcttgctcatgtgcacctttgcgctcatcgcgcactggctagcctgcatctggtacgccatcggcaacatggagcagccacacatggactcacgcatcggctggctgcacaacctgggcgaccagataggcaaaccctacaacagcagcggcctgggcggcccctccatcaaggacaaggatgtgacggcgctctacttcaccttcagcagcctcaccagtgtgggcttcggcaacgtctctcccaacaccaactcagagaagatcttctccatctgcgtcatgctcattggctccctcatgtatgctagcatcttcggcaacgtgtcggccatcatccagcggctgtactcgggcacagcccgctaccacacacagatgctgcgggtgcgggagttcatccgcttccaccagatccccaatcccctgcgccagcgcctcgaggagtacttccagcacgcctggtcctacaccaacggcatcgacatgaacgcggtgctgaagggcttccctgagtgcctgcaggctgacatctgcctgcacctgaaccgctcactgctgcagcactgcaaacccttccgaggggccaccaagggctgccttcgggccctggccatgaagttcaagaccacacatgcaccgccaggggacacactggtgcatgctggggacctgctcaccgccctgtacttcatctcccggggctccatcgagatcctgcggggcgacgtcgtcgtggccatcctggggaagaatgacatctttggggagcctctgaacctgtatgcaaggcctggcaagtcgaacggggatgtgcgggccctcacctactgtgacctacacaagatccatcgggacgacctgctggaggtgctggacatgtaccctgagttctccgaccacttctggtccagcctggagatcaccttcaacctgcgagataccaacatgatcccgggctcccccggcagtacggagttagagggtggcttcagtcggcaacgcaagcgcaagttgtccttccgcaggcgcacggacaaggacacggagcagccaggggaggtgtcggccttggggccgggccgggcgggggcagggccgagtagccggggccggccgggggggccgtggggggagagcccgtccagtggcccctccagccctgagagcagtgaggatgagggcccaggccgcagctccagccccctccgcctggtgcccttctccagccccaggccccccggagagccgccgggtggggagcccctgatggaggactgcgagaagagcagcgacacttgcaaccccctgtcaggcgccttctcaggagtgtccaacattttcagcttctggggggacagtcggggccgccagtaccaggagctccctcgatgccccgcccccacccccagcctcctcaacatccccctctccagcccgggtcggcggccccggggcgacgtggagagcaggctggatgccctccagcgccagctcaacaggctggagacccggctgagtgcagacatggccactgtcctgcagctgctacagaggcagatgacgctggtcccgcccgcctacagtgctgtgaccaccccggggcctggccccacttccacatccccgctgttgcccgtcagccccctccccaccctcaccttggactcgctttctcaggtttcccagttcatggcgtgtgaggagctgcccccgggggccccagagcttccccaagaaggccccacacgacgcctctccctaccgggccagctgggggccctcacctcccagcccctgcacagacacggctcggacccgggcagttagtggggctgcccagtgtggacacgtggctcacccagggatcaaggcgctgctgggccgctccccttggaggccctgctcaggaggccctgaccgtggaaggggagaggaactcgaaagcacagctcctcccccagcccttgggaccatcttctcctgcagtcccctgggccccagtgagaggggcaggggcagggccggcagtaggtggggcctgtggtccccccactgccctgagggcattagctggtctaactgcccggaggcacccggccctgggccttaggcacctcaaggacttttctgctatttactgctcttattgttaaggataataattaaggatcatatgaataattaatgaagatgctgatgactatgaataataaataattatcctgaggaga

SEQ ID NO: 294 - DNA, 3884 bp, Homo sapiens
  source 1..3884: mol_type = genomic DNA
  misc_feature 1..3884: note = cDNA of KCNH2 gene SNP c.1832A>G (p.Tyr611Cys)
atgccggtgcggaggggccacgtcgcgccgcagaacaccttcctggacaccatcatccgcaagtttgagggccagagccgtaagttcatcatcgccaacgctcgggtggagaactgcgccgtcatctactgcaacgacggcttctgcgagctgtgcggctactcgcgggccgaggtgatgcagcgaccctgcacctgcgacttcctgcacgggccgcgcacgcagcgccgcgctgccgcgcagatcgcgcaggcactgctgggcgccgaggagcgcaaagtggaaatcgccttctaccggaaagatgggagctgcttcctatgtctggtggatgtggtgcccgtgaagaacgaggatggggctgtcatcatgttcatcctcaatttcgaggtggtgatggagaaggacatggtggggtccccggctcatgacaccaaccaccggggcccccccaccagctggctggccccaggccgcgccaagaccttccgcctgaagctgcccgcgctgctggcgctgacggcccgggagtcgtcggtgcggtcgggcggcgcgggcggcgcgggcgccccgggggccgtggtggtggacgtggacctgacgcccgcggcacccagcagcgagtcgctggccctggacgaagtgacagccatggacaaccacgtggcagggctcgggcccgcggaggagcggcgtgcgctggtgggtcccggctctccgccccgcagcgcgcccggccagctcccatcgccccgggcgcacagcctcaaccccgacgcctcgggctccagctgcagcctggcccggacgcgctcccgagaaagctgcgccagcgtgcgccgcgcctcgtcggccgacgacatcgaggccatgcgcgccggggtgctgcccccgccaccgcgccacgccagcaccggggccatgcacccactgcgcagcggcttgctcaactccacctcggactccgacctcgtgcgctaccgcaccattagcaagattccccaaatcaccctcaactttgtggacctcaagggcgaccccttcttggcttcgcccaccagtgaccgtgagatcatagcacctaagataaaggagcgaacccacaatgtcactgagaaggtcacccaggtcctgtccctgggcgccgacgtgctgcctgagtacaagctgcaggcaccgcgcatccaccgctggaccatcctgcattacagccccttcaaggccgtgtgggactggctcatcctgctgctggtcatctacacggctgtcttcacaccctactcggctgccttcctgctgaaggagacggaagaaggcccgcctgctaccgagtgtggctacgcctgccagccgctggctgtggtggacctcatcgtggacatcatgttcattgtggacatcctcatcaacttccgcaccacctacgtcaatgccaacgaggaggtggtcagccaccccggccgcatcgccgtccactacttcaagggctggttcctcatcgacatggtggccgccatccccttcgacctgctcatcttcggctctggctctgaggagctgatcgggctgctgaagactgcgcggctgctgcggctggtgcgcgtggcgcggaagctggatcgctactcagagtacggcgcggccgtgctgttcttgctcatgtgcacctttgcgctcatcgcgcactggctagcctgcatctggtacgccatcggcaacatggagcagccacacatggactcacgcatcggctggctgcacaacctgggcgaccagataggcaaaccctacaacagcagcggcctgggcggcccctccatcaaggacaagtgtgtgacggcgctctacttcaccttcagcagcctcaccagtgtgggcttcggcaacgtctctcccaacaccaactcagagaagatcttctccatctgcgtcatgctcattggctccctcatgtatgctagcatcttcggcaacgtgtcggccatcatccagcggctgtactcgggcacagcccgctaccacacacagatgctgcgggtgcgggagttcatccgcttccaccagatccccaatcccctgcgccagcgcctcgaggagtacttccagcacgcctggtcctacaccaacggcatcgacatgaacgcggtgctgaagggcttccctgagtgcctgcaggctgacatctgcctgcacctgaaccgctcactgctgcagcactgcaaacccttccgaggggccaccaagggctgccttcgggccctggccatgaagttcaagaccacacatgcaccgccaggggacacactggtgcatgctggggacctgctcaccgccctgtacttcatctcccggggctccatcgagatcctgcggggcgacgtcgtcgtggccatcctggggaagaatgacatctttggggagcctctgaacctgtatgcaaggcctggcaagtcgaacggggatgtgcgggccctcacctactgtgacctacacaagatccatcgggacgacctgctggaggtgctggacatgtaccctgagttctccgaccacttctggtccagcctggagatcaccttcaacctgcgagataccaacatgatcccgggctcccccggcagtacggagttagagggtggcttcagtcggcaacgcaagcgcaagttgtccttccgcaggcgcacggacaaggacacggagcagccaggggaggtgtcggccttggggccgggccgggcgggggcagggccgagtagccggggccggccgggggggccgtggggggagagcccgtccagtggcccctccagccctgagagcagtgaggatgagggcccaggccgcagctccagccccctccgcctggtgcccttctccagccccaggccccccggagagccgccgggtggggagcccctgatggaggactgcgagaagagcagcgacacttgcaaccccctgtcaggcgccttctcaggagtgtccaacattttcagcttctggggggacagtcggggccgccagtaccaggagctccctcgatgccccgcccccacccccagcctcctcaacatccccctctccagcccgggtcggcggccccggggcgacgtggagagcaggctggatgccctccagcgccagctcaacaggctggagacccggctgagtgcagacatggccactgtcctgcagctgctacagaggcagatgacgctggtcccgcccgcctacagtgctgtgaccaccccggggcctggccccacttccacatccccgctgttgcccgtcagccccctccccaccctcaccttggactcgctttctcaggtttcccagttcatggcgtgtgaggagctgcccccgggggccccagagcttccccaagaaggccccacacgacgcctctccctaccgggccagctgggggccctcacctcccagcccctgcacagacacggctcggacccgggcagttagtggggctgcccagtgtggacacgtggctcacccagggatcaaggcgctgctgggccgctccccttggaggccctgctcaggaggccctgaccgtggaaggggagaggaactcgaaagcacagctcctcccccagcccttgggaccatcttctcctgcagtcccctgggccccagtgagaggggcaggggcagggccggcagtaggtggggcctgtggtccccccactgccctgagggcattagctggtctaactgcccggaggcacccggccctgggccttaggcacctcaaggacttttctgctatttactgctcttattgttaaggataataattaaggatcatatgaataattaatgaagatgctgatgactatgaataataaataattatcctgaggaga

SEQ ID NO: 295 - DNA, 3884 bp, Homo sapiens
  source 1..3884: mol_type = genomic DNA
  misc_feature 1..3884: note = cDNA of KCNH2 gene SNP c.1834G>T (p.Val612Leu)
atgccggtgcggaggggccacgtcgcgccgcagaacaccttcctggacaccatcatccgcaagtttgagggccagagccgtaagttcatcatcgccaacgctcgggtggagaactgcgccgtcatctactgcaacgacggcttctgcgagctgtgcggctactcgcgggccgaggtgatgcagcgaccctgcacctgcgacttcctgcacgggccgcgcacgcagcgccgcgctgccgcgcagatcgcgcaggcactgctgggcgccgaggagcgcaaagtggaaatcgccttctaccggaaagatgggagctgcttcctatgtctggtggatgtggtgcccgtgaagaacgaggatggggctgtcatcatgttcatcctcaatttcgaggtggtgatggagaaggacatggtggggtccccggctcatgacaccaaccaccggggcccccccaccagctggctggccccaggccgcgccaagaccttccgcctgaagctgcccgcgctgctggcgctgacggcccgggagtcgtcggtgcggtcgggcggcgcgggcggcgcgggcgccccgggggccgtggtggtggacgtggacctgacgcccgcggcacccagcagcgagtcgctggccctggacgaagtgacagccatggacaaccacgtggcagggctcgggcccgcggaggagcggcgtgcgctggtgggtcccggctctccgccccgcagcgcgcccggccagctcccatcgccccgggcgcacagcctcaaccccgacgcctcgggctccagctgcagcctggcccggacgcgctcccgagaaagctgcgccagcgtgcgccgcgcctcgtcggccgacgacatcgaggccatgcgcgccggggtgctgcccccgccaccgcgccacgccagcaccggggccatgcacccactgcgcagcggcttgctcaactccacctcggactccgacctcgtgcgctaccgcaccattagcaagattccccaaatcaccctcaactttgtggacctcaagggcgaccccttcttggcttcgcccaccagtgaccgtgagatcatagcacctaagataaaggagcgaacccacaatgtcactgagaaggtcacccaggtcctgtccctgggcgccgacgtgctgcctgagtacaagctgcaggcaccgcgcatccaccgctggaccatcctgcattacagccccttcaaggccgtgtgggactggctcatcctgctgctggtcatctacacggctgtcttcacaccctactcggctgccttcctgctgaaggagacggaagaaggcccgcctgctaccgagtgtggctacgcctgccagccgctggctgtggtggacctcatcgtggacatcatgttcattgtggacatcctcatcaacttccgcaccacctacgtcaatgccaacgaggaggtggtcagccaccccggccgcatcgccgtccactacttcaagggctggttcctcatcgacatggtggccgccatccccttcgacctgctcatcttcggctctggctctgaggagctgatcgggctgctgaagactgcgcggctgctgcggctggtgcgcgtggcgcggaagctggatcgctactcagagtacggcgcggccgtgctgttcttgctcatgtgcacctttgcgctcatcgcgcactggctagcctgcatctggtacgccatcggcaacatggagcagccacacatggactcacgcatcggctggctgcacaacctgggcgaccagataggcaaaccctacaacagcagcggcctgggcggcccctccatcaaggacaagtatttgacggcgctctacttcaccttcagcagcctcaccagtgtgggcttcggcaacgtctctcccaacaccaactcagagaagatcttctccatctgcgtcatgctcattggctccctcatgtatgctagcatcttcggcaacgtgtcggccatcatccagcggctgtactcgggcacagcccgctaccacacacagatgctgcgggtgcgggagttcatccgcttccaccagatccccaatcccctgcgccagcgcctcgaggagtacttccagcacgcctggtcctacaccaacggcatcgacatgaacgcggtgctgaagggcttccctgagtgcctgcaggctgacatctgcctgcacctgaaccgctcactgctgcagcactgcaaacccttccgaggggccaccaagggctgccttcgggccctggccatgaagttcaagaccacacatgcaccgccaggggacacactggtgcatgctggggacctgctcaccgccctgtacttcatctcccggggctccatcgagatcctgcggggcgacgtcgtcgtggccatcctggggaagaatgacatctttggggagcctctgaacctgtatgcaaggcctggcaagtcgaacggggatgtgcgggccctcacctactgtgacctacacaagatccatcgggacgacctgctggaggtgctggacatgtaccctgagttctccgaccacttctggtccagcctggagatcaccttcaacctgcgagataccaacatgatcccgggctcccccggcagtacggagttagagggtggcttcagtcggcaacgcaagcgcaagttgtccttccgcaggcgcacggacaaggacacggagcagccaggggaggtgtcggccttggggccgggccgggcgggggcagggccgagtagccggggccggccgggggggccgtggggggagagcccgtccagtggcccctccagccctgagagcagtgaggatgagggcccaggccgcagctccagccccctccgcctggtgcccttctccagccccaggccccccggagagccgccgggtggggagcccctgatggaggactgcgagaagagcagcgacacttgcaaccccctgtcaggcgccttctcaggagtgtccaacattttcagcttctggggggacagtcggggccgccagtaccaggagctccctcgatgccccgcccccacccccagcctcctcaacatccccctctccagcccgggtcggcggccccggggcgacgtggagagcaggctggatgccctccagcgccagctcaacaggctggagacccggctgagtgcagacatggccactgtcctgcagctgctacagaggcagatgacgctggtcccgcccgcctacagtgctgtgaccaccccggggcctggccccacttccacatccccgctgttgcccgtcagccccctccccaccctcaccttggactcgctttctcaggtttcccagttcatggcgtgtgaggagctgcccccgggggccccagagcttccccaagaaggccccacacgacgcctctccctaccgggccagctgggggccctcacctcccagcccctgcacagacacggctcggacccgggcagttagtggggctgcccagtgtggacacgtggctcacccagggatcaaggcgctgctgggccgctccccttggaggccctgctcaggaggccctgaccgtggaaggggagaggaactcgaaagcacagctcctcccccagcccttgggaccatcttctcctgcagtcccctgggccccagtgagaggggcaggggcagggccggcagtaggtggggcctgtggtccccccactgccctgagggcattagctggtctaactgcccggaggcacccggccctgggccttaggcacctcaaggacttttctgctatttactgctcttattgttaaggataataattaaggatcatatgaataattaatgaagatgctgatgactatgaataataaataattatcctgaggaga

SEQ ID NO: 296 - DNA, 3884 bp, Homo sapiens
  source 1..3884: mol_type = genomic DNA
  misc_feature 1..3884: note = cDNA of KCNH2 gene SNP c.1837A>T (p.Thr613Ser)
atgccggtgcggaggggccacgtcgcgccgcagaacaccttcctggacaccatcatccgcaagtttgagggccagagccgtaagttcatcatcgccaacgctcgggtggagaactgcgccgtcatctactgcaacgacggcttctgcgagctgtgcggctactcgcgggccgaggtgatgcagcgaccctgcacctgcgacttcctgcacgggccgcgcacgcagcgccgcgctgccgcgcagatcgcgcaggcactgctgggcgccgaggagcgcaaagtggaaatcgccttctaccggaaagatgggagctgcttcctatgtctggtggatgtggtgcccgtgaagaacgaggatggggctgtcatcatgttcatcctcaatttcgaggtggtgatggagaaggacatggtggggtccccggctcatgacaccaaccaccggggcccccccaccagctggctggccccaggccgcgccaagaccttccgcctgaagctgcccgcgctgctggcgctgacggcccgggagtcgtcggtgcggtcgggcggcgcgggcggcgcgggcgccccgggggccgtggtggtggacgtggacctgacgcccgcggcacccagcagcgagtcgctggccctggacgaagtgacagccatggacaaccacgtggcagggctcgggcccgcggaggagcggcgtgcgctggtgggtcccggctctccgccccgcagcgcgcccggccagctcccatcgccccgggcgcacagcctcaaccccgacgcctcgggctccagctgcagcctggcccggacgcgctcccgagaaagctgcgccagcgtgcgccgcgcctcgtcggccgacgacatcgaggccatgcgcgccggggtgctgcccccgccaccgcgccacgccagcaccggggccatgcacccactgcgcagcggcttgctcaactccacctcggactccgacctcgtgcgctaccgcaccattagcaagattccccaaatcaccctcaactttgtggacctcaagggcgaccccttcttggcttcgcccaccagtgaccgtgagatcatagcacctaagataaaggagcgaacccacaatgtcactgagaaggtcacccaggtcctgtccctgggcgccgacgtgctgcctgagtacaagctgcaggcaccgcgcatccaccgctggaccatcctgcattacagccccttcaaggccgtgtgggactggctcatcctgctgctggtcatctacacggctgtcttcacaccctactcggctgccttcctgctgaaggagacggaagaaggcccgcctgctaccgagtgtggctacgcctgccagccgctggctgtggtggacctcatcgtggacatcatgttcattgtggacatcctcatcaacttccgcaccacctacgtcaatgccaacgaggaggtggtcagccaccccggccgcatcgccgtccactacttcaagggctggttcctcatcgacatggtggccgccatccccttcgacctgctcatcttcggctctggctctgaggagctgatcgggctgctgaagactgcgcggctgctgcggctggtgcgcgtggcgcggaagctggatcgctactcagagtacggcgcggccgtgctgttcttgctcatgtgcacctttgcgctcatcgcgcactggctagcctgcatctggtacgccatcggcaacatggagcagccacacatggactcacgcatcggctggctgcacaacctgggcgaccagataggcaaaccctacaacagcagcggcctgggcggcccctccatcaaggacaagtatgtgtcggcgctctacttcaccttcagcagcctcaccagtgtgggcttcggcaacgtctctcccaacaccaactcagagaagatcttctccatctgcgtcatgctcattggctccctcatgtatgctagcatcttcggcaacgtgtcggccatcatccagcggctgtactcgggcacagcccgctaccacacacagatgctgcgggtgcgggagttcatccgcttccaccagatccccaatcccctgcgccagcgcctcgaggagtacttccagcacgcctggtcctacaccaacggcatcgacatgaacgcggtgctgaagggcttccctgagtgcctgcaggctgacatctgcctgcacctgaaccgctcactgctgcagcactgcaaacccttccgaggggccaccaagggctgccttcgggccctggccatgaagttcaagaccacacatgcaccgccaggggacacactggtgcatgctggggacctgctcaccgccctgtacttcatctcccggggctccatcgagatcctgcggggcgacgtcgtcgtggccatcctggggaagaatgacatctttggggagcctctgaacctgtatgcaaggcctggcaagtcgaacggggatgtgcgggccctcacctactgtgacctacacaagatccatcgggacgacctgctggaggtgctggacatgtaccctgagttctccgaccacttctggtccagcctggagatcaccttcaacctgcgagataccaacatgatcccgggctcccccggcagtacggagttagagggtggcttcagtcggcaacgcaagcgcaagttgtccttccgcaggcgcacggacaaggacacggagcagccaggggaggtgtcggccttggggccgggccgggcgggggcagggccgagtagccggggccggccgggggggccgtggggggagagcccgtccagtggcccctccagccctgagagcagtgaggatgagggcccaggccgcagctccagccccctccgcctggtgcccttctccagccccaggccccccggagagccgccgggtggggagcccctgatggaggactgcgagaagagcagcgacacttgcaaccccctgtcaggcgccttctcaggagtgtccaacattttcagcttctggggggacagtcggggccgccagtaccaggagctccctcgatgccccgcccccacccccagcctcctcaacatccccctctccagcccgggtcggcggccccggggcgacgtggagagcaggctggatgccctccagcgccagctcaacaggctggagacccggctgagtgcagacatggccactgtcctgcagctgctacagaggcagatgacgctggtcccgcccgcctacagtgctgtgaccaccccggggcctggccccacttccacatccccgctgttgcccgtcagccccctccccaccctcaccttggactcgctttctcaggtttcccagttcatggcgtgtgaggagctgcccccgggggccccagagcttccccaagaaggccccacacgacgcctctccctaccgggccagctgggggccctcacctcccagcccctgcacagacacggctcggacccgggcagttagtggggctgcccagtgtggacacgtggctcacccagggatcaaggcgctgctgggccgctccccttggaggccctgctcaggaggccctgaccgtggaaggggagaggaactcgaaagcacagctcctcccccagcccttgggaccatcttctcctgcagtcccctgggccccagtgagaggggcaggggcagggccggcagtaggtggggcctgtggtccccccactgccctgagggcattagctggtctaactgcccggaggcacccggccctgggccttaggcacctcaaggacttttctgctatttactgctcttattgttaaggataataattaaggatcatatgaataattaatgaagatgctgatgactatgaataataaataattatcctgaggaga

SEQ ID NO: 297 - DNA, 3884 bp, Homo sapiens
  source 1..3884: mol_type = genomic DNA
  misc_feature 1..3884: note = cDNA of KCNH2 gene SNP c.1838C>T (p.Thr613Met)
atgccggtgcggaggggccacgtcgcgccgcagaacaccttcctggacaccatcatccgcaagtttgagggccagagccgtaagttcatcatcgccaacgctcgggtggagaactgcgccgtcatctactgcaacgacggcttctgcgagctgtgcggctactcgcgggccgaggtgatgcagcgaccctgcacctgcgacttcctgcacgggccgcgcacgcagcgccgcgctgccgcgcagatcgcgcaggcactgctgggcgccgaggagcgcaaagtggaaatcgccttctaccggaaagatgggagctgcttcctatgtctggtggatgtggtgcccgtgaagaacgaggatggggctgtcatcatgttcatcctcaatttcgaggtggtgatggagaaggacatggtggggtccccggctcatgacaccaaccaccggggcccccccaccagctggctggccccaggccgcgccaagaccttccgcctgaagctgcccgcgctgctggcgctgacggcccgggagtcgtcggtgcggtcgggcggcgcgggcggcgcgggcgccccgggggccgtggtggtggacgtggacctgacgcccgcggcacccagcagcgagtcgctggccctggacgaagtgacagccatggacaaccacgtggcagggctcgggcccgcggaggagcggcgtgcgctggtgggtcccggctctccgccccgcagcgcgcccggccagctcccatcgccccgggcgcacagcctcaaccccgacgcctcgggctccagctgcagcctggcccggacgcgctcccgagaaagctgcgccagcgtgcgccgcgcctcgtcggccgacgacatcgaggccatgcgcgccggggtgctgcccccgccaccgcgccacgccagcaccggggccatgcacccactgcgcagcggcttgctcaactccacctcggactccgacctcgtgcgctaccgcaccattagcaagattccccaaatcaccctcaactttgtggacctcaagggcgaccccttcttggcttcgcccaccagtgaccgtgagatcatagcacctaagataaaggagcgaacccacaatgtcactgagaaggtcacccaggtcctgtccctgggcgccgacgtgctgcctgagtacaagctgcaggcaccgcgcatccaccgctggaccatcctgcattacagccccttcaaggccgtgtgggactggctcatcctgctgctggtcatctacacggctgtcttcacaccctactcggctgccttcctgctgaaggagacggaagaaggcccgcctgctaccgagtgtggctacgcctgccagccgctggctgtggtggacctcatcgtggacatcatgttcattgtggacatcctcatcaacttccgcaccacctacgtcaatgccaacgaggaggtggtcagccaccccggccgcatcgccgtccactacttcaagggctggttcctcatcgacatggtggccgccatccccttcgacctgctcatcttcggctctggctctgaggagctgatcgggctgctgaagactgcgcggctgctgcggctggtgcgcgtggcgcggaagctggatcgctactcagagtacggcgcggccgtgctgttcttgctcatgtgcacctttgcgctcatcgcgcactggctagcctgcatctggtacgccatcggcaacatggagcagccacacatggactcacgcatcggctggctgcacaacctgggcgaccagataggcaaaccctacaacagcagcggcctgggcggcccctccatcaaggacaagtatgtgatggcgctctacttcaccttcagcagcctcaccagtgtgggcttcggcaacgtctctcccaacaccaactcagagaagatcttctccatctgcgtcatgctcattggctccctcatgtatgctagcatcttcggcaacgtgtcggccatcatccagcggctgtactcgggcacagcccgctaccacacacagatgctgcgggtgcgggagttcatccgcttccaccagatccccaatcccctgcgccagcgcctcgaggagtacttccagcacgcctggtcctacaccaacggcatcgacatgaacgcggtgctgaagggcttccctgagtgcctgcaggctgacatctgcctgcacctgaaccgctcactgctgcagcactgcaaacccttccgaggggccaccaagggctgccttcgggccctggccatgaagttcaagaccacacatgcaccgccaggggacacactggtgcatgctggggacctgctcaccgccctgtacttcatctcccggggctccatcgagatcctgcggggcgacgtcgtcgtggccatcctggggaagaatgacatctttggggagcctctgaacctgtatgcaaggcctggcaagtcgaacggggatgtgcgggccctcacctactgtgacctacacaagatccatcgggacgacctgctggaggtgctggacatgtaccctgagttctccgaccacttctggtccagcctggagatcaccttcaacctgcgagataccaacatgatcccgggctcccccggcagtacggagttagagggtggcttcagtcggcaacgcaagcgcaagttgtccttccgcaggcgcacggacaaggacacggagcagccaggggaggtgtcggccttggggccgggccgggcgggggcagggccgagtagccggggccggccgggggggccgtggggggagagcccgtccagtggcccctccagccctgagagcagtgaggatgagggcccaggccgcagctccagccccctccgcctggtgcccttctccagccccaggccccccggagagccgccgggtggggagcccctgatggaggactgcgagaagagcagcgacacttgcaaccccctgtcaggcgccttctcaggagtgtccaacattttcagcttctggggggacagtcggggccgccagtaccaggagctccctcgatgccccgcccccacccccagcctcctcaacatccccctctccagcccgggtcggcggccccggggcgacgtggagagcaggctggatgccctccagcgccagctcaacaggctggagacccggctgagtgcagacatggccactgtcctgcagctgctacagaggcagatgacgctggtcccgcccgcctacagtgctgtgaccaccccggggcctggccccacttccacatccccgctgttgcccgtcagccccctccccaccctcaccttggactcgctttctcaggtttcccagttcatggcgtgtgaggagctgcccccgggggccccagagcttccccaagaaggccccacacgacgcctctccctaccgggccagctgggggccctcacctcccagcccctgcacagacacggctcggacccgggcagttagtggggctgcccagtgtggacacgtggctcacccagggatcaaggcgctgctgggccgctccccttggaggccctgctcaggaggccctgaccgtggaaggggagaggaactcgaaagcacagctcctcccccagcccttgggaccatcttctcctgcagtcccctgggccccagtgagaggggcaggggcagggccggcagtaggtggggcctgtggtccccccactgccctgagggcattagctggtctaactgcccggaggcacccggccctgggccttaggcacctcaaggacttttctgctatttactgctcttattgttaaggataataattaaggatcatatgaataattaatgaagatgctgatgactatgaataataaataattatcctgaggaga

SEQ ID NO: 298 - DNA, 3884 bp, Homo sapiens
  source 1..3884: mol_type = genomic DNA
  misc_feature 1..3884: note = cDNA of KCNH2 gene SNP c.1841C>T (p.Ala614Val)
atgccggtgcggaggggccacgtcgcgccgcagaacaccttcctggacaccatcatccgcaagtttgagggccagagccgtaagttcatcatcgccaacgctcgggtggagaactgcgccgtcatctactgcaacgacggcttctgcgagctgtgcggctactcgcgggccgaggtgatgcagcgaccctgcacctgcgacttcctgcacgggccgcgcacgcagcgccgcgctgccgcgcagatcgcgcaggcactgctgggcgccgaggagcgcaaagtggaaatcgccttctaccggaaagatgggagctgcttcctatgtctggtggatgtggtgcccgtgaagaacgaggatggggctgtcatcatgttcatcctcaatttcgaggtggtgatggagaaggacatggtggggtccccggctcatgacaccaaccaccggggcccccccaccagctggctggccccaggccgcgccaagaccttccgcctgaagctgcccgcgctgctggcgctgacggcccgggagtcgtcggtgcggtcgggcggcgcgggcggcgcgggcgccccgggggccgtggtggtggacgtggacctgacgcccgcggcacccagcagcgagtcgctggccctggacgaagtgacagccatggacaaccacgtggcagggctcgggcccgcggaggagcggcgtgcgctggtgggtcccggctctccgccccgcagcgcgcccggccagctcccatcgccccgggcgcacagcctcaaccccgacgcctcgggctccagctgcagcctggcccggacgcgctcccgagaaagctgcgccagcgtgcgccgcgcctcgtcggccgacgacatcgaggccatgcgcgccggggtgctgcccccgccaccgcgccacgccagcaccggggccatgcacccactgcgcagcggcttgctcaactccacctcggactccgacctcgtgcgctaccgcaccattagcaagattccccaaatcaccctcaactttgtggacctcaagggcgaccccttcttggcttcgcccaccagtgaccgtgagatcatagcacctaagataaaggagcgaacccacaatgtcactgagaaggtcacccaggtcctgtccctgggcgccgacgtgctgcctgagtacaagctgcaggcaccgcgcatccaccgctggaccatcctgcattacagccccttcaaggccgtgtgggactggctcatcctgctgctggtcatctacacggctgtcttcacaccctactcggctgccttcctgctgaaggagacggaagaaggcccgcctgctaccgagtgtggctacgcctgccagccgctggctgtggtggacctcatcgtggacatcatgttcattgtggacatcctcatcaacttccgcaccacctacgtcaatgccaacgaggaggtggtcagccaccccggccgcatcgccgtccactacttcaagggctggttcctcatcgacatggtggccgccatccccttcgacctgctcatcttcggctctggctctgaggagctgatcgggctgctgaagactgcgcggctgctgcggctggtgcgcgtggcgcggaagctggatcgctactcagagtacggcgcggccgtgctgttcttgctcatgtgcacctttgcgctcatcgcgcactggctagcctgcatctggtacgccatcggcaacatggagcagccacacatggactcacgcatcggctggctgcacaacctgggcgaccagataggcaaaccctacaacagcagcggcctgggcggcccctccatcaaggacaagtatgtgacggtgctctacttcaccttcagcagcctcaccagtgtgggcttcggcaacgtctctcccaacaccaactcagagaagatcttctccatctgcgtcatgctcattggctccctcatgtatgctagcatcttcggcaacgtgtcggccatcatccagcggctgtactcgggcacagcccgctaccacacacagatgctgcgggtgcgggagttcatccgcttccaccagatccccaatcccctgcgccagcgcctcgaggagtacttccagcacgcctggtcctacaccaacggcatcgacatgaacgcggtgctgaagggcttccctgagtgcctgcaggctgacatctgcctgcacctgaaccgctcactgctgcagcactgcaaacccttccgaggggccaccaagggctgccttcgggccctggccatgaagttcaagaccacacatgcaccgccaggggacacactggtgcatgctggggacctgctcaccgccctgtacttcatctcccggggctccatcgagatcctgcggggcgacgtcgtcgtggccatcctggggaagaatgacatctttggggagcctctgaacctgtatgcaaggcctggcaagtcgaacggggatgtgcgggccctcacctactgtgacctacacaagatccatcgggacgacctgctggaggtgctggacatgtaccctgagttctccgaccacttctggtccagcctggagatcaccttcaacctgcgagataccaacatgatcccgggctcccccggcagtacggagttagagggtggcttcagtcggcaacgcaagcgcaagttgtccttccgcaggcgcacggacaaggacacggagcagccaggggaggtgtcggccttggggccgggccgggcgggggcagggccgagtagccggggccggccgggggggccgtggggggagagcccgtccagtggcccctccagccctgagagcagtgaggatgagggcccaggccgcagctccagccccctccgcctggtgcccttctccagccccaggccccccggagagccgccgggtggggagcccctgatggaggactgcgagaagagcagcgacacttgcaaccccctgtcaggcgccttctcaggagtgtccaacattttcagcttctggggggacagtcggggccgccagtaccaggagctccctcgatgccccgcccccacccccagcctcctcaacatccccctctccagcccgggtcggcggccccggggcgacgtggagagcaggctggatgccctccagcgccagctcaacaggctggagacccggctgagtgcagacatggccactgtcctgcagctgctacagaggcagatgacgctggtcccgcccgcctacagtgctgtgaccaccccggggcctggccccacttccacatccccgctgttgcccgtcagccccctccccaccctcaccttggactcgctttctcaggtttcccagttcatggcgtgtgaggagctgcccccgggggccccagagcttccccaagaaggccccacacgacgcctctccctaccgggccagctgggggccctcacctcccagcccctgcacagacacggctcggacccgggcagttagtggggctgcccagtgtggacacgtggctcacccagggatcaaggcgctgctgggccgctccccttggaggccctgctcaggaggccctgaccgtggaaggggagaggaactcgaaagcacagctcctcccccagcccttgggaccatcttctcctgcagtcccctgggccccagtgagaggggcaggggcagggccggcagtaggtggggcctgtggtccccccactgccctgagggcattagctggtctaactgcccggaggcacccggccctgggccttaggcacctcaaggacttttctgctatttactgctcttattgttaaggataataattaaggatcatatgaataattaatgaagatgctgatgactatgaataataaataattatcctgaggaga

SEQ ID NO: 299 - DNA, 3884 bp, Homo sapiens
  source 1..3884: mol_type = genomic DNA
  misc_feature 1..3884: note = cDNA of KCNH2 gene SNP c.1843C>G (p.Leu615Val)
atgccggtgcggaggggccacgtcgcgccgcagaacaccttcctggacaccatcatccgcaagtttgagggccagagccgtaagttcatcatcgccaacgctcgggtggagaactgcgccgtcatctactgcaacgacggcttctgcgagctgtgcggctactcgcgggccgaggtgatgcagcgaccctgcacctgcgacttcctgcacgggccgcgcacgcagcgccgcgctgccgcgcagatcgcgcaggcactgctgggcgccgaggagcgcaaagtggaaatcgccttctaccggaaagatgggagctgcttcctatgtctggtggatgtggtgcccgtgaagaacgaggatggggctgtcatcatgttcatcctcaatttcgaggtggtgatggagaaggacatggtggggtccccggctcatgacaccaaccaccggggcccccccaccagctggctggccccaggccgcgccaagaccttccgcctgaagctgcccgcgctgctggcgctgacggcccgggagtcgtcggtgcggtcgggcggcgcgggcggcgcgggcgccccgggggccgtggtggtggacgtggacctgacgcccgcggcacccagcagcgagtcgctggccctggacgaagtgacagccatggacaaccacgtggcagggctcgggcccgcggaggagcggcgtgcgctggtgggtcccggctctccgccccgcagcgcgcccggccagctcccatcgccccgggcgcacagcctcaaccccgacgcctcgggctccagctgcagcctggcccggacgcgctcccgagaaagctgcgccagcgtgcgccgcgcctcgtcggccgacgacatcgaggccatgcgcgccggggtgctgcccccgccaccgcgccacgccagcaccggggccatgcacccactgcgcagcggcttgctcaactccacctcggactccgacctcgtgcgctaccgcaccattagcaagattccccaaatcaccctcaactttgtggacctcaagggcgaccccttcttggcttcgcccaccagtgaccgtgagatcatagcacctaagataaaggagcgaacccacaatgtcactgagaaggtcacccaggtcctgtccctgggcgccgacgtgctgcctgagtacaagctgcaggcaccgcgcatccaccgctggaccatcctgcattacagccccttcaaggccgtgtgggactggctcatcctgctgctggtcatctacacggctgtcttcacaccctactcggctgccttcctgctgaaggagacggaagaaggcccgcctgctaccgagtgtggctacgcctgccagccgctggctgtggtggacctcatcgtggacatcatgttcattgtggacatcctcatcaacttccgcaccacctacgtcaatgccaacgaggaggtggtcagccaccccggccgcatcgccgtccactacttcaagggctggttcctcatcgacatggtggccgccatccccttcgacctgctcatcttcggctctggctctgaggagctgatcgggctgctgaagactgcgcggctgctgcggctggtgcgcgtggcgcggaagctggatcgctactcagagtacggcgcggccgtgctgttcttgctcatgtgcacctttgcgctcatcgcgcactggctagcctgcatctggtacgccatcggcaacatggagcagccacacatggactcacgcatcggctggctgcacaacctgggcgaccagataggcaaaccctacaacagcagcggcctgggcggcccctccatcaaggacaagtatgtgacggcggtctacttcaccttcagcagcctcaccagtgtgggcttcggcaacgtctctcccaacaccaactcagagaagatcttctccatctgcgtcatgctcattggctccctcatgtatgctagcatcttcggcaacgtgtcggccatcatccagcggctgtactcgggcacagcccgctaccacacacagatgctgcgggtgcgggagttcatccgcttccaccagatccccaatcccctgcgccagcgcctcgaggagtacttccagcacgcctggtcctacaccaacggcatcgacatgaacgcggtgctgaagggcttccctgagtgcctgcaggctgacatctgcctgcacctgaaccgctcactgctgcagcactgcaaacccttccgaggggccaccaagggctgccttcgggccctggccatgaagttcaagaccacacatgcaccgccaggggacacactggtgcatgctggggacctgctcaccgccctgtacttcatctcccggggctccatcgagatcctgcggggcgacgtcgtcgtggccatcctggggaagaatgacatctttggggagcctctgaacctgtatgcaaggcctggcaagtcgaacggggatgtgcgggccctcacctactgtgacctacacaagatccatcgggacgacctgctggaggtgctggacatgtaccctgagttctccgaccacttctggtccagcctggagatcaccttcaacctgcgagataccaacatgatcccgggctcccccggcagtacggagttagagggtggcttcagtcggcaacgcaagcgcaagttgtccttccgcaggcgcacggacaaggacacggagcagccaggggaggtgtcggccttggggccgggccgggcgggggcagggccgagtagccggggccggccgggggggccgtggggggagagcccgtccagtggcccctccagccctgagagcagtgaggatgagggcccaggccgcagctccagccccctccgcctggtgcccttctccagccccaggccccccggagagccgccgggtggggagcccctgatggaggactgcgagaagagcagcgacacttgcaaccccctgtcaggcgccttctcaggagtgtccaacattttcagcttctggggggacagtcggggccgccagtaccaggagctccctcgatgccccgcccccacccccagcctcctcaacatccccctctccagcccgggtcggcggccccggggcgacgtggagagcaggctggatgccctccagcgccagctcaacaggctggagacccggctgagtgcagacatggccactgtcctgcagctgctacagaggcagatgacgctggtcccgcccgcctacagtgctgtgaccaccccggggcctggccccacttccacatccccgctgttgcccgtcagccccctccccaccctcaccttggactcgctttctcaggtttcccagttcatggcgtgtgaggagctgcccccgggggccccagagcttccccaagaaggccccacacgacgcctctccctaccgggccagctgggggccctcacctcccagcccctgcacagacacggctcggacccgggcagttagtggggctgcccagtgtggacacgtggctcacccagggatcaaggcgctgctgggccgctccccttggaggccctgctcaggaggccctgaccgtggaaggggagaggaactcgaaagcacagctcctcccccagcccttgggaccatcttctcctgcagtcccctgggccccagtgagaggggcaggggcagggccggcagtaggtggggcctgtggtccccccactgccctgagggcattagctggtctaactgcccggaggcacccggccctgggccttaggcacctcaaggacttttctgctatttactgctcttattgttaaggataataattaaggatcatatgaataattaatgaagatgctgatgactatgaataataaataattatcctgaggaga

SEQ ID NO: 300 - DNA, 3884 bp, Homo sapiens
  source 1..3884: mol_type = genomic DNA
  misc_feature 1..3884: note = cDNA of KCNH2 gene SNP c.1843C>T (p.Leu615Phe)
atgccggtgcggaggggccacgtcgcgccgcagaacaccttcctggacaccatcatccgcaagtttgagggccagagccgtaagttcatcatcgccaacgctcgggtggagaactgcgccgtcatctactgcaacgacggcttctgcgagctgtgcggctactcgcgggccgaggtgatgcagcgaccctgcacctgcgacttcctgcacgggccgcgcacgcagcgccgcgctgccgcgcagatcgcgcaggcactgctgggcgccgaggagcgcaaagtggaaatcgccttctaccggaaagatgggagctgcttcctatgtctggtggatgtggtgcccgtgaagaacgaggatggggctgtcatcatgttcatcctcaatttcgaggtggtgatggagaaggacatggtggggtccccggctcatgacaccaaccaccggggcccccccaccagctggctggccccaggccgcgccaagaccttccgcctgaagctgcccgcgctgctggcgctgacggcccgggagtcgtcggtgcggtcgggcggcgcgggcggcgcgggcgccccgggggccgtggtggtggacgtggacctgacgcccgcggcacccagcagcgagtcgctggccctggacgaagtgacagccatggacaaccacgtggcagggctcgggcccgcggaggagcggcgtgcgctggtgggtcccggctctccgccccgcagcgcgcccggccagctcccatcgccccgggcgcacagcctcaaccccgacgcctcgggctccagctgcagcctggcccggacgcgctcccgagaaagctgcgccagcgtgcgccgcgcctcgtcggccgacgacatcgaggccatgcgcgccggggtgctgcccccgccaccgcgccacgccagcaccggggccatgcacccactgcgcagcggcttgctcaactccacctcggactccgacctcgtgcgctaccgcaccattagcaagattccccaaatcaccctcaactttgtggacctcaagggcgaccccttcttggcttcgcccaccagtgaccgtgagatcatagcacctaagataaaggagcgaacccacaatgtcactgagaaggtcacccaggtcctgtccctgggcgccgacgtgctgcctgagtacaagctgcaggcaccgcgcatccaccgctggaccatcctgcattacagccccttcaaggccgtgtgggactggctcatcctgctgctggtcatctacacggctgtcttcacaccctactcggctgccttcctgctgaaggagacggaagaaggcccgcctgctaccgagtgtggctacgcctgccagccgctggctgtggtggacctcatcgtggacatcatgttcattgtggacatcctcatcaacttccgcaccacctacgtcaatgccaacgaggaggtggtcagccaccccggccgcatcgccgtccactacttcaagggctggttcctcatcgacatggtggccgccatccccttcgacctgctcatcttcggctctggctctgaggagctgatcgggctgctgaagactgcgcggctgctgcggctggtgcgcgtggcgcggaagctggatcgctactcagagtacggcgcggccgtgctgttcttgctcatgtgcacctttgcgctcatcgcgcactggctagcctgcatctggtacgccatcggcaacatggagcagccacacatggactcacgcatcggctggctgcacaacctgggcgaccagataggcaaaccctacaacagcagcggcctgggcggcccctccatcaaggacaagtatgtgacggcgttctacttcaccttcagcagcctcaccagtgtgggcttcggcaacgtctctcccaacaccaactcagagaagatcttctccatctgcgtcatgctcattggctccctcatgtatgctagcatcttcggcaacgtgtcggccatcatccagcggctgtactcgggcacagcccgctaccacacacagatgctgcgggtgcgggagttcatccgcttccaccagatccccaatcccctgcgccagcgcctcgaggagtacttccagcacgcctggtcctacaccaacggcatcgacatgaacgcggtgctgaagggcttccctgagtgcctgcaggctgacatctgcctgcacctgaaccgctcactgctgcagcactgcaaacccttccgaggggccaccaagggctgccttcgggccctggccatgaagttcaagaccacacatgcaccgccaggggacacactggtgcatgctggggacctgctcaccgccctgtacttcatctcccggggctccatcgagatcctgcggggcgacgtcgtcgtggccatcctggggaagaatgacatctttggggagcctctgaacctgtatgcaaggcctggcaagtcgaacggggatgtgcgggccctcacctactgtgacctacacaagatccatcgggacgacctgctggaggtgctggacatgtaccctgagttctccgaccacttctggtccagcctggagatcaccttcaacctgcgagataccaacatgatcccgggctcccccggcagtacggagttagagggtggcttcagtcggcaacgcaagcgcaagttgtccttccgcaggcgcacggacaaggacacggagcagccaggggaggtgtcggccttggggccgggccgggcgggggcagggccgagtagccggggccggccgggggggccgtggggggagagcccgtccagtggcccctccagccctgagagcagtgaggatgagggcccaggccgcagctccagccccctccgcctggtgcccttctccagccccaggccccccggagagccgccgggtggggagcccctgatggaggactgcgagaagagcagcgacacttgcaaccccctgtcaggcgccttctcaggagtgtccaacattttcagcttctggggggacagtcggggccgccagtaccaggagctccctcgatgccccgcccccacccccagcctcctcaacatccccctctccagcccgggtcggcggccccggggcgacgtggagagcaggctggatgccctccagcgccagctcaacaggctggagacccggctgagtgcagacatggccactgtcctgcagctgctacagaggcagatgacgctggtcccgcccgcctacagtgctgtgaccaccccggggcctggccccacttccacatccccgctgttgcccgtcagccccctccccaccctcaccttggactcgctttctcaggtttcccagttcatggcgtgtgaggagctgcccccgggggccccagagcttccccaagaaggccccacacgacgcctctccctaccgggccagctgggggccctcacctcccagcccctgcacagacacggctcggacccgggcagttagtggggctgcccagtgtggacacgtggctcacccagggatcaaggcgctgctgggccgctccccttggaggccctgctcaggaggccctgaccgtggaaggggagaggaactcgaaagcacagctcctcccccagcccttgggaccatcttctcctgcagtcccctgggccccagtgagaggggcaggggcagggccggcagtaggtggggcctgtggtccccccactgccctgagggcattagctggtctaactgcccggaggcacccggccctgggccttaggcacctcaaggacttttctgctatttactgctcttattgttaaggataataattaaggatcatatgaataattaatgaagatgctgatgactatgaataataaataattatcctgaggaga

SEQ ID NO: 301 - DNA, 3884 bp, Homo sapiens
  source 1..3884: mol_type = genomic DNA
  misc_feature 1..3884: note = cDNA of KCNH2 gene SNP c.1847A>G (p.Tyr616Cys)
atgccggtgcggaggggccacgtcgcgccgcagaacaccttcctggacaccatcatccgcaagtttgagggccagagccgtaagttcatcatcgccaacgctcgggtggagaactgcgccgtcatctactgcaacgacggcttctgcgagctgtgcggctactcgcgggccgaggtgatgcagcgaccctgcacctgcgacttcctgcacgggccgcgcacgcagcgccgcgctgccgcgcagatcgcgcaggcactgctgggcgccgaggagcgcaaagtggaaatcgccttctaccggaaagatgggagctgcttcctatgtctggtggatgtggtgcccgtgaagaacgaggatggggctgtcatcatgttcatcctcaatttcgaggtggtgatggagaaggacatggtggggtccccggctcatgacaccaaccaccggggcccccccaccagctggctggccccaggccgcgccaagaccttccgcctgaagctgcccgcgctgctggcgctgacggcccgggagtcgtcggtgcggtcgggcggcgcgggcggcgcgggcgccccgggggccgtggtggtggacgtggacctgacgcccgcggcacccagcagcgagtcgctggccctggacgaagtgacagccatggacaaccacgtggcagggctcgggcccgcggaggagcggcgtgcgctggtgggtcccggctctccgccccgcagcgcgcccggccagctcccatcgccccgggcgcacagcctcaaccccgacgcctcgggctccagctgcagcctggcccggacgcgctcccgagaaagctgcgccagcgtgcgccgcgcctcgtcggccgacgacatcgaggccatgcgcgccggggtgctgcccccgccaccgcgccacgccagcaccggggccatgcacccactgcgcagcggcttgctcaactccacctcggactccgacctcgtgcgctaccgcaccattagcaagattccccaaatcaccctcaactttgtggacctcaagggcgaccccttcttggcttcgcccaccagtgaccgtgagatcatagcacctaagataaaggagcgaacccacaatgtcactgagaaggtcacccaggtcctgtccctgggcgccgacgtgctgcctgagtacaagctgcaggcaccgcgcatccaccgctggaccatcctgcattacagccccttcaaggccgtgtgggactggctcatcctgctgctggtcatctacacggctgtcttcacaccctactcggctgccttcctgctgaaggagacggaagaaggcccgcctgctaccgagtgtggctacgcctgccagccgctggctgtggtggacctcatcgtggacatcatgttcattgtggacatcctcatcaacttccgcaccacctacgtcaatgccaacgaggaggtggtcagccaccccggccgcatcgccgtccactacttcaagggctggttcctcatcgacatggtggccgccatccccttcgacctgctcatcttcggctctggctctgaggagctgatcgggctgctgaagactgcgcggctgctgcggctggtgcgcgtggcgcggaagctggatcgctactcagagtacggcgcggccgtgctgttcttgctcatgtgcacctttgcgctcatcgcgcactggctagcctgcatctggtacgccatcggcaacatggagcagccacacatggactcacgcatcggctggctgcacaacctgggcgaccagataggcaaaccctacaacagcagcggcctgggcggcccctccatcaaggacaagtatgtgacggcgctctgcttcaccttcagcagcctcaccagtgtgggcttcggcaacgtctctcccaacaccaactcagagaagatcttctccatctgcgtcatgctcattggctccctcatgtatgctagcatcttcggcaacgtgtcggccatcatccagcggctgtactcgggcacagcccgctaccacacacagatgctgcgggtgcgggagttcatccgcttccaccagatccccaatcccctgcgccagcgcctcgaggagtacttccagcacgcctggtcctacaccaacggcatcgacatgaacgcggtgctgaagggcttccctgagtgcctgcaggctgacatctgcctgcacctgaaccgctcactgctgcagcactgcaaacccttccgaggggccaccaagggctgccttcgggccctggccatgaagttcaagaccacacatgcaccgccaggggacacactggtgcatgctggggacctgctcaccgccctgtacttcatctcccggggctccatcgagatcctgcggggcgacgtcgtcgtggccatcctggggaagaatgacatctttggggagcctctgaacctgtatgcaaggcctggcaagtcgaacggggatgtgcgggccctcacctactgtgacctacacaagatccatcgggacgacctgctggaggtgctggacatgtaccctgagttctccgaccacttctggtccagcctggagatcaccttcaacctgcgagataccaacatgatcccgggctcccccggcagtacggagttagagggtggcttcagtcggcaacgcaagcgcaagttgtccttccgcaggcgcacggacaaggacacggagcagccaggggaggtgtcggccttggggccgggccgggcgggggcagggccgagtagccggggccggccgggggggccgtggggggagagcccgtccagtggcccctccagccctgagagcagtgaggatgagggcccaggccgcagctccagccccctccgcctggtgcccttctccagccccaggccccccggagagccgccgggtggggagcccctgatggaggactgcgagaagagcagcgacacttgcaaccccctgtcaggcgccttctcaggagtgtccaacattttcagcttctggggggacagtcggggccgccagtaccaggagctccctcgatgccccgcccccacccccagcctcctcaacatccccctctccagcccgggtcggcggccccggggcgacgtggagagcaggctggatgccctccagcgccagctcaacaggctggagacccggctgagtgcagacatggccactgtcctgcagctgctacagaggcagatgacgctggtcccgcccgcctacagtgctgtgaccaccccggggcctggccccacttccacatccccgctgttgcccgtcagccccctccccaccctcaccttggactcgctttctcaggtttcccagttcatggcgtgtgaggagctgcccccgggggccccagagcttccccaagaaggccccacacgacgcctctccctaccgggccagctgggggccctcacctcccagcccctgcacagacacggctcggacccgggcagttagtggggctgcccagtgtggacacgtggctcacccagggatcaaggcgctgctgggccgctccccttggaggccctgctcaggaggccctgaccgtggaaggggagaggaactcgaaagcacagctcctcccccagcccttgggaccatcttctcctgcagtcccctgggccccagtgagaggggcaggggcagggccggcagtaggtggggcctgtggtccccccactgccctgagggcattagctggtctaactgcccggaggcacccggccctgggccttaggcacctcaaggacttttctgctatttactgctcttattgttaaggataataattaaggatcatatgaataattaatgaagatgctgatgactatgaataataaataattatcctgaggaga

SEQ ID NO: 302 - DNA, 3884 bp, Homo sapiens
  source 1..3884: mol_type = genomic DNA
  misc_feature 1..3884: note = cDNA of KCNH2 gene SNP c.1848C>G (p.Tyr616Ter)
atgccggtgcggaggggccacgtcgcgccgcagaacaccttcctggacaccatcatccgcaagtttgagggccagagccgtaagttcatcatcgccaacgctcgggtggagaactgcgccgtcatctactgcaacgacggcttctgcgagctgtgcggctactcgcgggccgaggtgatgcagcgaccctgcacctgcgacttcctgcacgggccgcgcacgcagcgccgcgctgccgcgcagatcgcgcaggcactgctgggcgccgaggagcgcaaagtggaaatcgccttctaccggaaagatgggagctgcttcctatgtctggtggatgtggtgcccgtgaagaacgaggatggggctgtcatcatgttcatcctcaatttcgaggtggtgatggagaaggacatggtggggtccccggctcatgacaccaaccaccggggcccccccaccagctggctggccccaggccgcgccaagaccttccgcctgaagctgcccgcgctgctggcgctgacggcccgggagtcgtcggtgcggtcgggcggcgcgggcggcgcgggcgccccgggggccgtggtggtggacgtggacctgacgcccgcggcacccagcagcgagtcgctggccctggacgaagtgacagccatggacaaccacgtggcagggctcgggcccgcggaggagcggcgtgcgctggtgggtcccggctctccgccccgcagcgcgcccggccagctcccatcgccccgggcgcacagcctcaaccccgacgcctcgggctccagctgcagcctggcccggacgcgctcccgagaaagctgcgccagcgtgcgccgcgcctcgtcggccgacgacatcgaggccatgcgcgccggggtgctgcccccgccaccgcgccacgccagcaccggggccatgcacccactgcgcagcggcttgctcaactccacctcggactccgacctcgtgcgctaccgcaccattagcaagattccccaaatcaccctcaactttgtggacctcaagggcgaccccttcttggcttcgcccaccagtgaccgtgagatcatagcacctaagataaaggagcgaacccacaatgtcactgagaaggtcacccaggtcctgtccctgggcgccgacgtgctgcctgagtacaagctgcaggcaccgcgcatccaccgctggaccatcctgcattacagccccttcaaggccgtgtgggactggctcatcctgctgctggtcatctacacggctgtcttcacaccctactcggctgccttcctgctgaaggagacggaagaaggcccgcctgctaccgagtgtggctacgcctgccagccgctggctgtggtggacctcatcgtggacatcatgttcattgtggacatcctcatcaacttccgcaccacctacgtcaatgccaacgaggaggtggtcagccaccccggccgcatcgccgtccactacttcaagggctggttcctcatcgacatggtggccgccatccccttcgacctgctcatcttcggctctggctctgaggagctgatcgggctgctgaagactgcgcggctgctgcggctggtgcgcgtggcgcggaagctggatcgctactcagagtacggcgcggccgtgctgttcttgctcatgtgcacctttgcgctcatcgcgcactggctagcctgcatctggtacgccatcggcaacatggagcagccacacatggactcacgcatcggctggctgcacaacctgggcgaccagataggcaaaccctacaacagcagcggcctgggcggcccctccatcaaggacaagtatgtgacggcgctctagttcaccttcagcagcctcaccagtgtgggcttcggcaacgtctctcccaacaccaactcagagaagatcttctccatctgcgtcatgctcattggctccctcatgtatgctagcatcttcggcaacgtgtcggccatcatccagcggctgtactcgggcacagcccgctaccacacacagatgctgcgggtgcgggagttcatccgcttccaccagatccccaatcccctgcgccagcgcctcgaggagtacttccagcacgcctggtcctacaccaacggcatcgacatgaacgcggtgctgaagggcttccctgagtgcctgcaggctgacatctgcctgcacctgaaccgctcactgctgcagcactgcaaacccttccgaggggccaccaagggctgccttcgggccctggccatgaagttcaagaccacacatgcaccgccaggggacacactggtgcatgctggggacctgctcaccgccctgtacttcatctcccggggctccatcgagatcctgcggggcgacgtcgtcgtggccatcctggggaagaatgacatctttggggagcctctgaacctgtatgcaaggcctggcaagtcgaacggggatgtgcgggccctcacctactgtgacctacacaagatccatcgggacgacctgctggaggtgctggacatgtaccctgagttctccgaccacttctggtccagcctggagatcaccttcaacctgcgagataccaacatgatcccgggctcccccggcagtacggagttagagggtggcttcagtcggcaacgcaagcgcaagttgtccttccgcaggcgcacggacaaggacacggagcagccaggggaggtgtcggccttggggccgggccgggcgggggcagggccgagtagccggggccggccgggggggccgtggggggagagcccgtccagtggcccctccagccctgagagcagtgaggatgagggcccaggccgcagctccagccccctccgcctggtgcccttctccagccccaggccccccggagagccgccgggtggggagcccctgatggaggactgcgagaagagcagcgacacttgcaaccccctgtcaggcgccttctcaggagtgtccaacattttcagcttctggggggacagtcggggccgccagtaccaggagctccctcgatgccccgcccccacccccagcctcctcaacatccccctctccagcccgggtcggcggccccggggcgacgtggagagcaggctggatgccctccagcgccagctcaacaggctggagacccggctgagtgcagacatggccactgtcctgcagctgctacagaggcagatgacgctggtcccgcccgcctacagtgctgtgaccaccccggggcctggccccacttccacatccccgctgttgcccgtcagccccctccccaccctcaccttggactcgctttctcaggtttcccagttcatggcgtgtgaggagctgcccccgggggccccagagcttccccaagaaggccccacacgacgcctctccctaccgggccagctgggggccctcacctcccagcccctgcacagacacggctcggacccgggcagttagtggggctgcccagtgtggacacgtggctcacccagggatcaaggcgctgctgggccgctccccttggaggccctgctcaggaggccctgaccgtggaaggggagaggaactcgaaagcacagctcctcccccagcccttgggaccatcttctcctgcagtcccctgggccccagtgagaggggcaggggcagggccggcagtaggtggggcctgtggtccccccactgccctgagggcattagctggtctaactgcccggaggcacccggccctgggccttaggcacctcaaggacttttctgctatttactgctcttattgttaaggataataattaaggatcatatgaataattaatgaagatgctgatgactatgaataataaataattatcctgaggaga

SEQ ID NO: 303 - DNA, 3884 bp, Homo sapiens
  source 1..3884: mol_type = genomic DNA
  misc_feature 1..3884: note = cDNA of KCNH2 gene SNP c.1849T>C (p.Phe617Leu)
atgccggtgcggaggggccacgtcgcgccgcagaacaccttcctggacaccatcatccgcaagtttgagggccagagccgtaagttcatcatcgccaacgctcgggtggagaactgcgccgtcatctactgcaacgacggcttctgcgagctgtgcggctactcgcgggccgaggtgatgcagcgaccctgcacctgcgacttcctgcacgggccgcgcacgcagcgccgcgctgccgcgcagatcgcgcaggcactgctgggcgccgaggagcgcaaagtggaaatcgccttctaccggaaagatgggagctgcttcctatgtctggtggatgtggtgcccgtgaagaacgaggatggggctgtcatcatgttcatcctcaatttcgaggtggtgatggagaaggacatggtggggtccccggctcatgacaccaaccaccggggcccccccaccagctggctggccccaggccgcgccaagaccttccgcctgaagctgcccgcgctgctggcgctgacggcccgggagtcgtcggtgcggtcgggcggcgcgggcggcgcgggcgccccgggggccgtggtggtggacgtggacctgacgcccgcggcacccagcagcgagtcgctggccctggacgaagtgacagccatggacaaccacgtggcagggctcgggcccgcggaggagcggcgtgcgctggtgggtcccggctctccgccccgcagcgcgcccggccagctcccatcgccccgggcgcacagcctcaaccccgacgcctcgggctccagctgcagcctggcccggacgcgctcccgagaaagctgcgccagcgtgcgccgcgcctcgtcggccgacgacatcgaggccatgcgcgccggggtgctgcccccgccaccgcgccacgccagcaccggggccatgcacccactgcgcagcggcttgctcaactccacctcggactccgacctcgtgcgctaccgcaccattagcaagattccccaaatcaccctcaactttgtggacctcaagggcgaccccttcttggcttcgcccaccagtgaccgtgagatcatagcacctaagataaaggagcgaacccacaatgtcactgagaaggtcacccaggtcctgtccctgggcgccgacgtgctgcctgagtacaagctgcaggcaccgcgcatccaccgctggaccatcctgcattacagccccttcaaggccgtgtgggactggctcatcctgctgctggtcatctacacggctgtcttcacaccctactcggctgccttcctgctgaaggagacggaagaaggcccgcctgctaccgagtgtggctacgcctgccagccgctggctgtggtggacctcatcgtggacatcatgttcattgtggacatcctcatcaacttccgcaccacctacgtcaatgccaacgaggaggtggtcagccaccccggccgcatcgccgtccactacttcaagggctggttcctcatcgacatggtggccgccatccccttcgacctgctcatcttcggctctggctctgaggagctgatcgggctgctgaagactgcgcggctgctgcggctggtgcgcgtggcgcggaagctggatcgctactcagagtacggcgcggccgtgctgttcttgctcatgtgcacctttgcgctcatcgcgcactggctagcctgcatctggtacgccatcggcaacatggagcagccacacatggactcacgcatcggctggctgcacaacctgggcgaccagataggcaaaccctacaacagcagcggcctgggcggcccctccatcaaggacaagtatgtgacggcgctctacctcaccttcagcagcctcaccagtgtgggcttcggcaacgtctctcccaacaccaactcagagaagatcttctccatctgcgtcatgctcattggctccctcatgtatgctagcatcttcggcaacgtgtcggccatcatccagcggctgtactcgggcacagcccgctaccacacacagatgctgcgggtgcgggagttcatccgcttccaccagatccccaatcccctgcgccagcgcctcgaggagtacttccagcacgcctggtcctacaccaacggcatcgacatgaacgcggtgctgaagggcttccctgagtgcctgcaggctgacatctgcctgcacctgaaccgctcactgctgcagcactgcaaacccttccgaggggccaccaagggctgccttcgggccctggccatgaagttcaagaccacacatgcaccgccaggggacacactggtgcatgctggggacctgctcaccgccctgtacttcatctcccggggctccatcgagatcctgcggggcgacgtcgtcgtggccatcctggggaagaatgacatctttggggagcctctgaacctgtatgcaaggcctggcaagtcgaacggggatgtgcgggccctcacctactgtgacctacacaagatccatcgggacgacctgctggaggtgctggacatgtaccctgagttctccgaccacttctggtccagcctggagatcaccttcaacctgcgagataccaacatgatcccgggctcccccggcagtacggagttagagggtggcttcagtcggcaacgcaagcgcaagttgtccttccgcaggcgcacggacaaggacacggagcagccaggggaggtgtcggccttggggccgggccgggcgggggcagggccgagtagccggggccggccgggggggccgtggggggagagcccgtccagtggcccctccagccctgagagcagtgaggatgagggcccaggccgcagctccagccccctccgcctggtgcccttctccagccccaggccccccggagagccgccgggtggggagcccctgatggaggactgcgagaagagcagcgacacttgcaaccccctgtcaggcgccttctcaggagtgtccaacattttcagcttctggggggacagtcggggccgccagtaccaggagctccctcgatgccccgcccccacccccagcctcctcaacatccccctctccagcccgggtcggcggccccggggcgacgtggagagcaggctggatgccctccagcgccagctcaacaggctggagacccggctgagtgcagacatggccactgtcctgcagctgctacagaggcagatgacgctggtcccgcccgcctacagtgctgtgaccaccccggggcctggccccacttccacatccccgctgttgcccgtcagccccctccccaccctcaccttggactcgctttctcaggtttcccagttcatggcgtgtgaggagctgcccccgggggccccagagcttccccaagaaggccccacacgacgcctctccctaccgggccagctgggggccctcacctcccagcccctgcacagacacggctcggacccgggcagttagtggggctgcccagtgtggacacgtggctcacccagggatcaaggcgctgctgggccgctccccttggaggccctgctcaggaggccctgaccgtggaaggggagaggaactcgaaagcacagctcctcccccagcccttgggaccatcttctcctgcagtcccctgggccccagtgagaggggcaggggcagggccggcagtaggtggggcctgtggtccccccactgccctgagggcattagctggtctaactgcccggaggcacccggccctgggccttaggcacctcaaggacttttctgctatttactgctcttattgttaaggataataattaaggatcatatgaataattaatgaagatgctgatgactatgaataataaataattatcctgaggaga

SEQ ID NO: 304 - DNA, 3884 bp, Homo sapiens
  source 1..3884: mol_type = genomic DNA
  misc_feature 1..3884: note = cDNA of KCNH2 gene SNP c.1851C>A (p.Phe617Leu)
atgccggtgcggaggggccacgtcgcgccgcagaacaccttcctggacaccatcatccgcaagtttgagggccagagccgtaagttcatcatcgccaacgctcgggtggagaactgcgccgtcatctactgcaacgacggcttctgcgagctgtgcggctactcgcgggccgaggtgatgcagcgaccctgcacctgcgacttcctgcacgggccgcgcacgcagcgccgcgctgccgcgcagatcgcgcaggcactgctgggcgccgaggagcgcaaagtggaaatcgccttctaccggaaagatgggagctgcttcctatgtctggtggatgtggtgcccgtgaagaacgaggatggggctgtcatcatgttcatcctcaatttcgaggtggtgatggagaaggacatggtggggtccccggctcatgacaccaaccaccggggcccccccaccagctggctggccccaggccgcgccaagaccttccgcctgaagctgcccgcgctgctggcgctgacggcccgggagtcgtcggtgcggtcgggcggcgcgggcggcgcgggcgccccgggggccgtggtggtggacgtggacctgacgcccgcggcacccagcagcgagtcgctggccctggacgaagtgacagccatggacaaccacgtggcagggctcgggcccgcggaggagcggcgtgcgctggtgggtcccggctctccgccccgcagcgcgcccggccagctcccatcgccccgggcgcacagcctcaaccccgacgcctcgggctccagctgcagcctggcccggacgcgctcccgagaaagctgcgccagcgtgcgccgcgcctcgtcggccgacgacatcgaggccatgcgcgccggggtgctgcccccgccaccgcgccacgccagcaccggggccatgcacccactgcgcagcggcttgctcaactccacctcggactccgacctcgtgcgctaccgcaccattagcaagattccccaaatcaccctcaactttgtggacctcaagggcgaccccttcttggcttcgcccaccagtgaccgtgagatcatagcacctaagataaaggagcgaacccacaatgtcactgagaaggtcacccaggtcctgtccctgggcgccgacgtgctgcctgagtacaagctgcaggcaccgcgcatccaccgctggaccatcctgcattacagccccttcaaggccgtgtgggactggctcatcctgctgctggtcatctacacggctgtcttcacaccctactcggctgccttcctgctgaaggagacggaagaaggcccgcctgctaccgagtgtggctacgcctgccagccgctggctgtggtggacctcatcgtggacatcatgttcattgtggacatcctcatcaacttccgcaccacctacgtcaatgccaacgaggaggtggtcagccaccccggccgcatcgccgtccactacttcaagggctggttcctcatcgacatggtggccgccatccccttcgacctgctcatcttcggctctggctctgaggagctgatcgggctgctgaagactgcgcggctgctgcggctggtgcgcgtggcgcggaagctggatcgctactcagagtacggcgcggccgtgctgttcttgctcatgtgcacctttgcgctcatcgcgcactggctagcctgcatctggtacgccatcggcaacatggagcagccacacatggactcacgcatcggctggctgcacaacctgggcgaccagataggcaaaccctacaacagcagcggcctgggcggcccctccatcaaggacaagtatgtgacggcgctctacttaaccttcagcagcctcaccagtgtgggcttcggcaacgtctctcccaacaccaactcagagaagatcttctccatctgcgtcatgctcattggctccctcatgtatgctagcatcttcggcaacgtgtcggccatcatccagcggctgtactcgggcacagcccgctaccacacacagatgctgcgggtgcgggagttcatccgcttccaccagatccccaatcccctgcgccagcgcctcgaggagtacttccagcacgcctggtcctacaccaacggcatcgacatgaacgcggtgctgaagggcttccctgagtgcctgcaggctgacatctgcctgcacctgaaccgctcactgctgcagcactgcaaacccttccgaggggccaccaagggctgccttcgggccctggccatgaagttcaagaccacacatgcaccgccaggggacacactggtgcatgctggggacctgctcaccgccctgtacttcatctcccggggctccatcgagatcctgcggggcgacgtcgtcgtggccatcctggggaagaatgacatctttggggagcctctgaacctgtatgcaaggcctggcaagtcgaacggggatgtgcgggccctcacctactgtgacctacacaagatccatcgggacgacctgctggaggtgctggacatgtaccctgagttctccgaccacttctggtccagcctggagatcaccttcaacctgcgagataccaacatgatcccgggctcccccggcagtacggagttagagggtggcttcagtcggcaacgcaagcgcaagttgtccttccgcaggcgcacggacaaggacacggagcagccaggggaggtgtcggccttggggccgggccgggcgggggcagggccgagtagccggggccggccgggggggccgtggggggagagcccgtccagtggcccctccagccctgagagcagtgaggatgagggcccaggccgcagctccagccccctccgcctggtgcccttctccagccccaggccccccggagagccgccgggtggggagcccctgatggaggactgcgagaagagcagcgacacttgcaaccccctgtcaggcgccttctcaggagtgtccaacattttcagcttctggggggacagtcggggccgccagtaccaggagctccctcgatgccccgcccccacccccagcctcctcaacatccccctctccagcccgggtcggcggccccggggcgacgtggagagcaggctggatgccctccagcgccagctcaacaggctggagacccggctgagtgcagacatggccactgtcctgcagctgctacagaggcagatgacgctggtcccgcccgcctacagtgctgtgaccaccccggggcctggccccacttccacatccccgctgttgcccgtcagccccctccccaccctcaccttggactcgctttctcaggtttcccagttcatggcgtgtgaggagctgcccccgggggccccagagcttccccaagaaggccccacacgacgcctctccctaccgggccagctgggggccctcacctcccagcccctgcacagacacggctcggacccgggcagttagtggggctgcccagtgtggacacgtggctcacccagggatcaaggcgctgctgggccgctccccttggaggccctgctcaggaggccctgaccgtggaaggggagaggaactcgaaagcacagctcctcccccagcccttgggaccatcttctcctgcagtcccctgggccccagtgagaggggcaggggcagggccggcagtaggtggggcctgtggtccccccactgccctgagggcattagctggtctaactgcccggaggcacccggccctgggccttaggcacctcaaggacttttctgctatttactgctcttattgttaaggataataattaaggatcatatgaataattaatgaagatgctgatgactatgaataataaataattatcctgaggaga

SEQ ID NO: 305 - DNA, 3884 bp, Homo sapiens
  source 1..3884: mol_type = genomic DNA
  misc_feature 1..3884: note = cDNA of KCNH2 gene SNP c.1853C>G (p.Thr618Ser)
atgccggtgcggaggggccacgtcgcgccgcagaacaccttcctggacaccatcatccgcaagtttgagggccagagccgtaagttcatcatcgccaacgctcgggtggagaactgcgccgtcatctactgcaacgacggcttctgcgagctgtgcggctactcgcgggccgaggtgatgcagcgaccctgcacctgcgacttcctgcacgggccgcgcacgcagcgccgcgctgccgcgcagatcgcgcaggcactgctgggcgccgaggagcgcaaagtggaaatcgccttctaccggaaagatgggagctgcttcctatgtctggtggatgtggtgcccgtgaagaacgaggatggggctgtcatcatgttcatcctcaatttcgaggtggtgatggagaaggacatggtggggtccccggctcatgacaccaaccaccggggcccccccaccagctggctggccccaggccgcgccaagaccttccgcctgaagctgcccgcgctgctggcgctgacggcccgggagtcgtcggtgcggtcgggcggcgcgggcggcgcgggcgccccgggggccgtggtggtggacgtggacctgacgcccgcggcacccagcagcgagtcgctggccctggacgaagtgacagccatggacaaccacgtggcagggctcgggcccgcggaggagcggcgtgcgctggtgggtcccggctctccgccccgcagcgcgcccggccagctcccatcgccccgggcgcacagcctcaaccccgacgcctcgggctccagctgcagcctggcccggacgcgctcccgagaaagctgcgccagcgtgcgccgcgcctcgtcggccgacgacatcgaggccatgcgcgccggggtgctgcccccgccaccgcgccacgccagcaccggggccatgcacccactgcgcagcggcttgctcaactccacctcggactccgacctcgtgcgctaccgcaccattagcaagattccccaaatcaccctcaactttgtggacctcaagggcgaccccttcttggcttcgcccaccagtgaccgtgagatcatagcacctaagataaaggagcgaacccacaatgtcactgagaaggtcacccaggtcctgtccctgggcgccgacgtgctgcctgagtacaagctgcaggcaccgcgcatccaccgctggaccatcctgcattacagccccttcaaggccgtgtgggactggctcatcctgctgctggtcatctacacggctgtcttcacaccctactcggctgccttcctgctgaaggagacggaagaaggcccgcctgctaccgagtgtggctacgcctgccagccgctggctgtggtggacctcatcgtggacatcatgttcattgtggacatcctcatcaacttccgcaccacctacgtcaatgccaacgaggaggtggtcagccaccccggccgcatcgccgtccactacttcaagggctggttcctcatcgacatggtggccgccatccccttcgacctgctcatcttcggctctggctctgaggagctgatcgggctgctgaagactgcgcggctgctgcggctggtgcgcgtggcgcggaagctggatcgctactcagagtacggcgcggccgtgctgttcttgctcatgtgcacctttgcgctcatcgcgcactggctagcctgcatctggtacgccatcggcaacatggagcagccacacatggactcacgcatcggctggctgcacaacctgggcgaccagataggcaaaccctacaacagcagcggcctgggcggcccctccatcaaggacaagtatgtgacggcgctctacttcagcttcagcagcctcaccagtgtgggcttcggcaacgtctctcccaacaccaactcagagaagatcttctccatctgcgtcatgctcattggctccctcatgtatgctagcatcttcggcaacgtgtcggccatcatccagcggctgtactcgggcacagcccgctaccacacacagatgctgcgggtgcgggagttcatccgcttccaccagatccccaatcccctgcgccagcgcctcgaggagtacttccagcacgcctggtcctacaccaacggcatcgacatgaacgcggtgctgaagggcttccctgagtgcctgcaggctgacatctgcctgcacctgaaccgctcactgctgcagcactgcaaacccttccgaggggccaccaagggctgccttcgggccctggccatgaagttcaagaccacacatgcaccgccaggggacacactggtgcatgctggggacctgctcaccgccctgtacttcatctcccggggctccatcgagatcctgcggggcgacgtcgtcgtggccatcctggggaagaatgacatctttggggagcctctgaacctgtatgcaaggcctggcaagtcgaacggggatgtgcgggccctcacctactgtgacctacacaagatccatcgggacgacctgctggaggtgctggacatgtaccctgagttctccgaccacttctggtccagcctggagatcaccttcaacctgcgagataccaacatgatcccgggctcccccggcagtacggagttagagggtggcttcagtcggcaacgcaagcgcaagttgtccttccgcaggcgcacggacaaggacacggagcagccaggggaggtgtcggccttggggccgggccgggcgggggcagggccgagtagccggggccggccgggggggccgtggggggagagcccgtccagtggcccctccagccctgagagcagtgaggatgagggcccaggccgcagctccagccccctccgcctggtgcccttctccagccccaggccccccggagagccgccgggtggggagcccctgatggaggactgcgagaagagcagcgacacttgcaaccccctgtcaggcgccttctcaggagtgtccaacattttcagcttctggggggacagtcggggccgccagtaccaggagctccctcgatgccccgcccccacccccagcctcctcaacatccccctctccagcccgggtcggcggccccggggcgacgtggagagcaggctggatgccctccagcgccagctcaacaggctggagacccggctgagtgcagacatggccactgtcctgcagctgctacagaggcagatgacgctggtcccgcccgcctacagtgctgtgaccaccccggggcctggccccacttccacatccccgctgttgcccgtcagccccctccccaccctcaccttggactcgctttctcaggtttcccagttcatggcgtgtgaggagctgcccccgggggccccagagcttccccaagaaggccccacacgacgcctctccctaccgggccagctgggggccctcacctcccagcccctgcacagacacggctcggacccgggcagttagtggggctgcccagtgtggacacgtggctcacccagggatcaaggcgctgctgggccgctccccttggaggccctgctcaggaggccctgaccgtggaaggggagaggaactcgaaagcacagctcctcccccagcccttgggaccatcttctcctgcagtcccctgggccccagtgagaggggcaggggcagggccggcagtaggtggggcctgtggtccccccactgccctgagggcattagctggtctaactgcccggaggcacccggccctgggccttaggcacctcaaggacttttctgctatttactgctcttattgttaaggataataattaaggatcatatgaataattaatgaagatgctgatgactatgaataataaataattatcctgaggaga

SEQ ID NO: 306 - DNA, 3884 bp, Homo sapiens
  source 1..3884: mol_type = genomic DNA
  misc_feature 1..3884: note = cDNA of KCNH2 gene SNP c.1853C>T (p.Thr618Ile)
atgccggtgcggaggggccacgtcgcgccgcagaacaccttcctggacaccatcatccgcaagtttgagggccagagccgtaagttcatcatcgccaacgctcgggtggagaactgcgccgtcatctactgcaacgacggcttctgcgagctgtgcggctactcgcgggccgaggtgatgcagcgaccctgcacctgcgacttcctgcacgggccgcgcacgcagcgccgcgctgccgcgcagatcgcgcaggcactgctgggcgccgaggagcgcaaagtggaaatcgccttctaccggaaagatgggagctgcttcctatgtctggtggatgtggtgcccgtgaagaacgaggatggggctgtcatcatgttcatcctcaatttcgaggtggtgatggagaaggacatggtggggtccccggctcatgacaccaaccaccggggcccccccaccagctggctggccccaggccgcgccaagaccttccgcctgaagctgcccgcgctgctggcgctgacggcccgggagtcgtcggtgcggtcgggcggcgcgggcggcgcgggcgccccgggggccgtggtggtggacgtggacctgacgcccgcggcacccagcagcgagtcgctggccctggacgaagtgacagccatggacaaccacgtggcagggctcgggcccgcggaggagcggcgtgcgctggtgggtcccggctctccgccccgcagcgcgcccggccagctcccatcgccccgggcgcacagcctcaaccccgacgcctcgggctccagctgcagcctggcccggacgcgctcccgagaaagctgcgccagcgtgcgccgcgcctcgtcggccgacgacatcgaggccatgcgcgccggggtgctgcccccgccaccgcgccacgccagcaccggggccatgcacccactgcgcagcggcttgctcaactccacctcggactccgacctcgtgcgctaccgcaccattagcaagattccccaaatcaccctcaactttgtggacctcaagggcgaccccttcttggcttcgcccaccagtgaccgtgagatcatagcacctaagataaaggagcgaacccacaatgtcactgagaaggtcacccaggtcctgtccctgggcgccgacgtgctgcctgagtacaagctgcaggcaccgcgcatccaccgctggaccatcctgcattacagccccttcaaggccgtgtgggactggctcatcctgctgctggtcatctacacggctgtcttcacaccctactcggctgccttcctgctgaaggagacggaagaaggcccgcctgctaccgagtgtggctacgcctgccagccgctggctgtggtggacctcatcgtggacatcatgttcattgtggacatcctcatcaacttccgcaccacctacgtcaatgccaacgaggaggtggtcagccaccccggccgcatcgccgtccactacttcaagggctggttcctcatcgacatggtggccgccatccccttcgacctgctcatcttcggctctggctctgaggagctgatcgggctgctgaagactgcgcggctgctgcggctggtgcgcgtggcgcggaagctggatcgctactcagagtacggcgcggccgtgctgttcttgctcatgtgcacctttgcgctcatcgcgcactggctagcctgcatctggtacgccatcggcaacatggagcagccacacatggactcacgcatcggctggctgcacaacctgggcgaccagataggcaaaccctacaacagcagcggcctgggcggcccctccatcaaggacaagtatgtgacggcgctctacttcatcttcagcagcctcaccagtgtgggcttcggcaacgtctctcccaacaccaactcagagaagatcttctccatctgcgtcatgctcattggctccctcatgtatgctagcatcttcggcaacgtgtcggccatcatccagcggctgtactcgggcacagcccgctaccacacacagatgctgcgggtgcgggagttcatccgcttccaccagatccccaatcccctgcgccagcgcctcgaggagtacttccagcacgcctggtcctacaccaacggcatcgacatgaacgcggtgctgaagggcttccctgagtgcctgcaggctgacatctgcctgcacctgaaccgctcactgctgcagcactgcaaacccttccgaggggccaccaagggctgccttcgggccctggccatgaagttcaagaccacacatgcaccgccaggggacacactggtgcatgctggggacctgctcaccgccctgtacttcatctcccggggctccatcgagatcctgcggggcgacgtcgtcgtggccatcctggggaagaatgacatctttggggagcctctgaacctgtatgcaaggcctggcaagtcgaacggggatgtgcgggccctcacctactgtgacctacacaagatccatcgggacgacctgctggaggtgctggacatgtaccctgagttctccgaccacttctggtccagcctggagatcaccttcaacctgcgagataccaacatgatcccgggctcccccggcagtacggagttagagggtggcttcagtcggcaacgcaagcgcaagttgtccttccgcaggcgcacggacaaggacacggagcagccaggggaggtgtcggccttggggccgggccgggcgggggcagggccgagtagccggggccggccgggggggccgtggggggagagcccgtccagtggcccctccagccctgagagcagtgaggatgagggcccaggccgcagctccagccccctccgcctggtgcccttctccagccccaggccccccggagagccgccgggtggggagcccctgatggaggactgcgagaagagcagcgacacttgcaaccccctgtcaggcgccttctcaggagtgtccaacattttcagcttctggggggacagtcggggccgccagtaccaggagctccctcgatgccccgcccccacccccagcctcctcaacatccccctctccagcccgggtcggcggccccggggcgacgtggagagcaggctggatgccctccagcgccagctcaacaggctggagacccggctgagtgcagacatggccactgtcctgcagctgctacagaggcagatgacgctggtcccgcccgcctacagtgctgtgaccaccccggggcctggccccacttccacatccccgctgttgcccgtcagccccctccccaccctcaccttggactcgctttctcaggtttcccagttcatggcgtgtgaggagctgcccccgggggccccagagcttccccaagaaggccccacacgacgcctctccctaccgggccagctgggggccctcacctcccagcccctgcacagacacggctcggacccgggcagttagtggggctgcccagtgtggacacgtggctcacccagggatcaaggcgctgctgggccgctccccttggaggccctgctcaggaggccctgaccgtggaaggggagaggaactcgaaagcacagctcctcccccagcccttgggaccatcttctcctgcagtcccctgggccccagtgagaggggcaggggcagggccggcagtaggtggggcctgtggtccccccactgccctgagggcattagctggtctaactgcccggaggcacccggccctgggccttaggcacctcaaggacttttctgctatttactgctcttattgttaaggataataattaaggatcatatgaataattaatgaagatgctgatgactatgaataataaataattatcctgaggaga

SEQ ID NO: 307 - DNA, 3884 bp, Homo sapiens
  source 1..3884: mol_type = genomic DNA
  misc_feature 1..3884: note = cDNA of KCNH2 gene SNP c.1858A>G (p.Ser620Gly)
atgccggtgcggaggggccacgtcgcgccgcagaacaccttcctggacaccatcatccgcaagtttgagggccagagccgtaagttcatcatcgccaacgctcgggtggagaactgcgccgtcatctactgcaacgacggcttctgcgagctgtgcggctactcgcgggccgaggtgatgcagcgaccctgcacctgcgacttcctgcacgggccgcgcacgcagcgccgcgctgccgcgcagatcgcgcaggcactgctgggcgccgaggagcgcaaagtggaaatcgccttctaccggaaagatgggagctgcttcctatgtctggtggatgtggtgcccgtgaagaacgaggatggggctgtcatcatgttcatcctcaatttcgaggtggtgatggagaaggacatggtggggtccccggctcatgacaccaaccaccggggcccccccaccagctggctggccccaggccgcgccaagaccttccgcctgaagctgcccgcgctgctggcgctgacggcccgggagtcgtcggtgcggtcgggcggcgcgggcggcgcgggcgccccgggggccgtggtggtggacgtggacctgacgcccgcggcacccagcagcgagtcgctggccctggacgaagtgacagccatggacaaccacgtggcagggctcgggcccgcggaggagcggcgtgcgctggtgggtcccggctctccgccccgcagcgcgcccggccagctcccatcgccccgggcgcacagcctcaaccccgacgcctcgggctccagctgcagcctggcccggacgcgctcccgagaaagctgcgccagcgtgcgccgcgcctcgtcggccgacgacatcgaggccatgcgcgccggggtgctgcccccgccaccgcgccacgccagcaccggggccatgcacccactgcgcagcggcttgctcaactccacctcggactccgacctcgtgcgctaccgcaccattagcaagattccccaaatcaccctcaactttgtggacctcaagggcgaccccttcttggcttcgcccaccagtgaccgtgagatcatagcacctaagataaaggagcgaacccacaatgtcactgagaaggtcacccaggtcctgtccctgggcgccgacgtgctgcctgagtacaagctgcaggcaccgcgcatccaccgctggaccatcctgcattacagccccttcaaggccgtgtgggactggctcatcctgctgctggtcatctacacggctgtcttcacaccctactcggctgccttcctgctgaaggagacggaagaaggcccgcctgctaccgagtgtggctacgcctgccagccgctggctgtggtggacctcatcgtggacatcatgttcattgtggacatcctcatcaacttccgcaccacctacgtcaatgccaacgaggaggtggtcagccaccccggccgcatcgccgtccactacttcaagggctggttcctcatcgacatggtggccgccatccccttcgacctgctcatcttcggctctggctctgaggagctgatcgggctgctgaagactgcgcggctgctgcggctggtgcgcgtggcgcggaagctggatcgctactcagagtacggcgcggccgtgctgttcttgctcatgtgcacctttgcgctcatcgcgcactggctagcctgcatctggtacgccatcggcaacatggagcagccacacatggactcacgcatcggctggctgcacaacctgggcgaccagataggcaaaccctacaacagcagcggcctgggcggcccctccatcaaggacaagtatgtgacggcgctctacttcaccttcggcagcctcaccagtgtgggcttcggcaacgtctctcccaacaccaactcagagaagatcttctccatctgcgtcatgctcattggctccctcatgtatgctagcatcttcggcaacgtgtcggccatcatccagcggctgtactcgggcacagcccgctaccacacacagatgctgcgggtgcgggagttcatccgcttccaccagatccccaatcccctgcgccagcgcctcgaggagtacttccagcacgcctggtcctacaccaacggcatcgacatgaacgcggtgctgaagggcttccctgagtgcctgcaggctgacatctgcctgcacctgaaccgctcactgctgcagcactgcaaacccttccgaggggccaccaagggctgccttcgggccctggccatgaagttcaagaccacacatgcaccgccaggggacacactggtgcatgctggggacctgctcaccgccctgtacttcatctcccggggctccatcgagatcctgcggggcgacgtcgtcgtggccatcctggggaagaatgacatctttggggagcctctgaacctgtatgcaaggcctggcaagtcgaacggggatgtgcgggccctcacctactgtgacctacacaagatccatcgggacgacctgctggaggtgctggacatgtaccctgagttctccgaccacttctggtccagcctggagatcaccttcaacctgcgagataccaacatgatcccgggctcccccggcagtacggagttagagggtggcttcagtcggcaacgcaagcgcaagttgtccttccgcaggcgcacggacaaggacacggagcagccaggggaggtgtcggccttggggccgggccgggcgggggcagggccgagtagccggggccggccgggggggccgtggggggagagcccgtccagtggcccctccagccctgagagcagtgaggatgagggcccaggccgcagctccagccccctccgcctggtgcccttctccagccccaggccccccggagagccgccgggtggggagcccctgatggaggactgcgagaagagcagcgacacttgcaaccccctgtcaggcgccttctcaggagtgtccaacattttcagcttctggggggacagtcggggccgccagtaccaggagctccctcgatgccccgcccccacccccagcctcctcaacatccccctctccagcccgggtcggcggccccggggcgacgtggagagcaggctggatgccctccagcgccagctcaacaggctggagacccggctgagtgcagacatggccactgtcctgcagctgctacagaggcagatgacgctggtcccgcccgcctacagtgctgtgaccaccccggggcctggccccacttccacatccccgctgttgcccgtcagccccctccccaccctcaccttggactcgctttctcaggtttcccagttcatggcgtgtgaggagctgcccccgggggccccagagcttccccaagaaggccccacacgacgcctctccctaccgggccagctgggggccctcacctcccagcccctgcacagacacggctcggacccgggcagttagtggggctgcccagtgtggacacgtggctcacccagggatcaaggcgctgctgggccgctccccttggaggccctgctcaggaggccctgaccgtggaaggggagaggaactcgaaagcacagctcctcccccagcccttgggaccatcttctcctgcagtcccctgggccccagtgagaggggcaggggcagggccggcagtaggtggggcctgtggtccccccactgccctgagggcattagctggtctaactgcccggaggcacccggccctgggccttaggcacctcaaggacttttctgctatttactgctcttattgttaaggataataattaaggatcatatgaataattaatgaagatgctgatgactatgaataataaataattatcctgaggaga

SEQ ID NO: 308 - DNA, 3884 bp, Homo sapiens
  source 1..3884: mol_type = genomic DNA
  misc_feature 1..3884: note = cDNA of KCNH2 gene SNP c.1859G>A (p.Ser620Asn)
atgccggtgcggaggggccacgtcgcgccgcagaacaccttcctggacaccatcatccgcaagtttgagggccagagccgtaagttcatcatcgccaacgctcgggtggagaactgcgccgtcatctactgcaacgacggcttctgcgagctgtgcggctactcgcgggccgaggtgatgcagcgaccctgcacctgcgacttcctgcacgggccgcgcacgcagcgccgcgctgccgcgcagatcgcgcaggcactgctgggcgccgaggagcgcaaagtggaaatcgccttctaccggaaagatgggagctgcttcctatgtctggtggatgtggtgcccgtgaagaacgaggatggggctgtcatcatgttcatcctcaatttcgaggtggtgatggagaaggacatggtggggtccccggctcatgacaccaaccaccggggcccccccaccagctggctggccccaggccgcgccaagaccttccgcctgaagctgcccgcgctgctggcgctgacggcccgggagtcgtcggtgcggtcgggcggcgcgggcggcgcgggcgccccgggggccgtggtggtggacgtggacctgacgcccgcggcacccagcagcgagtcgctggccctggacgaagtgacagccatggacaaccacgtggcagggctcgggcccgcggaggagcggcgtgcgctggtgggtcccggctctccgccccgcagcgcgcccggccagctcccatcgccccgggcgcacagcctcaaccccgacgcctcgggctccagctgcagcctggcccggacgcgctcccgagaaagctgcgccagcgtgcgccgcgcctcgtcggccgacgacatcgaggccatgcgcgccggggtgctgcccccgccaccgcgccacgccagcaccggggccatgcacccactgcgcagcggcttgctcaactccacctcggactccgacctcgtgcgctaccgcaccattagcaagattccccaaatcaccctcaactttgtggacctcaagggcgaccccttcttggcttcgcccaccagtgaccgtgagatcatagcacctaagataaaggagcgaacccacaatgtcactgagaaggtcacccaggtcctgtccctgggcgccgacgtgctgcctgagtacaagctgcaggcaccgcgcatccaccgctggaccatcctgcattacagccccttcaaggccgtgtgggactggctcatcctgctgctggtcatctacacggctgtcttcacaccctactcggctgccttcctgctgaaggagacggaagaaggcccgcctgctaccgagtgtggctacgcctgccagccgctggctgtggtggacctcatcgtggacatcatgttcattgtggacatcctcatcaacttccgcaccacctacgtcaatgccaacgaggaggtggtcagccaccccggccgcatcgccgtccactacttcaagggctggttcctcatcgacatggtggccgccatccccttcgacctgctcatcttcggctctggctctgaggagctgatcgggctgctgaagactgcgcggctgctgcggctggtgcgcgtggcgcggaagctggatcgctactcagagtacggcgcggccgtgctgttcttgctcatgtgcacctttgcgctcatcgcgcactggctagcctgcatctggtacgccatcggcaacatggagcagccacacatggactcacgcatcggctggctgcacaacctgggcgaccagataggcaaaccctacaacagcagcggcctgggcggcccctccatcaaggacaagtatgtgacggcgctctacttcaccttcaacagcctcaccagtgtgggcttcggcaacgtctctcccaacaccaactcagagaagatcttctccatctgcgtcatgctcattggctccctcatgtatgctagcatcttcggcaacgtgtcggccatcatccagcggctgtactcgggcacagcccgctaccacacacagatgctgcgggtgcgggagttcatccgcttccaccagatccccaatcccctgcgccagcgcctcgaggagtacttccagcacgcctggtcctacaccaacggcatcgacatgaacgcggtgctgaagggcttccctgagtgcctgcaggctgacatctgcctgcacctgaaccgctcactgctgcagcactgcaaacccttccgaggggccaccaagggctgccttcgggccctggccatgaagttcaagaccacacatgcaccgccaggggacacactggtgcatgctggggacctgctcaccgccctgtacttcatctcccggggctccatcgagatcctgcggggcgacgtcgtcgtggccatcctggggaagaatgacatctttggggagcctctgaacctgtatgcaaggcctggcaagtcgaacggggatgtgcgggccctcacctactgtgacctacacaagatccatcgggacgacctgctggaggtgctggacatgtaccctgagttctccgaccacttctggtccagcctggagatcaccttcaacctgcgagataccaacatgatcccgggctcccccggcagtacggagttagagggtggcttcagtcggcaacgcaagcgcaagttgtccttccgcaggcgcacggacaaggacacggagcagccaggggaggtgtcggccttggggccgggccgggcgggggcagggccgagtagccggggccggccgggggggccgtggggggagagcccgtccagtggcccctccagccctgagagcagtgaggatgagggcccaggccgcagctccagccccctccgcctggtgcccttctccagccccaggccccccggagagccgccgggtggggagcccctgatggaggactgcgagaagagcagcgacacttgcaaccccctgtcaggcgccttctcaggagtgtccaacattttcagcttctggggggacagtcggggccgccagtaccaggagctccctcgatgccccgcccccacccccagcctcctcaacatccccctctccagcccgggtcggcggccccggggcgacgtggagagcaggctggatgccctccagcgccagctcaacaggctggagacccggctgagtgcagacatggccactgtcctgcagctgctacagaggcagatgacgctggtcccgcccgcctacagtgctgtgaccaccccggggcctggccccacttccacatccccgctgttgcccgtcagccccctccccaccctcaccttggactcgctttctcaggtttcccagttcatggcgtgtgaggagctgcccccgggggccccagagcttccccaagaaggccccacacgacgcctctccctaccgggccagctgggggccctcacctcccagcccctgcacagacacggctcggacccgggcagttagtggggctgcccagtgtggacacgtggctcacccagggatcaaggcgctgctgggccgctccccttggaggccctgctcaggaggccctgaccgtggaaggggagaggaactcgaaagcacagctcctcccccagcccttgggaccatcttctcctgcagtcccctgggccccagtgagaggggcaggggcagggccggcagtaggtggggcctgtggtccccccactgccctgagggcattagctggtctaactgcccggaggcacccggccctgggccttaggcacctcaaggacttttctgctatttactgctcttattgttaaggataataattaaggatcatatgaataattaatgaagatgctgatgactatgaataataaataattatcctgaggaga

SEQ ID NO: 309 - DNA, 3884 bp, Homo sapiens
  source 1..3884: mol_type = genomic DNA
  misc_feature 1..3884: note = cDNA of KCNH2 gene SNP c.185G>A (p.Arg62Gln)
atgccggtgcggaggggccacgtcgcgccgcagaacaccttcctggacaccatcatccgcaagtttgagggccagagccgtaagttcatcatcgccaacgctcgggtggagaactgcgccgtcatctactgcaacgacggcttctgcgagctgtgcggctactcgcgggccgaggtgatgcagcaaccctgcacctgcgacttcctgcacgggccgcgcacgcagcgccgcgctgccgcgcagatcgcgcaggcactgctgggcgccgaggagcgcaaagtggaaatcgccttctaccggaaagatgggagctgcttcctatgtctggtggatgtggtgcccgtgaagaacgaggatggggctgtcatcatgttcatcctcaatttcgaggtggtgatggagaaggacatggtggggtccccggctcatgacaccaaccaccggggcccccccaccagctggctggccccaggccgcgccaagaccttccgcctgaagctgcccgcgctgctggcgctgacggcccgggagtcgtcggtgcggtcgggcggcgcgggcggcgcgggcgccccgggggccgtggtggtggacgtggacctgacgcccgcggcacccagcagcgagtcgctggccctggacgaagtgacagccatggacaaccacgtggcagggctcgggcccgcggaggagcggcgtgcgctggtgggtcccggctctccgccccgcagcgcgcccggccagctcccatcgccccgggcgcacagcctcaaccccgacgcctcgggctccagctgcagcctggcccggacgcgctcccgagaaagctgcgccagcgtgcgccgcgcctcgtcggccgacgacatcgaggccatgcgcgccggggtgctgcccccgccaccgcgccacgccagcaccggggccatgcacccactgcgcagcggcttgctcaactccacctcggactccgacctcgtgcgctaccgcaccattagcaagattccccaaatcaccctcaactttgtggacctcaagggcgaccccttcttggcttcgcccaccagtgaccgtgagatcatagcacctaagataaaggagcgaacccacaatgtcactgagaaggtcacccaggtcctgtccctgggcgccgacgtgctgcctgagtacaagctgcaggcaccgcgcatccaccgctggaccatcctgcattacagccccttcaaggccgtgtgggactggctcatcctgctgctggtcatctacacggctgtcttcacaccctactcggctgccttcctgctgaaggagacggaagaaggcccgcctgctaccgagtgtggctacgcctgccagccgctggctgtggtggacctcatcgtggacatcatgttcattgtggacatcctcatcaacttccgcaccacctacgtcaatgccaacgaggaggtggtcagccaccccggccgcatcgccgtccactacttcaagggctggttcctcatcgacatggtggccgccatccccttcgacctgctcatcttcggctctggctctgaggagctgatcgggctgctgaagactgcgcggctgctgcggctggtgcgcgtggcgcggaagctggatcgctactcagagtacggcgcggccgtgctgttcttgctcatgtgcacctttgcgctcatcgcgcactggctagcctgcatctggtacgccatcggcaacatggagcagccacacatggactcacgcatcggctggctgcacaacctgggcgaccagataggcaaaccctacaacagcagcggcctgggcggcccctccatcaaggacaagtatgtgacggcgctctacttcaccttcagcagcctcaccagtgtgggcttcggcaacgtctctcccaacaccaactcagagaagatcttctccatctgcgtcatgctcattggctccctcatgtatgctagcatcttcggcaacgtgtcggccatcatccagcggctgtactcgggcacagcccgctaccacacacagatgctgcgggtgcgggagttcatccgcttccaccagatccccaatcccctgcgccagcgcctcgaggagtacttccagcacgcctggtcctacaccaacggcatcgacatgaacgcggtgctgaagggcttccctgagtgcctgcaggctgacatctgcctgcacctgaaccgctcactgctgcagcactgcaaacccttccgaggggccaccaagggctgccttcgggccctggccatgaagttcaagaccacacatgcaccgccaggggacacactggtgcatgctggggacctgctcaccgccctgtacttcatctcccggggctccatcgagatcctgcggggcgacgtcgtcgtggccatcctggggaagaatgacatctttggggagcctctgaacctgtatgcaaggcctggcaagtcgaacggggatgtgcgggccctcacctactgtgacctacacaagatccatcgggacgacctgctggaggtgctggacatgtaccctgagttctccgaccacttctggtccagcctggagatcaccttcaacctgcgagataccaacatgatcccgggctcccccggcagtacggagttagagggtggcttcagtcggcaacgcaagcgcaagttgtccttccgcaggcgcacggacaaggacacggagcagccaggggaggtgtcggccttggggccgggccgggcgggggcagggccgagtagccggggccggccgggggggccgtggggggagagcccgtccagtggcccctccagccctgagagcagtgaggatgagggcccaggccgcagctccagccccctccgcctggtgcccttctccagccccaggccccccggagagccgccgggtggggagcccctgatggaggactgcgagaagagcagcgacacttgcaaccccctgtcaggcgccttctcaggagtgtccaacattttcagcttctggggggacagtcggggccgccagtaccaggagctccctcgatgccccgcccccacccccagcctcctcaacatccccctctccagcccgggtcggcggccccggggcgacgtggagagcaggctggatgccctccagcgccagctcaacaggctggagacccggctgagtgcagacatggccactgtcctgcagctgctacagaggcagatgacgctggtcccgcccgcctacagtgctgtgaccaccccggggcctggccccacttccacatccccgctgttgcccgtcagccccctccccaccctcaccttggactcgctttctcaggtttcccagttcatggcgtgtgaggagctgcccccgggggccccagagcttccccaagaaggccccacacgacgcctctccctaccgggccagctgggggccctcacctcccagcccctgcacagacacggctcggacccgggcagttagtggggctgcccagtgtggacacgtggctcacccagggatcaaggcgctgctgggccgctccccttggaggccctgctcaggaggccctgaccgtggaaggggagaggaactcgaaagcacagctcctcccccagcccttgggaccatcttctcctgcagtcccctgggccccagtgagaggggcaggggcagggccggcagtaggtggggcctgtggtccccccactgccctgagggcattagctggtctaactgcccggaggcacccggccctgggccttaggcacctcaaggacttttctgctatttactgctcttattgttaaggataataattaaggatcatatgaataattaatgaagatgctgatgactatgaataataaataattatcctgaggaga

SEQ ID NO: 310 - DNA, 3884 bp, Homo sapiens
  source 1..3884: mol_type = genomic DNA
  misc_feature 1..3884: note = cDNA of KCNH2 gene SNP c.1862G>A (p.Ser621Asn)
atgccggtgcggaggggccacgtcgcgccgcagaacaccttcctggacaccatcatccgcaagtttgagggccagagccgtaagttcatcatcgccaacgctcgggtggagaactgcgccgtcatctactgcaacgacggcttctgcgagctgtgcggctactcgcgggccgaggtgatgcagcgaccctgcacctgcgacttcctgcacgggccgcgcacgcagcgccgcgctgccgcgcagatcgcgcaggcactgctgggcgccgaggagcgcaaagtggaaatcgccttctaccggaaagatgggagctgcttcctatgtctggtggatgtggtgcccgtgaagaacgaggatggggctgtcatcatgttcatcctcaatttcgaggtggtgatggagaaggacatggtggggtccccggctcatgacaccaaccaccggggcccccccaccagctggctggccccaggccgcgccaagaccttccgcctgaagctgcccgcgctgctggcgctgacggcccgggagtcgtcggtgcggtcgggcggcgcgggcggcgcgggcgccccgggggccgtggtggtggacgtggacctgacgcccgcggcacccagcagcgagtcgctggccctggacgaagtgacagccatggacaaccacgtggcagggctcgggcccgcggaggagcggcgtgcgctggtgggtcccggctctccgccccgcagcgcgcccggccagctcccatcgccccgggcgcacagcctcaaccccgacgcctcgggctccagctgcagcctggcccggacgcgctcccgagaaagctgcgccagcgtgcgccgcgcctcgtcggccgacgacatcgaggccatgcgcgccggggtgctgcccccgccaccgcgccacgccagcaccggggccatgcacccactgcgcagcggcttgctcaactccacctcggactccgacctcgtgcgctaccgcaccattagcaagattccccaaatcaccctcaactttgtggacctcaagggcgaccccttcttggcttcgcccaccagtgaccgtgagatcatagcacctaagataaaggagcgaacccacaatgtcactgagaaggtcacccaggtcctgtccctgggcgccgacgtgctgcctgagtacaagctgcaggcaccgcgcatccaccgctggaccatcctgcattacagccccttcaaggccgtgtgggactggctcatcctgctgctggtcatctacacggctgtcttcacaccctactcggctgccttcctgctgaaggagacggaagaaggcccgcctgctaccgagtgtggctacgcctgccagccgctggctgtggtggacctcatcgtggacatcatgttcattgtggacatcctcatcaacttccgcaccacctacgtcaatgccaacgaggaggtggtcagccaccccggccgcatcgccgtccactacttcaagggctggttcctcatcgacatggtggccgccatccccttcgacctgctcatcttcggctctggctctgaggagctgatcgggctgctgaagactgcgcggctgctgcggctggtgcgcgtggcgcggaagctggatcgctactcagagtacggcgcggccgtgctgttcttgctcatgtgcacctttgcgctcatcgcgcactggctagcctgcatctggtacgccatcggcaacatggagcagccacacatggactcacgcatcggctggctgcacaacctgggcgaccagataggcaaaccctacaacagcagcggcctgggcggcccctccatcaaggacaagtatgtgacggcgctctacttcaccttcagcaacctcaccagtgtgggcttcggcaacgtctctcccaacaccaactcagagaagatcttctccatctgcgtcatgctcattggctccctcatgtatgctagcatcttcggcaacgtgtcggccatcatccagcggctgtactcgggcacagcccgctaccacacacagatgctgcgggtgcgggagttcatccgcttccaccagatccccaatcccctgcgccagcgcctcgaggagtacttccagcacgcctggtcctacaccaacggcatcgacatgaacgcggtgctgaagggcttccctgagtgcctgcaggctgacatctgcctgcacctgaaccgctcactgctgcagcactgcaaacccttccgaggggccaccaagggctgccttcgggccctggccatgaagttcaagaccacacatgcaccgccaggggacacactggtgcatgctggggacctgctcaccgccctgtacttcatctcccggggctccatcgagatcctgcggggcgacgtcgtcgtggccatcctggggaagaatgacatctttggggagcctctgaacctgtatgcaaggcctggcaagtcgaacggggatgtgcgggccctcacctactgtgacctacacaagatccatcgggacgacctgctggaggtgctggacatgtaccctgagttctccgaccacttctggtccagcctggagatcaccttcaacctgcgagataccaacatgatcccgggctcccccggcagtacggagttagagggtggcttcagtcggcaacgcaagcgcaagttgtccttccgcaggcgcacggacaaggacacggagcagccaggggaggtgtcggccttggggccgggccgggcgggggcagggccgagtagccggggccggccgggggggccgtggggggagagcccgtccagtggcccctccagccctgagagcagtgaggatgagggcccaggccgcagctccagccccctccgcctggtgcccttctccagccccaggccccccggagagccgccgggtggggagcccctgatggaggactgcgagaagagcagcgacacttgcaaccccctgtcaggcgccttctcaggagtgtccaacattttcagcttctggggggacagtcggggccgccagtaccaggagctccctcgatgccccgcccccacccccagcctcctcaacatccccctctccagcccgggtcggcggccccggggcgacgtggagagcaggctggatgccctccagcgccagctcaacaggctggagacccggctgagtgcagacatggccactgtcctgcagctgctacagaggcagatgacgctggtcccgcccgcctacagtgctgtgaccaccccggggcctggccccacttccacatccccgctgttgcccgtcagccccctccccaccctcaccttggactcgctttctcaggtttcccagttcatggcgtgtgaggagctgcccccgggggccccagagcttccccaagaaggccccacacgacgcctctccctaccgggccagctgggggccctcacctcccagcccctgcacagacacggctcggacccgggcagttagtggggctgcccagtgtggacacgtggctcacccagggatcaaggcgctgctgggccgctccccttggaggccctgctcaggaggccctgaccgtggaaggggagaggaactcgaaagcacagctcctcccccagcccttgggaccatcttctcctgcagtcccctgggccccagtgagaggggcaggggcagggccggcagtaggtggggcctgtggtccccccactgccctgagggcattagctggtctaactgcccggaggcacccggccctgggccttaggcacctcaaggacttttctgctatttactgctcttattgttaaggataataattaaggatcatatgaataattaatgaagatgctgatgactatgaataataaataattatcctgaggaga

SEQ ID NO: 311 - DNA, 3884 bp, Homo sapiens
  source 1..3884: mol_type = genomic DNA
  misc_feature 1..3884: note = cDNA of KCNH2 gene SNP c.1863C>G (p.Ser621Arg)
atgccggtgcggaggggccacgtcgcgccgcagaacaccttcctggacaccatcatccgcaagtttgagggccagagccgtaagttcatcatcgccaacgctcgggtggagaactgcgccgtcatctactgcaacgacggcttctgcgagctgtgcggctactcgcgggccgaggtgatgcagcgaccctgcacctgcgacttcctgcacgggccgcgcacgcagcgccgcgctgccgcgcagatcgcgcaggcactgctgggcgccgaggagcgcaaagtggaaatcgccttctaccggaaagatgggagctgcttcctatgtctggtggatgtggtgcccgtgaagaacgaggatggggctgtcatcatgttcatcctcaatttcgaggtggtgatggagaaggacatggtggggtccccggctcatgacaccaaccaccggggcccccccaccagctggctggccccaggccgcgccaagaccttccgcctgaagctgcccgcgctgctggcgctgacggcccgggagtcgtcggtgcggtcgggcggcgcgggcggcgcgggcgccccgggggccgtggtggtggacgtggacctgacgcccgcggcacccagcagcgagtcgctggccctggacgaagtgacagccatggacaaccacgtggcagggctcgggcccgcggaggagcggcgtgcgctggtgggtcccggctctccgccccgcagcgcgcccggccagctcccatcgccccgggcgcacagcctcaaccccgacgcctcgggctccagctgcagcctggcccggacgcgctcccgagaaagctgcgccagcgtgcgccgcgcctcgtcggccgacgacatcgaggccatgcgcgccggggtgctgcccccgccaccgcgccacgccagcaccggggccatgcacccactgcgcagcggcttgctcaactccacctcggactccgacctcgtgcgctaccgcaccattagcaagattccccaaatcaccctcaactttgtggacctcaagggcgaccccttcttggcttcgcccaccagtgaccgtgagatcatagcacctaagataaaggagcgaacccacaatgtcactgagaaggtcacccaggtcctgtccctgggcgccgacgtgctgcctgagtacaagctgcaggcaccgcgcatccaccgctggaccatcctgcattacagccccttcaaggccgtgtgggactggctcatcctgctgctggtcatctacacggctgtcttcacaccctactcggctgccttcctgctgaaggagacggaagaaggcccgcctgctaccgagtgtggctacgcctgccagccgctggctgtggtggacctcatcgtggacatcatgttcattgtggacatcctcatcaacttccgcaccacctacgtcaatgccaacgaggaggtggtcagccaccccggccgcatcgccgtccactacttcaagggctggttcctcatcgacatggtggccgccatccccttcgacctgctcatcttcggctctggctctgaggagctgatcgggctgctgaagactgcgcggctgctgcggctggtgcgcgtggcgcggaagctggatcgctactcagagtacggcgcggccgtgctgttcttgctcatgtgcacctttgcgctcatcgcgcactggctagcctgcatctggtacgccatcggcaacatggagcagccacacatggactcacgcatcggctggctgcacaacctgggcgaccagataggcaaaccctacaacagcagcggcctgggcggcccctccatcaaggacaagtatgtgacggcgctctacttcaccttcagcaggctcaccagtgtgggcttcggcaacgtctctcccaacaccaactcagagaagatcttctccatctgcgtcatgctcattggctccctcatgtatgctagcatcttcggcaacgtgtcggccatcatccagcggctgtactcgggcacagcccgctaccacacacagatgctgcgggtgcgggagttcatccgcttccaccagatccccaatcccctgcgccagcgcctcgaggagtacttccagcacgcctggtcctacaccaacggcatcgacatgaacgcggtgctgaagggcttccctgagtgcctgcaggctgacatctgcctgcacctgaaccgctcactgctgcagcactgcaaacccttccgaggggccaccaagggctgccttcgggccctggccatgaagttcaagaccacacatgcaccgccaggggacacactggtgcatgctggggacctgctcaccgccctgtacttcatctcccggggctccatcgagatcctgcggggcgacgtcgtcgtggccatcctggggaagaatgacatctttggggagcctctgaacctgtatgcaaggcctggcaagtcgaacggggatgtgcgggccctcacctactgtgacctacacaagatccatcgggacgacctgctggaggtgctggacatgtaccctgagttctccgaccacttctggtccagcctggagatcaccttcaacctgcgagataccaacatgatcccgggctcccccggcagtacggagttagagggtggcttcagtcggcaacgcaagcgcaagttgtccttccgcaggcgcacggacaaggacacggagcagccaggggaggtgtcggccttggggccgggccgggcgggggcagggccgagtagccggggccggccgggggggccgtggggggagagcccgtccagtggcccctccagccctgagagcagtgaggatgagggcccaggccgcagctccagccccctccgcctggtgcccttctccagccccaggccccccggagagccgccgggtggggagcccctgatggaggactgcgagaagagcagcgacacttgcaaccccctgtcaggcgccttctcaggagtgtccaacattttcagcttctggggggacagtcggggccgccagtaccaggagctccctcgatgccccgcccccacccccagcctcctcaacatccccctctccagcccgggtcggcggccccggggcgacgtggagagcaggctggatgccctccagcgccagctcaacaggctggagacccggctgagtgcagacatggccactgtcctgcagctgctacagaggcagatgacgctggtcccgcccgcctacagtgctgtgaccaccccggggcctggccccacttccacatccccgctgttgcccgtcagccccctccccaccctcaccttggactcgctttctcaggtttcccagttcatggcgtgtgaggagctgcccccgggggccccagagcttccccaagaaggccccacacgacgcctctccctaccgggccagctgggggccctcacctcccagcccctgcacagacacggctcggacccgggcagttagtggggctgcccagtgtggacacgtggctcacccagggatcaaggcgctgctgggccgctccccttggaggccctgctcaggaggccctgaccgtggaaggggagaggaactcgaaagcacagctcctcccccagcccttgggaccatcttctcctgcagtcccctgggccccagtgagaggggcaggggcagggccggcagtaggtggggcctgtggtccccccactgccctgagggcattagctggtctaactgcccggaggcacccggccctgggccttaggcacctcaaggacttttctgctatttactgctcttattgttaaggataataattaaggatcatatgaataattaatgaagatgctgatgactatgaataataaataattatcctgaggaga

SEQ ID NO: 312 - DNA, 3884 bp, Homo sapiens
  source 1..3884: mol_type = genomic DNA
  misc_feature 1..3884: note = cDNA of KCNH2 gene SNP c.1864C>T (p.Leu622Phe)
atgccggtgcggaggggccacgtcgcgccgcagaacaccttcctggacaccatcatccgcaagtttgagggccagagccgtaagttcatcatcgccaacgctcgggtggagaactgcgccgtcatctactgcaacgacggcttctgcgagctgtgcggctactcgcgggccgaggtgatgcagcgaccctgcacctgcgacttcctgcacgggccgcgcacgcagcgccgcgctgccgcgcagatcgcgcaggcactgctgggcgccgaggagcgcaaagtggaaatcgccttctaccggaaagatgggagctgcttcctatgtctggtggatgtggtgcccgtgaagaacgaggatggggctgtcatcatgttcatcctcaatttcgaggtggtgatggagaaggacatggtggggtccccggctcatgacaccaaccaccggggcccccccaccagctggctggccccaggccgcgccaagaccttccgcctgaagctgcccgcgctgctggcgctgacggcccgggagtcgtcggtgcggtcgggcggcgcgggcggcgcgggcgccccgggggccgtggtggtggacgtggacctgacgcccgcggcacccagcagcgagtcgctggccctggacgaagtgacagccatggacaaccacgtggcagggctcgggcccgcggaggagcggcgtgcgctggtgggtcccggctctccgccccgcagcgcgcccggccagctcccatcgccccgggcgcacagcctcaaccccgacgcctcgggctccagctgcagcctggcccggacgcgctcccgagaaagctgcgccagcgtgcgccgcgcctcgtcggccgacgacatcgaggccatgcgcgccggggtgctgcccccgccaccgcgccacgccagcaccggggccatgcacccactgcgcagcggcttgctcaactccacctcggactccgacctcgtgcgctaccgcaccattagcaagattccccaaatcaccctcaactttgtggacctcaagggcgaccccttcttggcttcgcccaccagtgaccgtgagatcatagcacctaagataaaggagcgaacccacaatgtcactgagaaggtcacccaggtcctgtccctgggcgccgacgtgctgcctgagtacaagctgcaggcaccgcgcatccaccgctggaccatcctgcattacagccccttcaaggccgtgtgggactggctcatcctgctgctggtcatctacacggctgtcttcacaccctactcggctgccttcctgctgaaggagacggaagaaggcccgcctgctaccgagtgtggctacgcctgccagccgctggctgtggtggacctcatcgtggacatcatgttcattgtggacatcctcatcaacttccgcaccacctacgtcaatgccaacgaggaggtggtcagccaccccggccgcatcgccgtccactacttcaagggctggttcctcatcgacatggtggccgccatccccttcgacctgctcatcttcggctctggctctgaggagctgatcgggctgctgaagactgcgcggctgctgcggctggtgcgcgtggcgcggaagctggatcgctactcagagtacggcgcggccgtgctgttcttgctcatgtgcacctttgcgctcatcgcgcactggctagcctgcatctggtacgccatcggcaacatggagcagccacacatggactcacgcatcggctggctgcacaacctgggcgaccagataggcaaaccctacaacagcagcggcctgggcggcccctccatcaaggacaagtatgtgacggcgctctacttcaccttcagcagcttcaccagtgtgggcttcggcaacgtctctcccaacaccaactcagagaagatcttctccatctgcgtcatgctcattggctccctcatgtatgctagcatcttcggcaacgtgtcggccatcatccagcggctgtactcgggcacagcccgctaccacacacagatgctgcgggtgcgggagttcatccgcttccaccagatccccaatcccctgcgccagcgcctcgaggagtacttccagcacgcctggtcctacaccaacggcatcgacatgaacgcggtgctgaagggcttccctgagtgcctgcaggctgacatctgcctgcacctgaaccgctcactgctgcagcactgcaaacccttccgaggggccaccaagggctgccttcgggccctggccatgaagttcaagaccacacatgcaccgccaggggacacactggtgcatgctggggacctgctcaccgccctgtacttcatctcccggggctccatcgagatcctgcggggcgacgtcgtcgtggccatcctggggaagaatgacatctttggggagcctctgaacctgtatgcaaggcctggcaagtcgaacggggatgtgcgggccctcacctactgtgacctacacaagatccatcgggacgacctgctggaggtgctggacatgtaccctgagttctccgaccacttctggtccagcctggagatcaccttcaacctgcgagataccaacatgatcccgggctcccccggcagtacggagttagagggtggcttcagtcggcaacgcaagcgcaagttgtccttccgcaggcgcacggacaaggacacggagcagccaggggaggtgtcggccttggggccgggccgggcgggggcagggccgagtagccggggccggccgggggggccgtggggggagagcccgtccagtggcccctccagccctgagagcagtgaggatgagggcccaggccgcagctccagccccctccgcctggtgcccttctccagccccaggccccccggagagccgccgggtggggagcccctgatggaggactgcgagaagagcagcgacacttgcaaccccctgtcaggcgccttctcaggagtgtccaacattttcagcttctggggggacagtcggggccgccagtaccaggagctccctcgatgccccgcccccacccccagcctcctcaacatccccctctccagcccgggtcggcggccccggggcgacgtggagagcaggctggatgccctccagcgccagctcaacaggctggagacccggctgagtgcagacatggccactgtcctgcagctgctacagaggcagatgacgctggtcccgcccgcctacagtgctgtgaccaccccggggcctggccccacttccacatccccgctgttgcccgtcagccccctccccaccctcaccttggactcgctttctcaggtttcccagttcatggcgtgtgaggagctgcccccgggggccccagagcttccccaagaaggccccacacgacgcctctccctaccgggccagctgggggccctcacctcccagcccctgcacagacacggctcggacccgggcagttagtggggctgcccagtgtggacacgtggctcacccagggatcaaggcgctgctgggccgctccccttggaggccctgctcaggaggccctgaccgtggaaggggagaggaactcgaaagcacagctcctcccccagcccttgggaccatcttctcctgcagtcccctgggccccagtgagaggggcaggggcagggccggcagtaggtggggcctgtggtccccccactgccctgagggcattagctggtctaactgcccggaggcacccggccctgggccttaggcacctcaaggacttttctgctatttactgctcttattgttaaggataataattaaggatcatatgaataattaatgaagatgctgatgactatgaataataaataattatcctgaggaga

SEQ ID NO: 313 - DNA, 3884 bp, Homo sapiens
  source 1..3884: mol_type = genomic DNA
  misc_feature 1..3884: note = cDNA of KCNH2 gene SNP c.1868C>T (p.Thr623Ile)
atgccggtgcggaggggccacgtcgcgccgcagaacaccttcctggacaccatcatccgcaagtttgagggccagagccgtaagttcatcatcgccaacgctcgggtggagaactgcgccgtcatctactgcaacgacggcttctgcgagctgtgcggctactcgcgggccgaggtgatgcagcgaccctgcacctgcgacttcctgcacgggccgcgcacgcagcgccgcgctgccgcgcagatcgcgcaggcactgctgggcgccgaggagcgcaaagtggaaatcgccttctaccggaaagatgggagctgcttcctatgtctggtggatgtggtgcccgtgaagaacgaggatggggctgtcatcatgttcatcctcaatttcgaggtggtgatggagaaggacatggtggggtccccggctcatgacaccaaccaccggggcccccccaccagctggctggccccaggccgcgccaagaccttccgcctgaagctgcccgcgctgctggcgctgacggcccgggagtcgtcggtgcggtcgggcggcgcgggcggcgcgggcgccccgggggccgtggtggtggacgtggacctgacgcccgcggcacccagcagcgagtcgctggccctggacgaagtgacagccatggacaaccacgtggcagggctcgggcccgcggaggagcggcgtgcgctggtgggtcccggctctccgccccgcagcgcgcccggccagctcccatcgccccgggcgcacagcctcaaccccgacgcctcgggctccagctgcagcctggcccggacgcgctcccgagaaagctgcgccagcgtgcgccgcgcctcgtcggccgacgacatcgaggccatgcgcgccggggtgctgcccccgccaccgcgccacgccagcaccggggccatgcacccactgcgcagcggcttgctcaactccacctcggactccgacctcgtgcgctaccgcaccattagcaagattccccaaatcaccctcaactttgtggacctcaagggcgaccccttcttggcttcgcccaccagtgaccgtgagatcatagcacctaagataaaggagcgaacccacaatgtcactgagaaggtcacccaggtcctgtccctgggcgccgacgtgctgcctgagtacaagctgcaggcaccgcgcatccaccgctggaccatcctgcattacagccccttcaaggccgtgtgggactggctcatcctgctgctggtcatctacacggctgtcttcacaccctactcggctgccttcctgctgaaggagacggaagaaggcccgcctgctaccgagtgtggctacgcctgccagccgctggctgtggtggacctcatcgtggacatcatgttcattgtggacatcctcatcaacttccgcaccacctacgtcaatgccaacgaggaggtggtcagccaccccggccgcatcgccgtccactacttcaagggctggttcctcatcgacatggtggccgccatccccttcgacctgctcatcttcggctctggctctgaggagctgatcgggctgctgaagactgcgcggctgctgcggctggtgcgcgtggcgcggaagctggatcgctactcagagtacggcgcggccgtgctgttcttgctcatgtgcacctttgcgctcatcgcgcactggctagcctgcatctggtacgccatcggcaacatggagcagccacacatggactcacgcatcggctggctgcacaacctgggcgaccagataggcaaaccctacaacagcagcggcctgggcggcccctccatcaaggacaagtatgtgacggcgctctacttcaccttcagcagcctcatcagtgtgggcttcggcaacgtctctcccaacaccaactcagagaagatcttctccatctgcgtcatgctcattggctccctcatgtatgctagcatcttcggcaacgtgtcggccatcatccagcggctgtactcgggcacagcccgctaccacacacagatgctgcgggtgcgggagttcatccgcttccaccagatccccaatcccctgcgccagcgcctcgaggagtacttccagcacgcctggtcctacaccaacggcatcgacatgaacgcggtgctgaagggcttccctgagtgcctgcaggctgacatctgcctgcacctgaaccgctcactgctgcagcactgcaaacccttccgaggggccaccaagggctgccttcgggccctggccatgaagttcaagaccacacatgcaccgccaggggacacactggtgcatgctggggacctgctcaccgccctgtacttcatctcccggggctccatcgagatcctgcggggcgacgtcgtcgtggccatcctggggaagaatgacatctttggggagcctctgaacctgtatgcaaggcctggcaagtcgaacggggatgtgcgggccctcacctactgtgacctacacaagatccatcgggacgacctgctggaggtgctggacatgtaccctgagttctccgaccacttctggtccagcctggagatcaccttcaacctgcgagataccaacatgatcccgggctcccccggcagtacggagttagagggtggcttcagtcggcaacgcaagcgcaagttgtccttccgcaggcgcacggacaaggacacggagcagccaggggaggtgtcggccttggggccgggccgggcgggggcagggccgagtagccggggccggccgggggggccgtggggggagagcccgtccagtggcccctccagccctgagagcagtgaggatgagggcccaggccgcagctccagccccctccgcctggtgcccttctccagccccaggccccccggagagccgccgggtggggagcccctgatggaggactgcgagaagagcagcgacacttgcaaccccctgtcaggcgccttctcaggagtgtccaacattttcagcttctggggggacagtcggggccgccagtaccaggagctccctcgatgccccgcccccacccccagcctcctcaacatccccctctccagcccgggtcggcggccccggggcgacgtggagagcaggctggatgccctccagcgccagctcaacaggctggagacccggctgagtgcagacatggccactgtcctgcagctgctacagaggcagatgacgctggtcccgcccgcctacagtgctgtgaccaccccggggcctggccccacttccacatccccgctgttgcccgtcagccccctccccaccctcaccttggactcgctttctcaggtttcccagttcatggcgtgtgaggagctgcccccgggggccccagagcttccccaagaaggccccacacgacgcctctccctaccgggccagctgggggccctcacctcccagcccctgcacagacacggctcggacccgggcagttagtggggctgcccagtgtggacacgtggctcacccagggatcaaggcgctgctgggccgctccccttggaggccctgctcaggaggccctgaccgtggaaggggagaggaactcgaaagcacagctcctcccccagcccttgggaccatcttctcctgcagtcccctgggccccagtgagaggggcaggggcagggccggcagtaggtggggcctgtggtccccccactgccctgagggcattagctggtctaactgcccggaggcacccggccctgggccttaggcacctcaaggacttttctgctatttactgctcttattgttaaggataataattaaggatcatatgaataattaatgaagatgctgatgactatgaataataaataattatcctgaggaga

SEQ ID NO: 314 - DNA, 3884 bp, Homo sapiens
  source 1..3884: mol_type = genomic DNA
  misc_feature 1..3884: note = cDNA of KCNH2 gene SNP c.1870A>T (p.Ser624Cys)
atgccggtgcggaggggccacgtcgcgccgcagaacaccttcctggacaccatcatccgcaagtttgagggccagagccgtaagttcatcatcgccaacgctcgggtggagaactgcgccgtcatctactgcaacgacggcttctgcgagctgtgcggctactcgcgggccgaggtgatgcagcgaccctgcacctgcgacttcctgcacgggccgcgcacgcagcgccgcgctgccgcgcagatcgcgcaggcactgctgggcgccgaggagcgcaaagtggaaatcgccttctaccggaaagatgggagctgcttcctatgtctggtggatgtggtgcccgtgaagaacgaggatggggctgtcatcatgttcatcctcaatttcgaggtggtgatggagaaggacatggtggggtccccggctcatgacaccaaccaccggggcccccccaccagctggctggccccaggccgcgccaagaccttccgcctgaagctgcccgcgctgctggcgctgacggcccgggagtcgtcggtgcggtcgggcggcgcgggcggcgcgggcgccccgggggccgtggtggtggacgtggacctgacgcccgcggcacccagcagcgagtcgctggccctggacgaagtgacagccatggacaaccacgtggcagggctcgggcccgcggaggagcggcgtgcgctggtgggtcccggctctccgccccgcagcgcgcccggccagctcccatcgccccgggcgcacagcctcaaccccgacgcctcgggctccagctgcagcctggcccggacgcgctcccgagaaagctgcgccagcgtgcgccgcgcctcgtcggccgacgacatcgaggccatgcgcgccggggtgctgcccccgccaccgcgccacgccagcaccggggccatgcacccactgcgcagcggcttgctcaactccacctcggactccgacctcgtgcgctaccgcaccattagcaagattccccaaatcaccctcaactttgtggacctcaagggcgaccccttcttggcttcgcccaccagtgaccgtgagatcatagcacctaagataaaggagcgaacccacaatgtcactgagaaggtcacccaggtcctgtccctgggcgccgacgtgctgcctgagtacaagctgcaggcaccgcgcatccaccgctggaccatcctgcattacagccccttcaaggccgtgtgggactggctcatcctgctgctggtcatctacacggctgtcttcacaccctactcggctgccttcctgctgaaggagacggaagaaggcccgcctgctaccgagtgtggctacgcctgccagccgctggctgtggtggacctcatcgtggacatcatgttcattgtggacatcctcatcaacttccgcaccacctacgtcaatgccaacgaggaggtggtcagccaccccggccgcatcgccgtccactacttcaagggctggttcctcatcgacatggtggccgccatccccttcgacctgctcatcttcggctctggctctgaggagctgatcgggctgctgaagactgcgcggctgctgcggctggtgcgcgtggcgcggaagctggatcgctactcagagtacggcgcggccgtgctgttcttgctcatgtgcacctttgcgctcatcgcgcactggctagcctgcatctggtacgccatcggcaacatggagcagccacacatggactcacgcatcggctggctgcacaacctgggcgaccagataggcaaaccctacaacagcagcggcctgggcggcccctccatcaaggacaagtatgtgacggcgctctacttcaccttcagcagcctcacctgtgtgggcttcggcaacgtctctcccaacaccaactcagagaagatcttctccatctgcgtcatgctcattggctccctcatgtatgctagcatcttcggcaacgtgtcggccatcatccagcggctgtactcgggcacagcccgctaccacacacagatgctgcgggtgcgggagttcatccgcttccaccagatccccaatcccctgcgccagcgcctcgaggagtacttccagcacgcctggtcctacaccaacggcatcgacatgaacgcggtgctgaagggcttccctgagtgcctgcaggctgacatctgcctgcacctgaaccgctcactgctgcagcactgcaaacccttccgaggggccaccaagggctgccttcgggccctggccatgaagttcaagaccacacatgcaccgccaggggacacactggtgcatgctggggacctgctcaccgccctgtacttcatctcccggggctccatcgagatcctgcggggcgacgtcgtcgtggccatcctggggaagaatgacatctttggggagcctctgaacctgtatgcaaggcctggcaagtcgaacggggatgtgcgggccctcacctactgtgacctacacaagatccatcgggacgacctgctggaggtgctggacatgtaccctgagttctccgaccacttctggtccagcctggagatcaccttcaacctgcgagataccaacatgatcccgggctcccccggcagtacggagttagagggtggcttcagtcggcaacgcaagcgcaagttgtccttccgcaggcgcacggacaaggacacggagcagccaggggaggtgtcggccttggggccgggccgggcgggggcagggccgagtagccggggccggccgggggggccgtggggggagagcccgtccagtggcccctccagccctgagagcagtgaggatgagggcccaggccgcagctccagccccctccgcctggtgcccttctccagccccaggccccccggagagccgccgggtggggagcccctgatggaggactgcgagaagagcagcgacacttgcaaccccctgtcaggcgccttctcaggagtgtccaacattttcagcttctggggggacagtcggggccgccagtaccaggagctccctcgatgccccgcccccacccccagcctcctcaacatccccctctccagcccgggtcggcggccccggggcgacgtggagagcaggctggatgccctccagcgccagctcaacaggctggagacccggctgagtgcagacatggccactgtcctgcagctgctacagaggcagatgacgctggtcccgcccgcctacagtgctgtgaccaccccggggcctggccccacttccacatccccgctgttgcccgtcagccccctccccaccctcaccttggactcgctttctcaggtttcccagttcatggcgtgtgaggagctgcccccgggggccccagagcttccccaagaaggccccacacgacgcctctccctaccgggccagctgggggccctcacctcccagcccctgcacagacacggctcggacccgggcagttagtggggctgcccagtgtggacacgtggctcacccagggatcaaggcgctgctgggccgctccccttggaggccctgctcaggaggccctgaccgtggaaggggagaggaactcgaaagcacagctcctcccccagcccttgggaccatcttctcctgcagtcccctgggccccagtgagaggggcaggggcagggccggcagtaggtggggcctgtggtccccccactgccctgagggcattagctggtctaactgcccggaggcacccggccctgggccttaggcacctcaaggacttttctgctatttactgctcttattgttaaggataataattaaggatcatatgaataattaatgaagatgctgatgactatgaataataaataattatcctgaggaga

SEQ ID NO: 315 - DNA, 3884 bp, Homo sapiens
  source 1..3884: mol_type = genomic DNA
  misc_feature 1..3884: note = cDNA of KCNH2 gene SNP c.1873G>C (p.Val625Leu)
atgccggtgcggaggggccacgtcgcgccgcagaacaccttcctggacaccatcatccgcaagtttgagggccagagccgtaagttcatcatcgccaacgctcgggtggagaactgcgccgtcatctactgcaacgacggcttctgcgagctgtgcggctactcgcgggccgaggtgatgcagcgaccctgcacctgcgacttcctgcacgggccgcgcacgcagcgccgcgctgccgcgcagatcgcgcaggcactgctgggcgccgaggagcgcaaagtggaaatcgccttctaccggaaagatgggagctgcttcctatgtctggtggatgtggtgcccgtgaagaacgaggatggggctgtcatcatgttcatcctcaatttcgaggtggtgatggagaaggacatggtggggtccccggctcatgacaccaaccaccggggcccccccaccagctggctggccccaggccgcgccaagaccttccgcctgaagctgcccgcgctgctggcgctgacggcccgggagtcgtcggtgcggtcgggcggcgcgggcggcgcgggcgccccgggggccgtggtggtggacgtggacctgacgcccgcggcacccagcagcgagtcgctggccctggacgaagtgacagccatggacaaccacgtggcagggctcgggcccgcggaggagcggcgtgcgctggtgggtcccggctctccgccccgcagcgcgcccggccagctcccatcgccccgggcgcacagcctcaaccccgacgcctcgggctccagctgcagcctggcccggacgcgctcccgagaaagctgcgccagcgtgcgccgcgcctcgtcggccgacgacatcgaggccatgcgcgccggggtgctgcccccgccaccgcgccacgccagcaccggggccatgcacccactgcgcagcggcttgctcaactccacctcggactccgacctcgtgcgctaccgcaccattagcaagattccccaaatcaccctcaactttgtggacctcaagggcgaccccttcttggcttcgcccaccagtgaccgtgagatcatagcacctaagataaaggagcgaacccacaatgtcactgagaaggtcacccaggtcctgtccctgggcgccgacgtgctgcctgagtacaagctgcaggcaccgcgcatccaccgctggaccatcctgcattacagccccttcaaggccgtgtgggactggctcatcctgctgctggtcatctacacggctgtcttcacaccctactcggctgccttcctgctgaaggagacggaagaaggcccgcctgctaccgagtgtggctacgcctgccagccgctggctgtggtggacctcatcgtggacatcatgttcattgtggacatcctcatcaacttccgcaccacctacgtcaatgccaacgaggaggtggtcagccaccccggccgcatcgccgtccactacttcaagggctggttcctcatcgacatggtggccgccatccccttcgacctgctcatcttcggctctggctctgaggagctgatcgggctgctgaagactgcgcggctgctgcggctggtgcgcgtggcgcggaagctggatcgctactcagagtacggcgcggccgtgctgttcttgctcatgtgcacctttgcgctcatcgcgcactggctagcctgcatctggtacgccatcggcaacatggagcagccacacatggactcacgcatcggctggctgcacaacctgggcgaccagataggcaaaccctacaacagcagcggcctgggcggcccctccatcaaggacaagtatgtgacggcgctctacttcaccttcagcagcctcaccagtctgggcttcggcaacgtctctcccaacaccaactcagagaagatcttctccatctgcgtcatgctcattggctccctcatgtatgctagcatcttcggcaacgtgtcggccatcatccagcggctgtactcgggcacagcccgctaccacacacagatgctgcgggtgcgggagttcatccgcttccaccagatccccaatcccctgcgccagcgcctcgaggagtacttccagcacgcctggtcctacaccaacggcatcgacatgaacgcggtgctgaagggcttccctgagtgcctgcaggctgacatctgcctgcacctgaaccgctcactgctgcagcactgcaaacccttccgaggggccaccaagggctgccttcgggccctggccatgaagttcaagaccacacatgcaccgccaggggacacactggtgcatgctggggacctgctcaccgccctgtacttcatctcccggggctccatcgagatcctgcggggcgacgtcgtcgtggccatcctggggaagaatgacatctttggggagcctctgaacctgtatgcaaggcctggcaagtcgaacggggatgtgcgggccctcacctactgtgacctacacaagatccatcgggacgacctgctggaggtgctggacatgtaccctgagttctccgaccacttctggtccagcctggagatcaccttcaacctgcgagataccaacatgatcccgggctcccccggcagtacggagttagagggtggcttcagtcggcaacgcaagcgcaagttgtccttccgcaggcgcacggacaaggacacggagcagccaggggaggtgtcggccttggggccgggccgggcgggggcagggccgagtagccggggccggccgggggggccgtggggggagagcccgtccagtggcccctccagccctgagagcagtgaggatgagggcccaggccgcagctccagccccctccgcctggtgcccttctccagccccaggccccccggagagccgccgggtggggagcccctgatggaggactgcgagaagagcagcgacacttgcaaccccctgtcaggcgccttctcaggagtgtccaacattttcagcttctggggggacagtcggggccgccagtaccaggagctccctcgatgccccgcccccacccccagcctcctcaacatccccctctccagcccgggtcggcggccccggggcgacgtggagagcaggctggatgccctccagcgccagctcaacaggctggagacccggctgagtgcagacatggccactgtcctgcagctgctacagaggcagatgacgctggtcccgcccgcctacagtgctgtgaccaccccggggcctggccccacttccacatccccgctgttgcccgtcagccccctccccaccctcaccttggactcgctttctcaggtttcccagttcatggcgtgtgaggagctgcccccgggggccccagagcttccccaagaaggccccacacgacgcctctccctaccgggccagctgggggccctcacctcccagcccctgcacagacacggctcggacccgggcagttagtggggctgcccagtgtggacacgtggctcacccagggatcaaggcgctgctgggccgctccccttggaggccctgctcaggaggccctgaccgtggaaggggagaggaactcgaaagcacagctcctcccccagcccttgggaccatcttctcctgcagtcccctgggccccagtgagaggggcaggggcagggccggcagtaggtggggcctgtggtccccccactgccctgagggcattagctggtctaactgcccggaggcacccggccctgggccttaggcacctcaaggacttttctgctatttactgctcttattgttaaggataataattaaggatcatatgaataattaatgaagatgctgatgactatgaataataaataattatcctgaggaga

SEQ ID NO: 316 - DNA, 3884 bp, Homo sapiens
  source 1..3884: mol_type = genomic DNA
  misc_feature 1..3884: note = cDNA of KCNH2 gene SNP c.1874T>A (p.Val625Glu)
atgccggtgcggaggggccacgtcgcgccgcagaacaccttcctggacaccatcatccgcaagtttgagggccagagccgtaagttcatcatcgccaacgctcgggtggagaactgcgccgtcatctactgcaacgacggcttctgcgagctgtgcggctactcgcgggccgaggtgatgcagcgaccctgcacctgcgacttcctgcacgggccgcgcacgcagcgccgcgctgccgcgcagatcgcgcaggcactgctgggcgccgaggagcgcaaagtggaaatcgccttctaccggaaagatgggagctgcttcctatgtctggtggatgtggtgcccgtgaagaacgaggatggggctgtcatcatgttcatcctcaatttcgaggtggtgatggagaaggacatggtggggtccccggctcatgacaccaaccaccggggcccccccaccagctggctggccccaggccgcgccaagaccttccgcctgaagctgcccgcgctgctggcgctgacggcccgggagtcgtcggtgcggtcgggcggcgcgggcggcgcgggcgccccgggggccgtggtggtggacgtggacctgacgcccgcggcacccagcagcgagtcgctggccctggacgaagtgacagccatggacaaccacgtggcagggctcgggcccgcggaggagcggcgtgcgctggtgggtcccggctctccgccccgcagcgcgcccggccagctcccatcgccccgggcgcacagcctcaaccccgacgcctcgggctccagctgcagcctggcccggacgcgctcccgagaaagctgcgccagcgtgcgccgcgcctcgtcggccgacgacatcgaggccatgcgcgccggggtgctgcccccgccaccgcgccacgccagcaccggggccatgcacccactgcgcagcggcttgctcaactccacctcggactccgacctcgtgcgctaccgcaccattagcaagattccccaaatcaccctcaactttgtggacctcaagggcgaccccttcttggcttcgcccaccagtgaccgtgagatcatagcacctaagataaaggagcgaacccacaatgtcactgagaaggtcacccaggtcctgtccctgggcgccgacgtgctgcctgagtacaagctgcaggcaccgcgcatccaccgctggaccatcctgcattacagccccttcaaggccgtgtgggactggctcatcctgctgctggtcatctacacggctgtcttcacaccctactcggctgccttcctgctgaaggagacggaagaaggcccgcctgctaccgagtgtggctacgcctgccagccgctggctgtggtggacctcatcgtggacatcatgttcattgtggacatcctcatcaacttccgcaccacctacgtcaatgccaacgaggaggtggtcagccaccccggccgcatcgccgtccactacttcaagggctggttcctcatcgacatggtggccgccatccccttcgacctgctcatcttcggctctggctctgaggagctgatcgggctgctgaagactgcgcggctgctgcggctggtgcgcgtggcgcggaagctggatcgctactcagagtacggcgcggccgtgctgttcttgctcatgtgcacctttgcgctcatcgcgcactggctagcctgcatctggtacgccatcggcaacatggagcagccacacatggactcacgcatcggctggctgcacaacctgggcgaccagataggcaaaccctacaacagcagcggcctgggcggcccctccatcaaggacaagtatgtgacggcgctctacttcaccttcagcagcctcaccagtgagggcttcggcaacgtctctcccaacaccaactcagagaagatcttctccatctgcgtcatgctcattggctccctcatgtatgctagcatcttcggcaacgtgtcggccatcatccagcggctgtactcgggcacagcccgctaccacacacagatgctgcgggtgcgggagttcatccgcttccaccagatccccaatcccctgcgccagcgcctcgaggagtacttccagcacgcctggtcctacaccaacggcatcgacatgaacgcggtgctgaagggcttccctgagtgcctgcaggctgacatctgcctgcacctgaaccgctcactgctgcagcactgcaaacccttccgaggggccaccaagggctgccttcgggccctggccatgaagttcaagaccacacatgcaccgccaggggacacactggtgcatgctggggacctgctcaccgccctgtacttcatctcccggggctccatcgagatcctgcggggcgacgtcgtcgtggccatcctggggaagaatgacatctttggggagcctctgaacctgtatgcaaggcctggcaagtcgaacggggatgtgcgggccctcacctactgtgacctacacaagatccatcgggacgacctgctggaggtgctggacatgtaccctgagttctccgaccacttctggtccagcctggagatcaccttcaacctgcgagataccaacatgatcccgggctcccccggcagtacggagttagagggtggcttcagtcggcaacgcaagcgcaagttgtccttccgcaggcgcacggacaaggacacggagcagccaggggaggtgtcggccttggggccgggccgggcgggggcagggccgagtagccggggccggccgggggggccgtggggggagagcccgtccagtggcccctccagccctgagagcagtgaggatgagggcccaggccgcagctccagccccctccgcctggtgcccttctccagccccaggccccccggagagccgccgggtggggagcccctgatggaggactgcgagaagagcagcgacacttgcaaccccctgtcaggcgccttctcaggagtgtccaacattttcagcttctggggggacagtcggggccgccagtaccaggagctccctcgatgccccgcccccacccccagcctcctcaacatccccctctccagcccgggtcggcggccccggggcgacgtggagagcaggctggatgccctccagcgccagctcaacaggctggagacccggctgagtgcagacatggccactgtcctgcagctgctacagaggcagatgacgctggtcccgcccgcctacagtgctgtgaccaccccggggcctggccccacttccacatccccgctgttgcccgtcagccccctccccaccctcaccttggactcgctttctcaggtttcccagttcatggcgtgtgaggagctgcccccgggggccccagagcttccccaagaaggccccacacgacgcctctccctaccgggccagctgggggccctcacctcccagcccctgcacagacacggctcggacccgggcagttagtggggctgcccagtgtggacacgtggctcacccagggatcaaggcgctgctgggccgctccccttggaggccctgctcaggaggccctgaccgtggaaggggagaggaactcgaaagcacagctcctcccccagcccttgggaccatcttctcctgcagtcccctgggccccagtgagaggggcaggggcagggccggcagtaggtggggcctgtggtccccccactgccctgagggcattagctggtctaactgcccggaggcacccggccctgggccttaggcacctcaaggacttttctgctatttactgctcttattgttaaggataataattaaggatcatatgaataattaatgaagatgctgatgactatgaataataaataattatcctgaggaga

SEQ ID NO: 317 - DNA, 3884 bp, Homo sapiens
  source 1..3884: mol_type = genomic DNA
  misc_feature 1..3884: note = cDNA of KCNH2 gene SNP c.1874T>C (p.Val625Ala)
atgccggtgcggaggggccacgtcgcgccgcagaacaccttcctggacaccatcatccgcaagtttgagggccagagccgtaagttcatcatcgccaacgctcgggtggagaactgcgccgtcatctactgcaacgacggcttctgcgagctgtgcggctactcgcgggccgaggtgatgcagcgaccctgcacctgcgacttcctgcacgggccgcgcacgcagcgccgcgctgccgcgcagatcgcgcaggcactgctgggcgccgaggagcgcaaagtggaaatcgccttctaccggaaagatgggagctgcttcctatgtctggtggatgtggtgcccgtgaagaacgaggatggggctgtcatcatgttcatcctcaatttcgaggtggtgatggagaaggacatggtggggtccccggctcatgacaccaaccaccggggcccccccaccagctggctggccccaggccgcgccaagaccttccgcctgaagctgcccgcgctgctggcgctgacggcccgggagtcgtcggtgcggtcgggcggcgcgggcggcgcgggcgccccgggggccgtggtggtggacgtggacctgacgcccgcggcacccagcagcgagtcgctggccctggacgaagtgacagccatggacaaccacgtggcagggctcgggcccgcggaggagcggcgtgcgctggtgggtcccggctctccgccccgcagcgcgcccggccagctcccatcgccccgggcgcacagcctcaaccccgacgcctcgggctccagctgcagcctggcccggacgcgctcccgagaaagctgcgccagcgtgcgccgcgcctcgtcggccgacgacatcgaggccatgcgcgccggggtgctgcccccgccaccgcgccacgccagcaccggggccatgcacccactgcgcagcggcttgctcaactccacctcggactccgacctcgtgcgctaccgcaccattagcaagattccccaaatcaccctcaactttgtggacctcaagggcgaccccttcttggcttcgcccaccagtgaccgtgagatcatagcacctaagataaaggagcgaacccacaatgtcactgagaaggtcacccaggtcctgtccctgggcgccgacgtgctgcctgagtacaagctgcaggcaccgcgcatccaccgctggaccatcctgcattacagccccttcaaggccgtgtgggactggctcatcctgctgctggtcatctacacggctgtcttcacaccctactcggctgccttcctgctgaaggagacggaagaaggcccgcctgctaccgagtgtggctacgcctgccagccgctggctgtggtggacctcatcgtggacatcatgttcattgtggacatcctcatcaacttccgcaccacctacgtcaatgccaacgaggaggtggtcagccaccccggccgcatcgccgtccactacttcaagggctggttcctcatcgacatggtggccgccatccccttcgacctgctcatcttcggctctggctctgaggagctgatcgggctgctgaagactgcgcggctgctgcggctggtgcgcgtggcgcggaagctggatcgctactcagagtacggcgcggccgtgctgttcttgctcatgtgcacctttgcgctcatcgcgcactggctagcctgcatctggtacgccatcggcaacatggagcagccacacatggactcacgcatcggctggctgcacaacctgggcgaccagataggcaaaccctacaacagcagcggcctgggcggcccctccatcaaggacaagtatgtgacggcgctctacttcaccttcagcagcctcaccagtgcgggcttcggcaacgtctctcccaacaccaactcagagaagatcttctccatctgcgtcatgctcattggctccctcatgtatgctagcatcttcggcaacgtgtcggccatcatccagcggctgtactcgggcacagcccgctaccacacacagatgctgcgggtgcgggagttcatccgcttccaccagatccccaatcccctgcgccagcgcctcgaggagtacttccagcacgcctggtcctacaccaacggcatcgacatgaacgcggtgctgaagggcttccctgagtgcctgcaggctgacatctgcctgcacctgaaccgctcactgctgcagcactgcaaacccttccgaggggccaccaagggctgccttcgggccctggccatgaagttcaagaccacacatgcaccgccaggggacacactggtgcatgctggggacctgctcaccgccctgtacttcatctcccggggctccatcgagatcctgcggggcgacgtcgtcgtggccatcctggggaagaatgacatctttggggagcctctgaacctgtatgcaaggcctggcaagtcgaacggggatgtgcgggccctcacctactgtgacctacacaagatccatcgggacgacctgctggaggtgctggacatgtaccctgagttctccgaccacttctggtccagcctggagatcaccttcaacctgcgagataccaacatgatcccgggctcccccggcagtacggagttagagggtggcttcagtcggcaacgcaagcgcaagttgtccttccgcaggcgcacggacaaggacacggagcagccaggggaggtgtcggccttggggccgggccgggcgggggcagggccgagtagccggggccggccgggggggccgtggggggagagcccgtccagtggcccctccagccctgagagcagtgaggatgagggcccaggccgcagctccagccccctccgcctggtgcccttctccagccccaggccccccggagagccgccgggtggggagcccctgatggaggactgcgagaagagcagcgacacttgcaaccccctgtcaggcgccttctcaggagtgtccaacattttcagcttctggggggacagtcggggccgccagtaccaggagctccctcgatgccccgcccccacccccagcctcctcaacatccccctctccagcccgggtcggcggccccggggcgacgtggagagcaggctggatgccctccagcgccagctcaacaggctggagacccggctgagtgcagacatggccactgtcctgcagctgctacagaggcagatgacgctggtcccgcccgcctacagtgctgtgaccaccccggggcctggccccacttccacatccccgctgttgcccgtcagccccctccccaccctcaccttggactcgctttctcaggtttcccagttcatggcgtgtgaggagctgcccccgggggccccagagcttccccaagaaggccccacacgacgcctctccctaccgggccagctgggggccctcacctcccagcccctgcacagacacggctcggacccgggcagttagtggggctgcccagtgtggacacgtggctcacccagggatcaaggcgctgctgggccgctccccttggaggccctgctcaggaggccctgaccgtggaaggggagaggaactcgaaagcacagctcctcccccagcccttgggaccatcttctcctgcagtcccctgggccccagtgagaggggcaggggcagggccggcagtaggtggggcctgtggtccccccactgccctgagggcattagctggtctaactgcccggaggcacccggccctgggccttaggcacctcaaggacttttctgctatttactgctcttattgttaaggataataattaaggatcatatgaataattaatgaagatgctgatgactatgaataataaataattatcctgaggaga

SEQ ID NO: 318 - DNA, 3884 bp, Homo sapiens
  source 1..3884: mol_type = genomic DNA
  misc_feature 1..3884: note = cDNA of KCNH2 gene SNP c.1876G>A (p.Gly626Ser)
atgccggtgcggaggggccacgtcgcgccgcagaacaccttcctggacaccatcatccgcaagtttgagggccagagccgtaagttcatcatcgccaacgctcgggtggagaactgcgccgtcatctactgcaacgacggcttctgcgagctgtgcggctactcgcgggccgaggtgatgcagcgaccctgcacctgcgacttcctgcacgggccgcgcacgcagcgccgcgctgccgcgcagatcgcgcaggcactgctgggcgccgaggagcgcaaagtggaaatcgccttctaccggaaagatgggagctgcttcctatgtctggtggatgtggtgcccgtgaagaacgaggatggggctgtcatcatgttcatcctcaatttcgaggtggtgatggagaaggacatggtggggtccccggctcatgacaccaaccaccggggcccccccaccagctggctggccccaggccgcgccaagaccttccgcctgaagctgcccgcgctgctggcgctgacggcccgggagtcgtcggtgcggtcgggcggcgcgggcggcgcgggcgccccgggggccgtggtggtggacgtggacctgacgcccgcggcacccagcagcgagtcgctggccctggacgaagtgacagccatggacaaccacgtggcagggctcgggcccgcggaggagcggcgtgcgctggtgggtcccggctctccgccccgcagcgcgcccggccagctcccatcgccccgggcgcacagcctcaaccccgacgcctcgggctccagctgcagcctggcccggacgcgctcccgagaaagctgcgccagcgtgcgccgcgcctcgtcggccgacgacatcgaggccatgcgcgccggggtgctgcccccgccaccgcgccacgccagcaccggggccatgcacccactgcgcagcggcttgctcaactccacctcggactccgacctcgtgcgctaccgcaccattagcaagattccccaaatcaccctcaactttgtggacctcaagggcgaccccttcttggcttcgcccaccagtgaccgtgagatcatagcacctaagataaaggagcgaacccacaatgtcactgagaaggtcacccaggtcctgtccctgggcgccgacgtgctgcctgagtacaagctgcaggcaccgcgcatccaccgctggaccatcctgcattacagccccttcaaggccgtgtgggactggctcatcctgctgctggtcatctacacggctgtcttcacaccctactcggctgccttcctgctgaaggagacggaagaaggcccgcctgctaccgagtgtggctacgcctgccagccgctggctgtggtggacctcatcgtggacatcatgttcattgtggacatcctcatcaacttccgcaccacctacgtcaatgccaacgaggaggtggtcagccaccccggccgcatcgccgtccactacttcaagggctggttcctcatcgacatggtggccgccatccccttcgacctgctcatcttcggctctggctctgaggagctgatcgggctgctgaagactgcgcggctgctgcggctggtgcgcgtggcgcggaagctggatcgctactcagagtacggcgcggccgtgctgttcttgctcatgtgcacctttgcgctcatcgcgcactggctagcctgcatctggtacgccatcggcaacatggagcagccacacatggactcacgcatcggctggctgcacaacctgggcgaccagataggcaaaccctacaacagcagcggcctgggcggcccctccatcaaggacaagtatgtgacggcgctctacttcaccttcagcagcctcaccagtgtgagcttcggcaacgtctctcccaacaccaactcagagaagatcttctccatctgcgtcatgctcattggctccctcatgtatgctagcatcttcggcaacgtgtcggccatcatccagcggctgtactcgggcacagcccgctaccacacacagatgctgcgggtgcgggagttcatccgcttccaccagatccccaatcccctgcgccagcgcctcgaggagtacttccagcacgcctggtcctacaccaacggcatcgacatgaacgcggtgctgaagggcttccctgagtgcctgcaggctgacatctgcctgcacctgaaccgctcactgctgcagcactgcaaacccttccgaggggccaccaagggctgccttcgggccctggccatgaagttcaagaccacacatgcaccgccaggggacacactggtgcatgctggggacctgctcaccgccctgtacttcatctcccggggctccatcgagatcctgcggggcgacgtcgtcgtggccatcctggggaagaatgacatctttggggagcctctgaacctgtatgcaaggcctggcaagtcgaacggggatgtgcgggccctcacctactgtgacctacacaagatccatcgggacgacctgctggaggtgctggacatgtaccctgagttctccgaccacttctggtccagcctggagatcaccttcaacctgcgagataccaacatgatcccgggctcccccggcagtacggagttagagggtggcttcagtcggcaacgcaagcgcaagttgtccttccgcaggcgcacggacaaggacacggagcagccaggggaggtgtcggccttggggccgggccgggcgggggcagggccgagtagccggggccggccgggggggccgtggggggagagcccgtccagtggcccctccagccctgagagcagtgaggatgagggcccaggccgcagctccagccccctccgcctggtgcccttctccagccccaggccccccggagagccgccgggtggggagcccctgatggaggactgcgagaagagcagcgacacttgcaaccccctgtcaggcgccttctcaggagtgtccaacattttcagcttctggggggacagtcggggccgccagtaccaggagctccctcgatgccccgcccccacccccagcctcctcaacatccccctctccagcccgggtcggcggccccggggcgacgtggagagcaggctggatgccctccagcgccagctcaacaggctggagacccggctgagtgcagacatggccactgtcctgcagctgctacagaggcagatgacgctggtcccgcccgcctacagtgctgtgaccaccccggggcctggccccacttccacatccccgctgttgcccgtcagccccctccccaccctcaccttggactcgctttctcaggtttcccagttcatggcgtgtgaggagctgcccccgggggccccagagcttccccaagaaggccccacacgacgcctctccctaccgggccagctgggggccctcacctcccagcccctgcacagacacggctcggacccgggcagttagtggggctgcccagtgtggacacgtggctcacccagggatcaaggcgctgctgggccgctccccttggaggccctgctcaggaggccctgaccgtggaaggggagaggaactcgaaagcacagctcctcccccagcccttgggaccatcttctcctgcagtcccctgggccccagtgagaggggcaggggcagggccggcagtaggtggggcctgtggtccccccactgccctgagggcattagctggtctaactgcccggaggcacccggccctgggccttaggcacctcaaggacttttctgctatttactgctcttattgttaaggataataattaaggatcatatgaataattaatgaagatgctgatgactatgaataataaataattatcctgaggaga

SEQ ID NO: 319 - DNA, 3884 bp, Homo sapiens
  source 1..3884: mol_type = genomic DNA
  misc_feature 1..3884: note = cDNA of KCNH2 gene SNP c.1877G>A (p.Gly626Asp)
atgccggtgcggaggggccacgtcgcgccgcagaacaccttcctggacaccatcatccgcaagtttgagggccagagccgtaagttcatcatcgccaacgctcgggtggagaactgcgccgtcatctactgcaacgacggcttctgcgagctgtgcggctactcgcgggccgaggtgatgcagcgaccctgcacctgcgacttcctgcacgggccgcgcacgcagcgccgcgctgccgcgcagatcgcgcaggcactgctgggcgccgaggagcgcaaagtggaaatcgccttctaccggaaagatgggagctgcttcctatgtctggtggatgtggtgcccgtgaagaacgaggatggggctgtcatcatgttcatcctcaatttcgaggtggtgatggagaaggacatggtggggtccccggctcatgacaccaaccaccggggcccccccaccagctggctggccccaggccgcgccaagaccttccgcctgaagctgcccgcgctgctggcgctgacggcccgggagtcgtcggtgcggtcgggcggcgcgggcggcgcgggcgccccgggggccgtggtggtggacgtggacctgacgcccgcggcacccagcagcgagtcgctggccctggacgaagtgacagccatggacaaccacgtggcagggctcgggcccgcggaggagcggcgtgcgctggtgggtcccggctctccgccccgcagcgcgcccggccagctcccatcgccccgggcgcacagcctcaaccccgacgcctcgggctccagctgcagcctggcccggacgcgctcccgagaaagctgcgccagcgtgcgccgcgcctcgtcggccgacgacatcgaggccatgcgcgccggggtgctgcccccgccaccgcgccacgccagcaccggggccatgcacccactgcgcagcggcttgctcaactccacctcggactccgacctcgtgcgctaccgcaccattagcaagattccccaaatcaccctcaactttgtggacctcaagggcgaccccttcttggcttcgcccaccagtgaccgtgagatcatagcacctaagataaaggagcgaacccacaatgtcactgagaaggtcacccaggtcctgtccctgggcgccgacgtgctgcctgagtacaagctgcaggcaccgcgcatccaccgctggaccatcctgcattacagccccttcaaggccgtgtgggactggctcatcctgctgctggtcatctacacggctgtcttcacaccctactcggctgccttcctgctgaaggagacggaagaaggcccgcctgctaccgagtgtggctacgcctgccagccgctggctgtggtggacctcatcgtggacatcatgttcattgtggacatcctcatcaacttccgcaccacctacgtcaatgccaacgaggaggtggtcagccaccccggccgcatcgccgtccactacttcaagggctggttcctcatcgacatggtggccgccatccccttcgacctgctcatcttcggctctggctctgaggagctgatcgggctgctgaagactgcgcggctgctgcggctggtgcgcgtggcgcggaagctggatcgctactcagagtacggcgcggccgtgctgttcttgctcatgtgcacctttgcgctcatcgcgcactggctagcctgcatctggtacgccatcggcaacatggagcagccacacatggactcacgcatcggctggctgcacaacctgggcgaccagataggcaaaccctacaacagcagcggcctgggcggcccctccatcaaggacaagtatgtgacggcgctctacttcaccttcagcagcctcaccagtgtggacttcggcaacgtctctcccaacaccaactcagagaagatcttctccatctgcgtcatgctcattggctccctcatgtatgctagcatcttcggcaacgtgtcggccatcatccagcggctgtactcgggcacagcccgctaccacacacagatgctgcgggtgcgggagttcatccgcttccaccagatccccaatcccctgcgccagcgcctcgaggagtacttccagcacgcctggtcctacaccaacggcatcgacatgaacgcggtgctgaagggcttccctgagtgcctgcaggctgacatctgcctgcacctgaaccgctcactgctgcagcactgcaaacccttccgaggggccaccaagggctgccttcgggccctggccatgaagttcaagaccacacatgcaccgccaggggacacactggtgcatgctggggacctgctcaccgccctgtacttcatctcccggggctccatcgagatcctgcggggcgacgtcgtcgtggccatcctggggaagaatgacatctttggggagcctctgaacctgtatgcaaggcctggcaagtcgaacggggatgtgcgggccctcacctactgtgacctacacaagatccatcgggacgacctgctggaggtgctggacatgtaccctgagttctccgaccacttctggtccagcctggagatcaccttcaacctgcgagataccaacatgatcccgggctcccccggcagtacggagttagagggtggcttcagtcggcaacgcaagcgcaagttgtccttccgcaggcgcacggacaaggacacggagcagccaggggaggtgtcggccttggggccgggccgggcgggggcagggccgagtagccggggccggccgggggggccgtggggggagagcccgtccagtggcccctccagccctgagagcagtgaggatgagggcccaggccgcagctccagccccctccgcctggtgcccttctccagccccaggccccccggagagccgccgggtggggagcccctgatggaggactgcgagaagagcagcgacacttgcaaccccctgtcaggcgccttctcaggagtgtccaacattttcagcttctggggggacagtcggggccgccagtaccaggagctccctcgatgccccgcccccacccccagcctcctcaacatccccctctccagcccgggtcggcggccccggggcgacgtggagagcaggctggatgccctccagcgccagctcaacaggctggagacccggctgagtgcagacatggccactgtcctgcagctgctacagaggcagatgacgctggtcccgcccgcctacagtgctgtgaccaccccggggcctggccccacttccacatccccgctgttgcccgtcagccccctccccaccctcaccttggactcgctttctcaggtttcccagttcatggcgtgtgaggagctgcccccgggggccccagagcttccccaagaaggccccacacgacgcctctccctaccgggccagctgggggccctcacctcccagcccctgcacagacacggctcggacccgggcagttagtggggctgcccagtgtggacacgtggctcacccagggatcaaggcgctgctgggccgctccccttggaggccctgctcaggaggccctgaccgtggaaggggagaggaactcgaaagcacagctcctcccccagcccttgggaccatcttctcctgcagtcccctgggccccagtgagaggggcaggggcagggccggcagtaggtggggcctgtggtccccccactgccctgagggcattagctggtctaactgcccggaggcacccggccctgggccttaggcacctcaaggacttttctgctatttactgctcttattgttaaggataataattaaggatcatatgaataattaatgaagatgctgatgactatgaataataaataattatcctgaggaga

SEQ ID NO: 320 - DNA, 3884 bp, Homo sapiens
  source 1..3884: mol_type = genomic DNA
  misc_feature 1..3884: note = cDNA of KCNH2 gene SNP c.1877G>C (p.Gly626Ala)
atgccggtgcggaggggccacgtcgcgccgcagaacaccttcctggacaccatcatccgcaagtttgagggccagagccgtaagttcatcatcgccaacgctcgggtggagaactgcgccgtcatctactgcaacgacggcttctgcgagctgtgcggctactcgcgggccgaggtgatgcagcgaccctgcacctgcgacttcctgcacgggccgcgcacgcagcgccgcgctgccgcgcagatcgcgcaggcactgctgggcgccgaggagcgcaaagtggaaatcgccttctaccggaaagatgggagctgcttcctatgtctggtggatgtggtgcccgtgaagaacgaggatggggctgtcatcatgttcatcctcaatttcgaggtggtgatggagaaggacatggtggggtccccggctcatgacaccaaccaccggggcccccccaccagctggctggccccaggccgcgccaagaccttccgcctgaagctgcccgcgctgctggcgctgacggcccgggagtcgtcggtgcggtcgggcggcgcgggcggcgcgggcgccccgggggccgtggtggtggacgtggacctgacgcccgcggcacccagcagcgagtcgctggccctggacgaagtgacagccatggacaaccacgtggcagggctcgggcccgcggaggagcggcgtgcgctggtgggtcccggctctccgccccgcagcgcgcccggccagctcccatcgccccgggcgcacagcctcaaccccgacgcctcgggctccagctgcagcctggcccggacgcgctcccgagaaagctgcgccagcgtgcgccgcgcctcgtcggccgacgacatcgaggccatgcgcgccggggtgctgcccccgccaccgcgccacgccagcaccggggccatgcacccactgcgcagcggcttgctcaactccacctcggactccgacctcgtgcgctaccgcaccattagcaagattccccaaatcaccctcaactttgtggacctcaagggcgaccccttcttggcttcgcccaccagtgaccgtgagatcatagcacctaagataaaggagcgaacccacaatgtcactgagaaggtcacccaggtcctgtccctgggcgccgacgtgctgcctgagtacaagctgcaggcaccgcgcatccaccgctggaccatcctgcattacagccccttcaaggccgtgtgggactggctcatcctgctgctggtcatctacacggctgtcttcacaccctactcggctgccttcctgctgaaggagacggaagaaggcccgcctgctaccgagtgtggctacgcctgccagccgctggctgtggtggacctcatcgtggacatcatgttcattgtggacatcctcatcaacttccgcaccacctacgtcaatgccaacgaggaggtggtcagccaccccggccgcatcgccgtccactacttcaagggctggttcctcatcgacatggtggccgccatccccttcgacctgctcatcttcggctctggctctgaggagctgatcgggctgctgaagactgcgcggctgctgcggctggtgcgcgtggcgcggaagctggatcgctactcagagtacggcgcggccgtgctgttcttgctcatgtgcacctttgcgctcatcgcgcactggctagcctgcatctggtacgccatcggcaacatggagcagccacacatggactcacgcatcggctggctgcacaacctgggcgaccagataggcaaaccctacaacagcagcggcctgggcggcccctccatcaaggacaagtatgtgacggcgctctacttcaccttcagcagcctcaccagtgtggccttcggcaacgtctctcccaacaccaactcagagaagatcttctccatctgcgtcatgctcattggctccctcatgtatgctagcatcttcggcaacgtgtcggccatcatccagcggctgtactcgggcacagcccgctaccacacacagatgctgcgggtgcgggagttcatccgcttccaccagatccccaatcccctgcgccagcgcctcgaggagtacttccagcacgcctggtcctacaccaacggcatcgacatgaacgcggtgctgaagggcttccctgagtgcctgcaggctgacatctgcctgcacctgaaccgctcactgctgcagcactgcaaacccttccgaggggccaccaagggctgccttcgggccctggccatgaagttcaagaccacacatgcaccgccaggggacacactggtgcatgctggggacctgctcaccgccctgtacttcatctcccggggctccatcgagatcctgcggggcgacgtcgtcgtggccatcctggggaagaatgacatctttggggagcctctgaacctgtatgcaaggcctggcaagtcgaacggggatgtgcgggccctcacctactgtgacctacacaagatccatcgggacgacctgctggaggtgctggacatgtaccctgagttctccgaccacttctggtccagcctggagatcaccttcaacctgcgagataccaacatgatcccgggctcccccggcagtacggagttagagggtggcttcagtcggcaacgcaagcgcaagttgtccttccgcaggcgcacggacaaggacacggagcagccaggggaggtgtcggccttggggccgggccgggcgggggcagggccgagtagccggggccggccgggggggccgtggggggagagcccgtccagtggcccctccagccctgagagcagtgaggatgagggcccaggccgcagctccagccccctccgcctggtgcccttctccagccccaggccccccggagagccgccgggtggggagcccctgatggaggactgcgagaagagcagcgacacttgcaaccccctgtcaggcgccttctcaggagtgtccaacattttcagcttctggggggacagtcggggccgccagtaccaggagctccctcgatgccccgcccccacccccagcctcctcaacatccccctctccagcccgggtcggcggccccggggcgacgtggagagcaggctggatgccctccagcgccagctcaacaggctggagacccggctgagtgcagacatggccactgtcctgcagctgctacagaggcagatgacgctggtcccgcccgcctacagtgctgtgaccaccccggggcctggccccacttccacatccccgctgttgcccgtcagccccctccccaccctcaccttggactcgctttctcaggtttcccagttcatggcgtgtgaggagctgcccccgggggccccagagcttccccaagaaggccccacacgacgcctctccctaccgggccagctgggggccctcacctcccagcccctgcacagacacggctcggacccgggcagttagtggggctgcccagtgtggacacgtggctcacccagggatcaaggcgctgctgggccgctccccttggaggccctgctcaggaggccctgaccgtggaaggggagaggaactcgaaagcacagctcctcccccagcccttgggaccatcttctcctgcagtcccctgggccccagtgagaggggcaggggcagggccggcagtaggtggggcctgtggtccccccactgccctgagggcattagctggtctaactgcccggaggcacccggccctgggccttaggcacctcaaggacttttctgctatttactgctcttattgttaaggataataattaaggatcatatgaataattaatgaagatgctgatgactatgaataataaataattatcctgaggaga

SEQ ID NO: 321 - DNA, 3884 bp, Homo sapiens
  source 1..3884: mol_type = genomic DNA
  misc_feature 1..3884: note = cDNA of KCNH2 gene SNP c.1877G>T (p.Gly626Val)
atgccggtgcggaggggccacgtcgcgccgcagaacaccttcctggacaccatcatccgcaagtttgagggccagagccgtaagttcatcatcgccaacgctcgggtggagaactgcgccgtcatctactgcaacgacggcttctgcgagctgtgcggctactcgcgggccgaggtgatgcagcgaccctgcacctgcgacttcctgcacgggccgcgcacgcagcgccgcgctgccgcgcagatcgcgcaggcactgctgggcgccgaggagcgcaaagtggaaatcgccttctaccggaaagatgggagctgcttcctatgtctggtggatgtggtgcccgtgaagaacgaggatggggctgtcatcatgttcatcctcaatttcgaggtggtgatggagaaggacatggtggggtccccggctcatgacaccaaccaccggggcccccccaccagctggctggccccaggccgcgccaagaccttccgcctgaagctgcccgcgctgctggcgctgacggcccgggagtcgtcggtgcggtcgggcggcgcgggcggcgcgggcgccccgggggccgtggtggtggacgtggacctgacgcccgcggcacccagcagcgagtcgctggccctggacgaagtgacagccatggacaaccacgtggcagggctcgggcccgcggaggagcggcgtgcgctggtgggtcccggctctccgccccgcagcgcgcccggccagctcccatcgccccgggcgcacagcctcaaccccgacgcctcgggctccagctgcagcctggcccggacgcgctcccgagaaagctgcgccagcgtgcgccgcgcctcgtcggccgacgacatcgaggccatgcgcgccggggtgctgcccccgccaccgcgccacgccagcaccggggccatgcacccactgcgcagcggcttgctcaactccacctcggactccgacctcgtgcgctaccgcaccattagcaagattccccaaatcaccctcaactttgtggacctcaagggcgaccccttcttggcttcgcccaccagtgaccgtgagatcatagcacctaagataaaggagcgaacccacaatgtcactgagaaggtcacccaggtcctgtccctgggcgccgacgtgctgcctgagtacaagctgcaggcaccgcgcatccaccgctggaccatcctgcattacagccccttcaaggccgtgtgggactggctcatcctgctgctggtcatctacacggctgtcttcacaccctactcggctgccttcctgctgaaggagacggaagaaggcccgcctgctaccgagtgtggctacgcctgccagccgctggctgtggtggacctcatcgtggacatcatgttcattgtggacatcctcatcaacttccgcaccacctacgtcaatgccaacgaggaggtggtcagccaccccggccgcatcgccgtccactacttcaagggctggttcctcatcgacatggtggccgccatccccttcgacctgctcatcttcggctctggctctgaggagctgatcgggctgctgaagactgcgcggctgctgcggctggtgcgcgtggcgcggaagctggatcgctactcagagtacggcgcggccgtgctgttcttgctcatgtgcacctttgcgctcatcgcgcactggctagcctgcatctggtacgccatcggcaacatggagcagccacacatggactcacgcatcggctggctgcacaacctgggcgaccagataggcaaaccctacaacagcagcggcctgggcggcccctccatcaaggacaagtatgtgacggcgctctacttcaccttcagcagcctcaccagtgtggtcttcggcaacgtctctcccaacaccaactcagagaagatcttctccatctgcgtcatgctcattggctccctcatgtatgctagcatcttcggcaacgtgtcggccatcatccagcggctgtactcgggcacagcccgctaccacacacagatgctgcgggtgcgggagttcatccgcttccaccagatccccaatcccctgcgccagcgcctcgaggagtacttccagcacgcctggtcctacaccaacggcatcgacatgaacgcggtgctgaagggcttccctgagtgcctgcaggctgacatctgcctgcacctgaaccgctcactgctgcagcactgcaaacccttccgaggggccaccaagggctgccttcgggccctggccatgaagttcaagaccacacatgcaccgccaggggacacactggtgcatgctggggacctgctcaccgccctgtacttcatctcccggggctccatcgagatcctgcggggcgacgtcgtcgtggccatcctggggaagaatgacatctttggggagcctctgaacctgtatgcaaggcctggcaagtcgaacggggatgtgcgggccctcacctactgtgacctacacaagatccatcgggacgacctgctggaggtgctggacatgtaccctgagttctccgaccacttctggtccagcctggagatcaccttcaacctgcgagataccaacatgatcccgggctcccccggcagtacggagttagagggtggcttcagtcggcaacgcaagcgcaagttgtccttccgcaggcgcacggacaaggacacggagcagccaggggaggtgtcggccttggggccgggccgggcgggggcagggccgagtagccggggccggccgggggggccgtggggggagagcccgtccagtggcccctccagccctgagagcagtgaggatgagggcccaggccgcagctccagccccctccgcctggtgcccttctccagccccaggccccccggagagccgccgggtggggagcccctgatggaggactgcgagaagagcagcgacacttgcaaccccctgtcaggcgccttctcaggagtgtccaacattttcagcttctggggggacagtcggggccgccagtaccaggagctccctcgatgccccgcccccacccccagcctcctcaacatccccctctccagcccgggtcggcggccccggggcgacgtggagagcaggctggatgccctccagcgccagctcaacaggctggagacccggctgagtgcagacatggccactgtcctgcagctgctacagaggcagatgacgctggtcccgcccgcctacagtgctgtgaccaccccggggcctggccccacttccacatccccgctgttgcccgtcagccccctccccaccctcaccttggactcgctttctcaggtttcccagttcatggcgtgtgaggagctgcccccgggggccccagagcttccccaagaaggccccacacgacgcctctccctaccgggccagctgggggccctcacctcccagcccctgcacagacacggctcggacccgggcagttagtggggctgcccagtgtggacacgtggctcacccagggatcaaggcgctgctgggccgctccccttggaggccctgctcaggaggccctgaccgtggaaggggagaggaactcgaaagcacagctcctcccccagcccttgggaccatcttctcctgcagtcccctgggccccagtgagaggggcaggggcagggccggcagtaggtggggcctgtggtccccccactgccctgagggcattagctggtctaactgcccggaggcacccggccctgggccttaggcacctcaaggacttttctgctatttactgctcttattgttaaggataataattaaggatcatatgaataattaatgaagatgctgatgactatgaataataaataattatcctgaggaga

SEQ ID NO: 322 - DNA, 3884 bp, Homo sapiens
  source 1..3884: mol_type = genomic DNA
  misc_feature 1..3884: note = cDNA of KCNH2 gene SNP c.1879T>A (p.Phe627Ile)
atgccggtgcggaggggccacgtcgcgccgcagaacaccttcctggacaccatcatccgcaagtttgagggccagagccgtaagttcatcatcgccaacgctcgggtggagaactgcgccgtcatctactgcaacgacggcttctgcgagctgtgcggctactcgcgggccgaggtgatgcagcgaccctgcacctgcgacttcctgcacgggccgcgcacgcagcgccgcgctgccgcgcagatcgcgcaggcactgctgggcgccgaggagcgcaaagtggaaatcgccttctaccggaaagatgggagctgcttcctatgtctggtggatgtggtgcccgtgaagaacgaggatggggctgtcatcatgttcatcctcaatttcgaggtggtgatggagaaggacatggtggggtccccggctcatgacaccaaccaccggggcccccccaccagctggctggccccaggccgcgccaagaccttccgcctgaagctgcccgcgctgctggcgctgacggcccgggagtcgtcggtgcggtcgggcggcgcgggcggcgcgggcgccccgggggccgtggtggtggacgtggacctgacgcccgcggcacccagcagcgagtcgctggccctggacgaagtgacagccatggacaaccacgtggcagggctcgggcccgcggaggagcggcgtgcgctggtgggtcccggctctccgccccgcagcgcgcccggccagctcccatcgccccgggcgcacagcctcaaccccgacgcctcgggctccagctgcagcctggcccggacgcgctcccgagaaagctgcgccagcgtgcgccgcgcctcgtcggccgacgacatcgaggccatgcgcgccggggtgctgcccccgccaccgcgccacgccagcaccggggccatgcacccactgcgcagcggcttgctcaactccacctcggactccgacctcgtgcgctaccgcaccattagcaagattccccaaatcaccctcaactttgtggacctcaagggcgaccccttcttggcttcgcccaccagtgaccgtgagatcatagcacctaagataaaggagcgaacccacaatgtcactgagaaggtcacccaggtcctgtccctgggcgccgacgtgctgcctgagtacaagctgcaggcaccgcgcatccaccgctggaccatcctgcattacagccccttcaaggccgtgtgggactggctcatcctgctgctggtcatctacacggctgtcttcacaccctactcggctgccttcctgctgaaggagacggaagaaggcccgcctgctaccgagtgtggctacgcctgccagccgctggctgtggtggacctcatcgtggacatcatgttcattgtggacatcctcatcaacttccgcaccacctacgtcaatgccaacgaggaggtggtcagccaccccggccgcatcgccgtccactacttcaagggctggttcctcatcgacatggtggccgccatccccttcgacctgctcatcttcggctctggctctgaggagctgatcgggctgctgaagactgcgcggctgctgcggctggtgcgcgtggcgcggaagctggatcgctactcagagtacggcgcggccgtgctgttcttgctcatgtgcacctttgcgctcatcgcgcactggctagcctgcatctggtacgccatcggcaacatggagcagccacacatggactcacgcatcggctggctgcacaacctgggcgaccagataggcaaaccctacaacagcagcggcctgggcggcccctccatcaaggacaagtatgtgacggcgctctacttcaccttcagcagcctcaccagtgtgggcatcggcaacgtctctcccaacaccaactcagagaagatcttctccatctgcgtcatgctcattggctccctcatgtatgctagcatcttcggcaacgtgtcggccatcatccagcggctgtactcgggcacagcccgctaccacacacagatgctgcgggtgcgggagttcatccgcttccaccagatccccaatcccctgcgccagcgcctcgaggagtacttccagcacgcctggtcctacaccaacggcatcgacatgaacgcggtgctgaagggcttccctgagtgcctgcaggctgacatctgcctgcacctgaaccgctcactgctgcagcactgcaaacccttccgaggggccaccaagggctgccttcgggccctggccatgaagttcaagaccacacatgcaccgccaggggacacactggtgcatgctggggacctgctcaccgccctgtacttcatctcccggggctccatcgagatcctgcggggcgacgtcgtcgtggccatcctggggaagaatgacatctttggggagcctctgaacctgtatgcaaggcctggcaagtcgaacggggatgtgcgggccctcacctactgtgacctacacaagatccatcgggacgacctgctggaggtgctggacatgtaccctgagttctccgaccacttctggtccagcctggagatcaccttcaacctgcgagataccaacatgatcccgggctcccccggcagtacggagttagagggtggcttcagtcggcaacgcaagcgcaagttgtccttccgcaggcgcacggacaaggacacggagcagccaggggaggtgtcggccttggggccgggccgggcgggggcagggccgagtagccggggccggccgggggggccgtggggggagagcccgtccagtggcccctccagccctgagagcagtgaggatgagggcccaggccgcagctccagccccctccgcctggtgcccttctccagccccaggccccccggagagccgccgggtggggagcccctgatggaggactgcgagaagagcagcgacacttgcaaccccctgtcaggcgccttctcaggagtgtccaacattttcagcttctggggggacagtcggggccgccagtaccaggagctccctcgatgccccgcccccacccccagcctcctcaacatccccctctccagcccgggtcggcggccccggggcgacgtggagagcaggctggatgccctccagcgccagctcaacaggctggagacccggctgagtgcagacatggccactgtcctgcagctgctacagaggcagatgacgctggtcccgcccgcctacagtgctgtgaccaccccggggcctggccccacttccacatccccgctgttgcccgtcagccccctccccaccctcaccttggactcgctttctcaggtttcccagttcatggcgtgtgaggagctgcccccgggggccccagagcttccccaagaaggccccacacgacgcctctccctaccgggccagctgggggccctcacctcccagcccctgcacagacacggctcggacccgggcagttagtggggctgcccagtgtggacacgtggctcacccagggatcaaggcgctgctgggccgctccccttggaggccctgctcaggaggccctgaccgtggaaggggagaggaactcgaaagcacagctcctcccccagcccttgggaccatcttctcctgcagtcccctgggccccagtgagaggggcaggggcagggccggcagtaggtggggcctgtggtccccccactgccctgagggcattagctggtctaactgcccggaggcacccggccctgggccttaggcacctcaaggacttttctgctatttactgctcttattgttaaggataataattaaggatcatatgaataattaatgaagatgctgatgactatgaataataaataattatcctgaggaga

SEQ ID NO: 323 - DNA, 3884 bp, Homo sapiens
  source 1..3884: mol_type = genomic DNA
  misc_feature 1..3884: note = cDNA of KCNH2 gene SNP c.1879T>C (p.Phe627Leu)
atgccggtgcggaggggccacgtcgcgccgcagaacaccttcctggacaccatcatccgcaagtttgagggccagagccgtaagttcatcatcgccaacgctcgggtggagaactgcgccgtcatctactgcaacgacggcttctgcgagctgtgcggctactcgcgggccgaggtgatgcagcgaccctgcacctgcgacttcctgcacgggccgcgcacgcagcgccgcgctgccgcgcagatcgcgcaggcactgctgggcgccgaggagcgcaaagtggaaatcgccttctaccggaaagatgggagctgcttcctatgtctggtggatgtggtgcccgtgaagaacgaggatggggctgtcatcatgttcatcctcaatttcgaggtggtgatggagaaggacatggtggggtccccggctcatgacaccaaccaccggggcccccccaccagctggctggccccaggccgcgccaagaccttccgcctgaagctgcccgcgctgctggcgctgacggcccgggagtcgtcggtgcggtcgggcggcgcgggcggcgcgggcgccccgggggccgtggtggtggacgtggacctgacgcccgcggcacccagcagcgagtcgctggccctggacgaagtgacagccatggacaaccacgtggcagggctcgggcccgcggaggagcggcgtgcgctggtgggtcccggctctccgccccgcagcgcgcccggccagctcccatcgccccgggcgcacagcctcaaccccgacgcctcgggctccagctgcagcctggcccggacgcgctcccgagaaagctgcgccagcgtgcgccgcgcctcgtcggccgacgacatcgaggccatgcgcgccggggtgctgcccccgccaccgcgccacgccagcaccggggccatgcacccactgcgcagcggcttgctcaactccacctcggactccgacctcgtgcgctaccgcaccattagcaagattccccaaatcaccctcaactttgtggacctcaagggcgaccccttcttggcttcgcccaccagtgaccgtgagatcatagcacctaagataaaggagcgaacccacaatgtcactgagaaggtcacccaggtcctgtccctgggcgccgacgtgctgcctgagtacaagctgcaggcaccgcgcatccaccgctggaccatcctgcattacagccccttcaaggccgtgtgggactggctcatcctgctgctggtcatctacacggctgtcttcacaccctactcggctgccttcctgctgaaggagacggaagaaggcccgcctgctaccgagtgtggctacgcctgccagccgctggctgtggtggacctcatcgtggacatcatgttcattgtggacatcctcatcaacttccgcaccacctacgtcaatgccaacgaggaggtggtcagccaccccggccgcatcgccgtccactacttcaagggctggttcctcatcgacatggtggccgccatccccttcgacctgctcatcttcggctctggctctgaggagctgatcgggctgctgaagactgcgcggctgctgcggctggtgcgcgtggcgcggaagctggatcgctactcagagtacggcgcggccgtgctgttcttgctcatgtgcacctttgcgctcatcgcgcactggctagcctgcatctggtacgccatcggcaacatggagcagccacacatggactcacgcatcggctggctgcacaacctgggcgaccagataggcaaaccctacaacagcagcggcctgggcggcccctccatcaaggacaagtatgtgacggcgctctacttcaccttcagcagcctcaccagtgtgggcctcggcaacgtctctcccaacaccaactcagagaagatcttctccatctgcgtcatgctcattggctccctcatgtatgctagcatcttcggcaacgtgtcggccatcatccagcggctgtactcgggcacagcccgctaccacacacagatgctgcgggtgcgggagttcatccgcttccaccagatccccaatcccctgcgccagcgcctcgaggagtacttccagcacgcctggtcctacaccaacggcatcgacatgaacgcggtgctgaagggcttccctgagtgcctgcaggctgacatctgcctgcacctgaaccgctcactgctgcagcactgcaaacccttccgaggggccaccaagggctgccttcgggccctggccatgaagttcaagaccacacatgcaccgccaggggacacactggtgcatgctggggacctgctcaccgccctgtacttcatctcccggggctccatcgagatcctgcggggcgacgtcgtcgtggccatcctggggaagaatgacatctttggggagcctctgaacctgtatgcaaggcctggcaagtcgaacggggatgtgcgggccctcacctactgtgacctacacaagatccatcgggacgacctgctggaggtgctggacatgtaccctgagttctccgaccacttctggtccagcctggagatcaccttcaacctgcgagataccaacatgatcccgggctcccccggcagtacggagttagagggtggcttcagtcggcaacgcaagcgcaagttgtccttccgcaggcgcacggacaaggacacggagcagccaggggaggtgtcggccttggggccgggccgggcgggggcagggccgagtagccggggccggccgggggggccgtggggggagagcccgtccagtggcccctccagccctgagagcagtgaggatgagggcccaggccgcagctccagccccctccgcctggtgcccttctccagccccaggccccccggagagccgccgggtggggagcccctgatggaggactgcgagaagagcagcgacacttgcaaccccctgtcaggcgccttctcaggagtgtccaacattttcagcttctggggggacagtcggggccgccagtaccaggagctccctcgatgccccgcccccacccccagcctcctcaacatccccctctccagcccgggtcggcggccccggggcgacgtggagagcaggctggatgccctccagcgccagctcaacaggctggagacccggctgagtgcagacatggccactgtcctgcagctgctacagaggcagatgacgctggtcccgcccgcctacagtgctgtgaccaccccggggcctggccccacttccacatccccgctgttgcccgtcagccccctccccaccctcaccttggactcgctttctcaggtttcccagttcatggcgtgtgaggagctgcccccgggggccccagagcttccccaagaaggccccacacgacgcctctccctaccgggccagctgggggccctcacctcccagcccctgcacagacacggctcggacccgggcagttagtggggctgcccagtgtggacacgtggctcacccagggatcaaggcgctgctgggccgctccccttggaggccctgctcaggaggccctgaccgtggaaggggagaggaactcgaaagcacagctcctcccccagcccttgggaccatcttctcctgcagtcccctgggccccagtgagaggggcaggggcagggccggcagtaggtggggcctgtggtccccccactgccctgagggcattagctggtctaactgcccggaggcacccggccctgggccttaggcacctcaaggacttttctgctatttactgctcttattgttaaggataataattaaggatcatatgaataattaatgaagatgctgatgactatgaataataaataattatcctgaggaga

SEQ ID NO: 324 - DNA, 3884 bp, Homo sapiens
  source 1..3884: mol_type = genomic DNA
  misc_feature 1..3884: note = cDNA of KCNH2 gene SNP c.1881C>A (p.Phe627Leu)
atgccggtgcggaggggccacgtcgcgccgcagaacaccttcctggacaccatcatccgcaagtttgagggccagagccgtaagttcatcatcgccaacgctcgggtggagaactgcgccgtcatctactgcaacgacggcttctgcgagctgtgcggctactcgcgggccgaggtgatgcagcgaccctgcacctgcgacttcctgcacgggccgcgcacgcagcgccgcgctgccgcgcagatcgcgcaggcactgctgggcgccgaggagcgcaaagtggaaatcgccttctaccggaaagatgggagctgcttcctatgtctggtggatgtggtgcccgtgaagaacgaggatggggctgtcatcatgttcatcctcaatttcgaggtggtgatggagaaggacatggtggggtccccggctcatgacaccaaccaccggggcccccccaccagctggctggccccaggccgcgccaagaccttccgcctgaagctgcccgcgctgctggcgctgacggcccgggagtcgtcggtgcggtcgggcggcgcgggcggcgcgggcgccccgggggccgtggtggtggacgtggacctgacgcccgcggcacccagcagcgagtcgctggccctggacgaagtgacagccatggacaaccacgtggcagggctcgggcccgcggaggagcggcgtgcgctggtgggtcccggctctccgccccgcagcgcgcccggccagctcccatcgccccgggcgcacagcctcaaccccgacgcctcgggctccagctgcagcctggcccggacgcgctcccgagaaagctgcgccagcgtgcgccgcgcctcgtcggccgacgacatcgaggccatgcgcgccggggtgctgcccccgccaccgcgccacgccagcaccggggccatgcacccactgcgcagcggcttgctcaactccacctcggactccgacctcgtgcgctaccgcaccattagcaagattccccaaatcaccctcaactttgtggacctcaagggcgaccccttcttggcttcgcccaccagtgaccgtgagatcatagcacctaagataaaggagcgaacccacaatgtcactgagaaggtcacccaggtcctgtccctgggcgccgacgtgctgcctgagtacaagctgcaggcaccgcgcatccaccgctggaccatcctgcattacagccccttcaaggccgtgtgggactggctcatcctgctgctggtcatctacacggctgtcttcacaccctactcggctgccttcctgctgaaggagacggaagaaggcccgcctgctaccgagtgtggctacgcctgccagccgctggctgtggtggacctcatcgtggacatcatgttcattgtggacatcctcatcaacttccgcaccacctacgtcaatgccaacgaggaggtggtcagccaccccggccgcatcgccgtccactacttcaagggctggttcctcatcgacatggtggccgccatccccttcgacctgctcatcttcggctctggctctgaggagctgatcgggctgctgaagactgcgcggctgctgcggctggtgcgcgtggcgcggaagctggatcgctactcagagtacggcgcggccgtgctgttcttgctcatgtgcacctttgcgctcatcgcgcactggctagcctgcatctggtacgccatcggcaacatggagcagccacacatggactcacgcatcggctggctgcacaacctgggcgaccagataggcaaaccctacaacagcagcggcctgggcggcccctccatcaaggacaagtatgtgacggcgctctacttcaccttcagcagcctcaccagtgtgggcttaggcaacgtctctcccaacaccaactcagagaagatcttctccatctgcgtcatgctcattggctccctcatgtatgctagcatcttcggcaacgtgtcggccatcatccagcggctgtactcgggcacagcccgctaccacacacagatgctgcgggtgcgggagttcatccgcttccaccagatccccaatcccctgcgccagcgcctcgaggagtacttccagcacgcctggtcctacaccaacggcatcgacatgaacgcggtgctgaagggcttccctgagtgcctgcaggctgacatctgcctgcacctgaaccgctcactgctgcagcactgcaaacccttccgaggggccaccaagggctgccttcgggccctggccatgaagttcaagaccacacatgcaccgccaggggacacactggtgcatgctggggacctgctcaccgccctgtacttcatctcccggggctccatcgagatcctgcggggcgacgtcgtcgtggccatcctggggaagaatgacatctttggggagcctctgaacctgtatgcaaggcctggcaagtcgaacggggatgtgcgggccctcacctactgtgacctacacaagatccatcgggacgacctgctggaggtgctggacatgtaccctgagttctccgaccacttctggtccagcctggagatcaccttcaacctgcgagataccaacatgatcccgggctcccccggcagtacggagttagagggtggcttcagtcggcaacgcaagcgcaagttgtccttccgcaggcgcacggacaaggacacggagcagccaggggaggtgtcggccttggggccgggccgggcgggggcagggccgagtagccggggccggccgggggggccgtggggggagagcccgtccagtggcccctccagccctgagagcagtgaggatgagggcccaggccgcagctccagccccctccgcctggtgcccttctccagccccaggccccccggagagccgccgggtggggagcccctgatggaggactgcgagaagagcagcgacacttgcaaccccctgtcaggcgccttctcaggagtgtccaacattttcagcttctggggggacagtcggggccgccagtaccaggagctccctcgatgccccgcccccacccccagcctcctcaacatccccctctccagcccgggtcggcggccccggggcgacgtggagagcaggctggatgccctccagcgccagctcaacaggctggagacccggctgagtgcagacatggccactgtcctgcagctgctacagaggcagatgacgctggtcccgcccgcctacagtgctgtgaccaccccggggcctggccccacttccacatccccgctgttgcccgtcagccccctccccaccctcaccttggactcgctttctcaggtttcccagttcatggcgtgtgaggagctgcccccgggggccccagagcttccccaagaaggccccacacgacgcctctccctaccgggccagctgggggccctcacctcccagcccctgcacagacacggctcggacccgggcagttagtggggctgcccagtgtggacacgtggctcacccagggatcaaggcgctgctgggccgctccccttggaggccctgctcaggaggccctgaccgtggaaggggagaggaactcgaaagcacagctcctcccccagcccttgggaccatcttctcctgcagtcccctgggccccagtgagaggggcaggggcagggccggcagtaggtggggcctgtggtccccccactgccctgagggcattagctggtctaactgcccggaggcacccggccctgggccttaggcacctcaaggacttttctgctatttactgctcttattgttaaggataataattaaggatcatatgaataattaatgaagatgctgatgactatgaataataaataattatcctgaggaga

SEQ ID NO: 325 - DNA, 3884 bp, Homo sapiens
  source 1..3884: mol_type = genomic DNA
  misc_feature 1..3884: note = cDNA of KCNH2 gene SNP c.1881C>G (p.Phe627Leu)
atgccggtgcggaggggccacgtcgcgccgcagaacaccttcctggacaccatcatccgcaagtttgagggccagagccgtaagttcatcatcgccaacgctcgggtggagaactgcgccgtcatctactgcaacgacggcttctgcgagctgtgcggctactcgcgggccgaggtgatgcagcgaccctgcacctgcgacttcctgcacgggccgcgcacgcagcgccgcgctgccgcgcagatcgcgcaggcactgctgggcgccgaggagcgcaaagtggaaatcgccttctaccggaaagatgggagctgcttcctatgtctggtggatgtggtgcccgtgaagaacgaggatggggctgtcatcatgttcatcctcaatttcgaggtggtgatggagaaggacatggtggggtccccggctcatgacaccaaccaccggggcccccccaccagctggctggccccaggccgcgccaagaccttccgcctgaagctgcccgcgctgctggcgctgacggcccgggagtcgtcggtgcggtcgggcggcgcgggcggcgcgggcgccccgggggccgtggtggtggacgtggacctgacgcccgcggcacccagcagcgagtcgctggccctggacgaagtgacagccatggacaaccacgtggcagggctcgggcccgcggaggagcggcgtgcgctggtgggtcccggctctccgccccgcagcgcgcccggccagctcccatcgccccgggcgcacagcctcaaccccgacgcctcgggctccagctgcagcctggcccggacgcgctcccgagaaagctgcgccagcgtgcgccgcgcctcgtcggccgacgacatcgaggccatgcgcgccggggtgctgcccccgccaccgcgccacgccagcaccggggccatgcacccactgcgcagcggcttgctcaactccacctcggactccgacctcgtgcgctaccgcaccattagcaagattccccaaatcaccctcaactttgtggacctcaagggcgaccccttcttggcttcgcccaccagtgaccgtgagatcatagcacctaagataaaggagcgaacccacaatgtcactgagaaggtcacccaggtcctgtccctgggcgccgacgtgctgcctgagtacaagctgcaggcaccgcgcatccaccgctggaccatcctgcattacagccccttcaaggccgtgtgggactggctcatcctgctgctggtcatctacacggctgtcttcacaccctactcggctgccttcctgctgaaggagacggaagaaggcccgcctgctaccgagtgtggctacgcctgccagccgctggctgtggtggacctcatcgtggacatcatgttcattgtggacatcctcatcaacttccgcaccacctacgtcaatgccaacgaggaggtggtcagccaccccggccgcatcgccgtccactacttcaagggctggttcctcatcgacatggtggccgccatccccttcgacctgctcatcttcggctctggctctgaggagctgatcgggctgctgaagactgcgcggctgctgcggctggtgcgcgtggcgcggaagctggatcgctactcagagtacggcgcggccgtgctgttcttgctcatgtgcacctttgcgctcatcgcgcactggctagcctgcatctggtacgccatcggcaacatggagcagccacacatggactcacgcatcggctggctgcacaacctgggcgaccagataggcaaaccctacaacagcagcggcctgggcggcccctccatcaaggacaagtatgtgacggcgctctacttcaccttcagcagcctcaccagtgtgggcttgggcaacgtctctcccaacaccaactcagagaagatcttctccatctgcgtcatgctcattggctccctcatgtatgctagcatcttcggcaacgtgtcggccatcatccagcggctgtactcgggcacagcccgctaccacacacagatgctgcgggtgcgggagttcatccgcttccaccagatccccaatcccctgcgccagcgcctcgaggagtacttccagcacgcctggtcctacaccaacggcatcgacatgaacgcggtgctgaagggcttccctgagtgcctgcaggctgacatctgcctgcacctgaaccgctcactgctgcagcactgcaaacccttccgaggggccaccaagggctgccttcgggccctggccatgaagttcaagaccacacatgcaccgccaggggacacactggtgcatgctggggacctgctcaccgccctgtacttcatctcccggggctccatcgagatcctgcggggcgacgtcgtcgtggccatcctggggaagaatgacatctttggggagcctctgaacctgtatgcaaggcctggcaagtcgaacggggatgtgcgggccctcacctactgtgacctacacaagatccatcgggacgacctgctggaggtgctggacatgtaccctgagttctccgaccacttctggtccagcctggagatcaccttcaacctgcgagataccaacatgatcccgggctcccccggcagtacggagttagagggtggcttcagtcggcaacgcaagcgcaagttgtccttccgcaggcgcacggacaaggacacggagcagccaggggaggtgtcggccttggggccgggccgggcgggggcagggccgagtagccggggccggccgggggggccgtggggggagagcccgtccagtggcccctccagccctgagagcagtgaggatgagggcccaggccgcagctccagccccctccgcctggtgcccttctccagccccaggccccccggagagccgccgggtggggagcccctgatggaggactgcgagaagagcagcgacacttgcaaccccctgtcaggcgccttctcaggagtgtccaacattttcagcttctggggggacagtcggggccgccagtaccaggagctccctcgatgccccgcccccacccccagcctcctcaacatccccctctccagcccgggtcggcggccccggggcgacgtggagagcaggctggatgccctccagcgccagctcaacaggctggagacccggctgagtgcagacatggccactgtcctgcagctgctacagaggcagatgacgctggtcccgcccgcctacagtgctgtgaccaccccggggcctggccccacttccacatccccgctgttgcccgtcagccccctccccaccctcaccttggactcgctttctcaggtttcccagttcatggcgtgtgaggagctgcccccgggggccccagagcttccccaagaaggccccacacgacgcctctccctaccgggccagctgggggccctcacctcccagcccctgcacagacacggctcggacccgggcagttagtggggctgcccagtgtggacacgtggctcacccagggatcaaggcgctgctgggccgctccccttggaggccctgctcaggaggccctgaccgtggaaggggagaggaactcgaaagcacagctcctcccccagcccttgggaccatcttctcctgcagtcccctgggccccagtgagaggggcaggggcagggccggcagtaggtggggcctgtggtccccccactgccctgagggcattagctggtctaactgcccggaggcacccggccctgggccttaggcacctcaaggacttttctgctatttactgctcttattgttaaggataataattaaggatcatatgaataattaatgaagatgctgatgactatgaataataaataattatcctgaggaga

SEQ ID NO: 326 - DNA, 3884 bp, Homo sapiens
  source 1..3884: mol_type = genomic DNA
  misc_feature 1..3884: note = cDNA of KCNH2 gene SNP c.1882G>A (p.Gly628Ser)
atgccggtgcggaggggccacgtcgcgccgcagaacaccttcctggacaccatcatccgcaagtttgagggccagagccgtaagttcatcatcgccaacgctcgggtggagaactgcgccgtcatctactgcaacgacggcttctgcgagctgtgcggctactcgcgggccgaggtgatgcagcgaccctgcacctgcgacttcctgcacgggccgcgcacgcagcgccgcgctgccgcgcagatcgcgcaggcactgctgggcgccgaggagcgcaaagtggaaatcgccttctaccggaaagatgggagctgcttcctatgtctggtggatgtggtgcccgtgaagaacgaggatggggctgtcatcatgttcatcctcaatttcgaggtggtgatggagaaggacatggtggggtccccggctcatgacaccaaccaccggggcccccccaccagctggctggccccaggccgcgccaagaccttccgcctgaagctgcccgcgctgctggcgctgacggcccgggagtcgtcggtgcggtcgggcggcgcgggcggcgcgggcgccccgggggccgtggtggtggacgtggacctgacgcccgcggcacccagcagcgagtcgctggccctggacgaagtgacagccatggacaaccacgtggcagggctcgggcccgcggaggagcggcgtgcgctggtgggtcccggctctccgccccgcagcgcgcccggccagctcccatcgccccgggcgcacagcctcaaccccgacgcctcgggctccagctgcagcctggcccggacgcgctcccgagaaagctgcgccagcgtgcgccgcgcctcgtcggccgacgacatcgaggccatgcgcgccggggtgctgcccccgccaccgcgccacgccagcaccggggccatgcacccactgcgcagcggcttgctcaactccacctcggactccgacctcgtgcgctaccgcaccattagcaagattccccaaatcaccctcaactttgtggacctcaagggcgaccccttcttggcttcgcccaccagtgaccgtgagatcatagcacctaagataaaggagcgaacccacaatgtcactgagaaggtcacccaggtcctgtccctgggcgccgacgtgctgcctgagtacaagctgcaggcaccgcgcatccaccgctggaccatcctgcattacagccccttcaaggccgtgtgggactggctcatcctgctgctggtcatctacacggctgtcttcacaccctactcggctgccttcctgctgaaggagacggaagaaggcccgcctgctaccgagtgtggctacgcctgccagccgctggctgtggtggacctcatcgtggacatcatgttcattgtggacatcctcatcaacttccgcaccacctacgtcaatgccaacgaggaggtggtcagccaccccggccgcatcgccgtccactacttcaagggctggttcctcatcgacatggtggccgccatccccttcgacctgctcatcttcggctctggctctgaggagctgatcgggctgctgaagactgcgcggctgctgcggctggtgcgcgtggcgcggaagctggatcgctactcagagtacggcgcggccgtgctgttcttgctcatgtgcacctttgcgctcatcgcgcactggctagcctgcatctggtacgccatcggcaacatggagcagccacacatggactcacgcatcggctggctgcacaacctgggcgaccagataggcaaaccctacaacagcagcggcctgggcggcccctccatcaaggacaagtatgtgacggcgctctacttcaccttcagcagcctcaccagtgtgggcttcagcaacgtctctcccaacaccaactcagagaagatcttctccatctgcgtcatgctcattggctccctcatgtatgctagcatcttcggcaacgtgtcggccatcatccagcggctgtactcgggcacagcccgctaccacacacagatgctgcgggtgcgggagttcatccgcttccaccagatccccaatcccctgcgccagcgcctcgaggagtacttccagcacgcctggtcctacaccaacggcatcgacatgaacgcggtgctgaagggcttccctgagtgcctgcaggctgacatctgcctgcacctgaaccgctcactgctgcagcactgcaaacccttccgaggggccaccaagggctgccttcgggccctggccatgaagttcaagaccacacatgcaccgccaggggacacactggtgcatgctggggacctgctcaccgccctgtacttcatctcccggggctccatcgagatcctgcggggcgacgtcgtcgtggccatcctggggaagaatgacatctttggggagcctctgaacctgtatgcaaggcctggcaagtcgaacggggatgtgcgggccctcacctactgtgacctacacaagatccatcgggacgacctgctggaggtgctggacatgtaccctgagttctccgaccacttctggtccagcctggagatcaccttcaacctgcgagataccaacatgatcccgggctcccccggcagtacggagttagagggtggcttcagtcggcaacgcaagcgcaagttgtccttccgcaggcgcacggacaaggacacggagcagccaggggaggtgtcggccttggggccgggccgggcgggggcagggccgagtagccggggccggccgggggggccgtggggggagagcccgtccagtggcccctccagccctgagagcagtgaggatgagggcccaggccgcagctccagccccctccgcctggtgcccttctccagccccaggccccccggagagccgccgggtggggagcccctgatggaggactgcgagaagagcagcgacacttgcaaccccctgtcaggcgccttctcaggagtgtccaacattttcagcttctggggggacagtcggggccgccagtaccaggagctccctcgatgccccgcccccacccccagcctcctcaacatccccctctccagcccgggtcggcggccccggggcgacgtggagagcaggctggatgccctccagcgccagctcaacaggctggagacccggctgagtgcagacatggccactgtcctgcagctgctacagaggcagatgacgctggtcccgcccgcctacagtgctgtgaccaccccggggcctggccccacttccacatccccgctgttgcccgtcagccccctccccaccctcaccttggactcgctttctcaggtttcccagttcatggcgtgtgaggagctgcccccgggggccccagagcttccccaagaaggccccacacgacgcctctccctaccgggccagctgggggccctcacctcccagcccctgcacagacacggctcggacccgggcagttagtggggctgcccagtgtggacacgtggctcacccagggatcaaggcgctgctgggccgctccccttggaggccctgctcaggaggccctgaccgtggaaggggagaggaactcgaaagcacagctcctcccccagcccttgggaccatcttctcctgcagtcccctgggccccagtgagaggggcaggggcagggccggcagtaggtggggcctgtggtccccccactgccctgagggcattagctggtctaactgcccggaggcacccggccctgggccttaggcacctcaaggacttttctgctatttactgctcttattgttaaggataataattaaggatcatatgaataattaatgaagatgctgatgactatgaataataaataattatcctgaggaga

SEQ ID NO: 327 - DNA, 3884 bp, Homo sapiens
  source 1..3884: mol_type = genomic DNA
  misc_feature 1..3884: note = cDNA of KCNH2 gene SNP c.1882G>C (p.Gly628Arg)
atgccggtgcggaggggccacgtcgcgccgcagaacaccttcctggacaccatcatccgcaagtttgagggccagagccgtaagttcatcatcgccaacgctcgggtggagaactgcgccgtcatctactgcaacgacggcttctgcgagctgtgcggctactcgcgggccgaggtgatgcagcgaccctgcacctgcgacttcctgcacgggccgcgcacgcagcgccgcgctgccgcgcagatcgcgcaggcactgctgggcgccgaggagcgcaaagtggaaatcgccttctaccggaaagatgggagctgcttcctatgtctggtggatgtggtgcccgtgaagaacgaggatggggctgtcatcatgttcatcctcaatttcgaggtggtgatggagaaggacatggtggggtccccggctcatgacaccaaccaccggggcccccccaccagctggctggccccaggccgcgccaagaccttccgcctgaagctgcccgcgctgctggcgctgacggcccgggagtcgtcggtgcggtcgggcggcgcgggcggcgcgggcgccccgggggccgtggtggtggacgtggacctgacgcccgcggcacccagcagcgagtcgctggccctggacgaagtgacagccatggacaaccacgtggcagggctcgggcccgcggaggagcggcgtgcgctggtgggtcccggctctccgccccgcagcgcgcccggccagctcccatcgccccgggcgcacagcctcaaccccgacgcctcgggctccagctgcagcctggcccggacgcgctcccgagaaagctgcgccagcgtgcgccgcgcctcgtcggccgacgacatcgaggccatgcgcgccggggtgctgcccccgccaccgcgccacgccagcaccggggccatgcacccactgcgcagcggcttgctcaactccacctcggactccgacctcgtgcgctaccgcaccattagcaagattccccaaatcaccctcaactttgtggacctcaagggcgaccccttcttggcttcgcccaccagtgaccgtgagatcatagcacctaagataaaggagcgaacccacaatgtcactgagaaggtcacccaggtcctgtccctgggcgccgacgtgctgcctgagtacaagctgcaggcaccgcgcatccaccgctggaccatcctgcattacagccccttcaaggccgtgtgggactggctcatcctgctgctggtcatctacacggctgtcttcacaccctactcggctgccttcctgctgaaggagacggaagaaggcccgcctgctaccgagtgtggctacgcctgccagccgctggctgtggtggacctcatcgtggacatcatgttcattgtggacatcctcatcaacttccgcaccacctacgtcaatgccaacgaggaggtggtcagccaccccggccgcatcgccgtccactacttcaagggctggttcctcatcgacatggtggccgccatccccttcgacctgctcatcttcggctctggctctgaggagctgatcgggctgctgaagactgcgcggctgctgcggctggtgcgcgtggcgcggaagctggatcgctactcagagtacggcgcggccgtgctgttcttgctcatgtgcacctttgcgctcatcgcgcactggctagcctgcatctggtacgccatcggcaacatggagcagccacacatggactcacgcatcggctggctgcacaacctgggcgaccagataggcaaaccctacaacagcagcggcctgggcggcccctccatcaaggacaagtatgtgacggcgctctacttcaccttcagcagcctcaccagtgtgggcttccgcaacgtctctcccaacaccaactcagagaagatcttctccatctgcgtcatgctcattggctccctcatgtatgctagcatcttcggcaacgtgtcggccatcatccagcggctgtactcgggcacagcccgctaccacacacagatgctgcgggtgcgggagttcatccgcttccaccagatccccaatcccctgcgccagcgcctcgaggagtacttccagcacgcctggtcctacaccaacggcatcgacatgaacgcggtgctgaagggcttccctgagtgcctgcaggctgacatctgcctgcacctgaaccgctcactgctgcagcactgcaaacccttccgaggggccaccaagggctgccttcgggccctggccatgaagttcaagaccacacatgcaccgccaggggacacactggtgcatgctggggacctgctcaccgccctgtacttcatctcccggggctccatcgagatcctgcggggcgacgtcgtcgtggccatcctggggaagaatgacatctttggggagcctctgaacctgtatgcaaggcctggcaagtcgaacggggatgtgcgggccctcacctactgtgacctacacaagatccatcgggacgacctgctggaggtgctggacatgtaccctgagttctccgaccacttctggtccagcctggagatcaccttcaacctgcgagataccaacatgatcccgggctcccccggcagtacggagttagagggtggcttcagtcggcaacgcaagcgcaagttgtccttccgcaggcgcacggacaaggacacggagcagccaggggaggtgtcggccttggggccgggccgggcgggggcagggccgagtagccggggccggccgggggggccgtggggggagagcccgtccagtggcccctccagccctgagagcagtgaggatgagggcccaggccgcagctccagccccctccgcctggtgcccttctccagccccaggccccccggagagccgccgggtggggagcccctgatggaggactgcgagaagagcagcgacacttgcaaccccctgtcaggcgccttctcaggagtgtccaacattttcagcttctggggggacagtcggggccgccagtaccaggagctccctcgatgccccgcccccacccccagcctcctcaacatccccctctccagcccgggtcggcggccccggggcgacgtggagagcaggctggatgccctccagcgccagctcaacaggctggagacccggctgagtgcagacatggccactgtcctgcagctgctacagaggcagatgacgctggtcccgcccgcctacagtgctgtgaccaccccggggcctggccccacttccacatccccgctgttgcccgtcagccccctccccaccctcaccttggactcgctttctcaggtttcccagttcatggcgtgtgaggagctgcccccgggggccccagagcttccccaagaaggccccacacgacgcctctccctaccgggccagctgggggccctcacctcccagcccctgcacagacacggctcggacccgggcagttagtggggctgcccagtgtggacacgtggctcacccagggatcaaggcgctgctgggccgctccccttggaggccctgctcaggaggccctgaccgtggaaggggagaggaactcgaaagcacagctcctcccccagcccttgggaccatcttctcctgcagtcccctgggccccagtgagaggggcaggggcagggccggcagtaggtggggcctgtggtccccccactgccctgagggcattagctggtctaactgcccggaggcacccggccctgggccttaggcacctcaaggacttttctgctatttactgctcttattgttaaggataataattaaggatcatatgaataattaatgaagatgctgatgactatgaataataaataattatcctgaggaga

SEQ ID NO: 328 - DNA, 3884 bp, Homo sapiens
  source 1..3884: mol_type = genomic DNA
  misc_feature 1..3884: note = cDNA of KCNH2 gene SNP c.1883G>C (p.Gly628Ala)
atgccggtgcggaggggccacgtcgcgccgcagaacaccttcctggacaccatcatccgcaagtttgagggccagagccgtaagttcatcatcgccaacgctcgggtggagaactgcgccgtcatctactgcaacgacggcttctgcgagctgtgcggctactcgcgggccgaggtgatgcagcgaccctgcacctgcgacttcctgcacgggccgcgcacgcagcgccgcgctgccgcgcagatcgcgcaggcactgctgggcgccgaggagcgcaaagtggaaatcgccttctaccggaaagatgggagctgcttcctatgtctggtggatgtggtgcccgtgaagaacgaggatggggctgtcatcatgttcatcctcaatttcgaggtggtgatggagaaggacatggtggggtccccggctcatgacaccaaccaccggggcccccccaccagctggctggccccaggccgcgccaagaccttccgcctgaagctgcccgcgctgctggcgctgacggcccgggagtcgtcggtgcggtcgggcggcgcgggcggcgcgggcgccccgggggccgtggtggtggacgtggacctgacgcccgcggcacccagcagcgagtcgctggccctggacgaagtgacagccatggacaaccacgtggcagggctcgggcccgcggaggagcggcgtgcgctggtgggtcccggctctccgccccgcagcgcgcccggccagctcccatcgccccgggcgcacagcctcaaccccgacgcctcgggctccagctgcagcctggcccggacgcgctcccgagaaagctgcgccagcgtgcgccgcgcctcgtcggccgacgacatcgaggccatgcgcgccggggtgctgcccccgccaccgcgccacgccagcaccggggccatgcacccactgcgcagcggcttgctcaactccacctcggactccgacctcgtgcgctaccgcaccattagcaagattccccaaatcaccctcaactttgtggacctcaagggcgaccccttcttggcttcgcccaccagtgaccgtgagatcatagcacctaagataaaggagcgaacccacaatgtcactgagaaggtcacccaggtcctgtccctgggcgccgacgtgctgcctgagtacaagctgcaggcaccgcgcatccaccgctggaccatcctgcattacagccccttcaaggccgtgtgggactggctcatcctgctgctggtcatctacacggctgtcttcacaccctactcggctgccttcctgctgaaggagacggaagaaggcccgcctgctaccgagtgtggctacgcctgccagccgctggctgtggtggacctcatcgtggacatcatgttcattgtggacatcctcatcaacttccgcaccacctacgtcaatgccaacgaggaggtggtcagccaccccggccgcatcgccgtccactacttcaagggctggttcctcatcgacatggtggccgccatccccttcgacctgctcatcttcggctctggctctgaggagctgatcgggctgctgaagactgcgcggctgctgcggctggtgcgcgtggcgcggaagctggatcgctactcagagtacggcgcggccgtgctgttcttgctcatgtgcacctttgcgctcatcgcgcactggctagcctgcatctggtacgccatcggcaacatggagcagccacacatggactcacgcatcggctggctgcacaacctgggcgaccagataggcaaaccctacaacagcagcggcctgggcggcccctccatcaaggacaagtatgtgacggcgctctacttcaccttcagcagcctcaccagtgtgggcttcgccaacgtctctcccaacaccaactcagagaagatcttctccatctgcgtcatgctcattggctccctcatgtatgctagcatcttcggcaacgtgtcggccatcatccagcggctgtactcgggcacagcccgctaccacacacagatgctgcgggtgcgggagttcatccgcttccaccagatccccaatcccctgcgccagcgcctcgaggagtacttccagcacgcctggtcctacaccaacggcatcgacatgaacgcggtgctgaagggcttccctgagtgcctgcaggctgacatctgcctgcacctgaaccgctcactgctgcagcactgcaaacccttccgaggggccaccaagggctgccttcgggccctggccatgaagttcaagaccacacatgcaccgccaggggacacactggtgcatgctggggacctgctcaccgccctgtacttcatctcccggggctccatcgagatcctgcggggcgacgtcgtcgtggccatcctggggaagaatgacatctttggggagcctctgaacctgtatgcaaggcctggcaagtcgaacggggatgtgcgggccctcacctactgtgacctacacaagatccatcgggacgacctgctggaggtgctggacatgtaccctgagttctccgaccacttctggtccagcctggagatcaccttcaacctgcgagataccaacatgatcccgggctcccccggcagtacggagttagagggtggcttcagtcggcaacgcaagcgcaagttgtccttccgcaggcgcacggacaaggacacggagcagccaggggaggtgtcggccttggggccgggccgggcgggggcagggccgagtagccggggccggccgggggggccgtggggggagagcccgtccagtggcccctccagccctgagagcagtgaggatgagggcccaggccgcagctccagccccctccgcctggtgcccttctccagccccaggccccccggagagccgccgggtggggagcccctgatggaggactgcgagaagagcagcgacacttgcaaccccctgtcaggcgccttctcaggagtgtccaacattttcagcttctggggggacagtcggggccgccagtaccaggagctccctcgatgccccgcccccacccccagcctcctcaacatccccctctccagcccgggtcggcggccccggggcgacgtggagagcaggctggatgccctccagcgccagctcaacaggctggagacccggctgagtgcagacatggccactgtcctgcagctgctacagaggcagatgacgctggtcccgcccgcctacagtgctgtgaccaccccggggcctggccccacttccacatccccgctgttgcccgtcagccccctccccaccctcaccttggactcgctttctcaggtttcccagttcatggcgtgtgaggagctgcccccgggggccccagagcttccccaagaaggccccacacgacgcctctccctaccgggccagctgggggccctcacctcccagcccctgcacagacacggctcggacccgggcagttagtggggctgcccagtgtggacacgtggctcacccagggatcaaggcgctgctgggccgctccccttggaggccctgctcaggaggccctgaccgtggaaggggagaggaactcgaaagcacagctcctcccccagcccttgggaccatcttctcctgcagtcccctgggccccagtgagaggggcaggggcagggccggcagtaggtggggcctgtggtccccccactgccctgagggcattagctggtctaactgcccggaggcacccggccctgggccttaggcacctcaaggacttttctgctatttactgctcttattgttaaggataataattaaggatcatatgaataattaatgaagatgctgatgactatgaataataaataattatcctgaggaga

SEQ ID NO: 329 - DNA, 3884 bp, Homo sapiens
  source 1..3884: mol_type = genomic DNA
  misc_feature 1..3884: note = cDNA of KCNH2 gene SNP c.1883G>T (p.Gly628Val)
atgccggtgcggaggggccacgtcgcgccgcagaacaccttcctggacaccatcatccgcaagtttgagggccagagccgtaagttcatcatcgccaacgctcgggtggagaactgcgccgtcatctactgcaacgacggcttctgcgagctgtgcggctactcgcgggccgaggtgatgcagcgaccctgcacctgcgacttcctgcacgggccgcgcacgcagcgccgcgctgccgcgcagatcgcgcaggcactgctgggcgccgaggagcgcaaagtggaaatcgccttctaccggaaagatgggagctgcttcctatgtctggtggatgtggtgcccgtgaagaacgaggatggggctgtcatcatgttcatcctcaatttcgaggtggtgatggagaaggacatggtggggtccccggctcatgacaccaaccaccggggcccccccaccagctggctggccccaggccgcgccaagaccttccgcctgaagctgcccgcgctgctggcgctgacggcccgggagtcgtcggtgcggtcgggcggcgcgggcggcgcgggcgccccgggggccgtggtggtggacgtggacctgacgcccgcggcacccagcagcgagtcgctggccctggacgaagtgacagccatggacaaccacgtggcagggctcgggcccgcggaggagcggcgtgcgctggtgggtcccggctctccgccccgcagcgcgcccggccagctcccatcgccccgggcgcacagcctcaaccccgacgcctcgggctccagctgcagcctggcccggacgcgctcccgagaaagctgcgccagcgtgcgccgcgcctcgtcggccgacgacatcgaggccatgcgcgccggggtgctgcccccgccaccgcgccacgccagcaccggggccatgcacccactgcgcagcggcttgctcaactccacctcggactccgacctcgtgcgctaccgcaccattagcaagattccccaaatcaccctcaactttgtggacctcaagggcgaccccttcttggcttcgcccaccagtgaccgtgagatcatagcacctaagataaaggagcgaacccacaatgtcactgagaaggtcacccaggtcctgtccctgggcgccgacgtgctgcctgagtacaagctgcaggcaccgcgcatccaccgctggaccatcctgcattacagccccttcaaggccgtgtgggactggctcatcctgctgctggtcatctacacggctgtcttcacaccctactcggctgccttcctgctgaaggagacggaagaaggcccgcctgctaccgagtgtggctacgcctgccagccgctggctgtggtggacctcatcgtggacatcatgttcattgtggacatcctcatcaacttccgcaccacctacgtcaatgccaacgaggaggtggtcagccaccccggccgcatcgccgtccactacttcaagggctggttcctcatcgacatggtggccgccatccccttcgacctgctcatcttcggctctggctctgaggagctgatcgggctgctgaagactgcgcggctgctgcggctggtgcgcgtggcgcggaagctggatcgctactcagagtacggcgcggccgtgctgttcttgctcatgtgcacctttgcgctcatcgcgcactggctagcctgcatctggtacgccatcggcaacatggagcagccacacatggactcacgcatcggctggctgcacaacctgggcgaccagataggcaaaccctacaacagcagcggcctgggcggcccctccatcaaggacaagtatgtgacggcgctctacttcaccttcagcagcctcaccagtgtgggcttcgtcaacgtctctcccaacaccaactcagagaagatcttctccatctgcgtcatgctcattggctccctcatgtatgctagcatcttcggcaacgtgtcggccatcatccagcggctgtactcgggcacagcccgctaccacacacagatgctgcgggtgcgggagttcatccgcttccaccagatccccaatcccctgcgccagcgcctcgaggagtacttccagcacgcctggtcctacaccaacggcatcgacatgaacgcggtgctgaagggcttccctgagtgcctgcaggctgacatctgcctgcacctgaaccgctcactgctgcagcactgcaaacccttccgaggggccaccaagggctgccttcgggccctggccatgaagttcaagaccacacatgcaccgccaggggacacactggtgcatgctggggacctgctcaccgccctgtacttcatctcccggggctccatcgagatcctgcggggcgacgtcgtcgtggccatcctggggaagaatgacatctttggggagcctctgaacctgtatgcaaggcctggcaagtcgaacggggatgtgcgggccctcacctactgtgacctacacaagatccatcgggacgacctgctggaggtgctggacatgtaccctgagttctccgaccacttctggtccagcctggagatcaccttcaacctgcgagataccaacatgatcccgggctcccccggcagtacggagttagagggtggcttcagtcggcaacgcaagcgcaagttgtccttccgcaggcgcacggacaaggacacggagcagccaggggaggtgtcggccttggggccgggccgggcgggggcagggccgagtagccggggccggccgggggggccgtggggggagagcccgtccagtggcccctccagccctgagagcagtgaggatgagggcccaggccgcagctccagccccctccgcctggtgcccttctccagccccaggccccccggagagccgccgggtggggagcccctgatggaggactgcgagaagagcagcgacacttgcaaccccctgtcaggcgccttctcaggagtgtccaacattttcagcttctggggggacagtcggggccgccagtaccaggagctccctcgatgccccgcccccacccccagcctcctcaacatccccctctccagcccgggtcggcggccccggggcgacgtggagagcaggctggatgccctccagcgccagctcaacaggctggagacccggctgagtgcagacatggccactgtcctgcagctgctacagaggcagatgacgctggtcccgcccgcctacagtgctgtgaccaccccggggcctggccccacttccacatccccgctgttgcccgtcagccccctccccaccctcaccttggactcgctttctcaggtttcccagttcatggcgtgtgaggagctgcccccgggggccccagagcttccccaagaaggccccacacgacgcctctccctaccgggccagctgggggccctcacctcccagcccctgcacagacacggctcggacccgggcagttagtggggctgcccagtgtggacacgtggctcacccagggatcaaggcgctgctgggccgctccccttggaggccctgctcaggaggccctgaccgtggaaggggagaggaactcgaaagcacagctcctcccccagcccttgggaccatcttctcctgcagtcccctgggccccagtgagaggggcaggggcagggccggcagtaggtggggcctgtggtccccccactgccctgagggcattagctggtctaactgcccggaggcacccggccctgggccttaggcacctcaaggacttttctgctatttactgctcttattgttaaggataataattaaggatcatatgaataattaatgaagatgctgatgactatgaataataaataattatcctgaggaga

SEQ ID NO: 330 - DNA, 3884 bp, Homo sapiens
  source 1..3884: mol_type = genomic DNA
  misc_feature 1..3884: note = cDNA of KCNH2 gene SNP c.1885A>G (p.Asn629Asp)
atgccggtgcggaggggccacgtcgcgccgcagaacaccttcctggacaccatcatccgcaagtttgagggccagagccgtaagttcatcatcgccaacgctcgggtggagaactgcgccgtcatctactgcaacgacggcttctgcgagctgtgcggctactcgcgggccgaggtgatgcagcgaccctgcacctgcgacttcctgcacgggccgcgcacgcagcgccgcgctgccgcgcagatcgcgcaggcactgctgggcgccgaggagcgcaaagtggaaatcgccttctaccggaaagatgggagctgcttcctatgtctggtggatgtggtgcccgtgaagaacgaggatggggctgtcatcatgttcatcctcaatttcgaggtggtgatggagaaggacatggtggggtccccggctcatgacaccaaccaccggggcccccccaccagctggctggccccaggccgcgccaagaccttccgcctgaagctgcccgcgctgctggcgctgacggcccgggagtcgtcggtgcggtcgggcggcgcgggcggcgcgggcgccccgggggccgtggtggtggacgtggacctgacgcccgcggcacccagcagcgagtcgctggccctggacgaagtgacagccatggacaaccacgtggcagggctcgggcccgcggaggagcggcgtgcgctggtgggtcccggctctccgccccgcagcgcgcccggccagctcccatcgccccgggcgcacagcctcaaccccgacgcctcgggctccagctgcagcctggcccggacgcgctcccgagaaagctgcgccagcgtgcgccgcgcctcgtcggccgacgacatcgaggccatgcgcgccggggtgctgcccccgccaccgcgccacgccagcaccggggccatgcacccactgcgcagcggcttgctcaactccacctcggactccgacctcgtgcgctaccgcaccattagcaagattccccaaatcaccctcaactttgtggacctcaagggcgaccccttcttggcttcgcccaccagtgaccgtgagatcatagcacctaagataaaggagcgaacccacaatgtcactgagaaggtcacccaggtcctgtccctgggcgccgacgtgctgcctgagtacaagctgcaggcaccgcgcatccaccgctggaccatcctgcattacagccccttcaaggccgtgtgggactggctcatcctgctgctggtcatctacacggctgtcttcacaccctactcggctgccttcctgctgaaggagacggaagaaggcccgcctgctaccgagtgtggctacgcctgccagccgctggctgtggtggacctcatcgtggacatcatgttcattgtggacatcctcatcaacttccgcaccacctacgtcaatgccaacgaggaggtggtcagccaccccggccgcatcgccgtccactacttcaagggctggttcctcatcgacatggtggccgccatccccttcgacctgctcatcttcggctctggctctgaggagctgatcgggctgctgaagactgcgcggctgctgcggctggtgcgcgtggcgcggaagctggatcgctactcagagtacggcgcggccgtgctgttcttgctcatgtgcacctttgcgctcatcgcgcactggctagcctgcatctggtacgccatcggcaacatggagcagccacacatggactcacgcatcggctggctgcacaacctgggcgaccagataggcaaaccctacaacagcagcggcctgggcggcccctccatcaaggacaagtatgtgacggcgctctacttcaccttcagcagcctcaccagtgtgggcttcggcgacgtctctcccaacaccaactcagagaagatcttctccatctgcgtcatgctcattggctccctcatgtatgctagcatcttcggcaacgtgtcggccatcatccagcggctgtactcgggcacagcccgctaccacacacagatgctgcgggtgcgggagttcatccgcttccaccagatccccaatcccctgcgccagcgcctcgaggagtacttccagcacgcctggtcctacaccaacggcatcgacatgaacgcggtgctgaagggcttccctgagtgcctgcaggctgacatctgcctgcacctgaaccgctcactgctgcagcactgcaaacccttccgaggggccaccaagggctgccttcgggccctggccatgaagttcaagaccacacatgcaccgccaggggacacactggtgcatgctggggacctgctcaccgccctgtacttcatctcccggggctccatcgagatcctgcggggcgacgtcgtcgtggccatcctggggaagaatgacatctttggggagcctctgaacctgtatgcaaggcctggcaagtcgaacggggatgtgcgggccctcacctactgtgacctacacaagatccatcgggacgacctgctggaggtgctggacatgtaccctgagttctccgaccacttctggtccagcctggagatcaccttcaacctgcgagataccaacatgatcccgggctcccccggcagtacggagttagagggtggcttcagtcggcaacgcaagcgcaagttgtccttccgcaggcgcacggacaaggacacggagcagccaggggaggtgtcggccttggggccgggccgggcgggggcagggccgagtagccggggccggccgggggggccgtggggggagagcccgtccagtggcccctccagccctgagagcagtgaggatgagggcccaggccgcagctccagccccctccgcctggtgcccttctccagccccaggccccccggagagccgccgggtggggagcccctgatggaggactgcgagaagagcagcgacacttgcaaccccctgtcaggcgccttctcaggagtgtccaacattttcagcttctggggggacagtcggggccgccagtaccaggagctccctcgatgccccgcccccacccccagcctcctcaacatccccctctccagcccgggtcggcggccccggggcgacgtggagagcaggctggatgccctccagcgccagctcaacaggctggagacccggctgagtgcagacatggccactgtcctgcagctgctacagaggcagatgacgctggtcccgcccgcctacagtgctgtgaccaccccggggcctggccccacttccacatccccgctgttgcccgtcagccccctccccaccctcaccttggactcgctttctcaggtttcccagttcatggcgtgtgaggagctgcccccgggggccccagagcttccccaagaaggccccacacgacgcctctccctaccgggccagctgggggccctcacctcccagcccctgcacagacacggctcggacccgggcagttagtggggctgcccagtgtggacacgtggctcacccagggatcaaggcgctgctgggccgctccccttggaggccctgctcaggaggccctgaccgtggaaggggagaggaactcgaaagcacagctcctcccccagcccttgggaccatcttctcctgcagtcccctgggccccagtgagaggggcaggggcagggccggcagtaggtggggcctgtggtccccccactgccctgagggcattagctggtctaactgcccggaggcacccggccctgggccttaggcacctcaaggacttttctgctatttactgctcttattgttaaggataataattaaggatcatatgaataattaatgaagatgctgatgactatgaataataaataattatcctgaggaga

SEQ ID NO: 331 - DNA, 3884 bp, Homo sapiens
  source 1..3884: mol_type = genomic DNA
  misc_feature 1..3884: note = cDNA of KCNH2 gene SNP c.1886A>C (p.Asn629Thr)
atgccggtgcggaggggccacgtcgcgccgcagaacaccttcctggacaccatcatccgcaagtttgagggccagagccgtaagttcatcatcgccaacgctcgggtggagaactgcgccgtcatctactgcaacgacggcttctgcgagctgtgcggctactcgcgggccgaggtgatgcagcgaccctgcacctgcgacttcctgcacgggccgcgcacgcagcgccgcgctgccgcgcagatcgcgcaggcactgctgggcgccgaggagcgcaaagtggaaatcgccttctaccggaaagatgggagctgcttcctatgtctggtggatgtggtgcccgtgaagaacgaggatggggctgtcatcatgttcatcctcaatttcgaggtggtgatggagaaggacatggtggggtccccggctcatgacaccaaccaccggggcccccccaccagctggctggccccaggccgcgccaagaccttccgcctgaagctgcccgcgctgctggcgctgacggcccgggagtcgtcggtgcggtcgggcggcgcgggcggcgcgggcgccccgggggccgtggtggtggacgtggacctgacgcccgcggcacccagcagcgagtcgctggccctggacgaagtgacagccatggacaaccacgtggcagggctcgggcccgcggaggagcggcgtgcgctggtgggtcccggctctccgccccgcagcgcgcccggccagctcccatcgccccgggcgcacagcctcaaccccgacgcctcgggctccagctgcagcctggcccggacgcgctcccgagaaagctgcgccagcgtgcgccgcgcctcgtcggccgacgacatcgaggccatgcgcgccggggtgctgcccccgccaccgcgccacgccagcaccggggccatgcacccactgcgcagcggcttgctcaactccacctcggactccgacctcgtgcgctaccgcaccattagcaagattccccaaatcaccctcaactttgtggacctcaagggcgaccccttcttggcttcgcccaccagtgaccgtgagatcatagcacctaagataaaggagcgaacccacaatgtcactgagaaggtcacccaggtcctgtccctgggcgccgacgtgctgcctgagtacaagctgcaggcaccgcgcatccaccgctggaccatcctgcattacagccccttcaaggccgtgtgggactggctcatcctgctgctggtcatctacacggctgtcttcacaccctactcggctgccttcctgctgaaggagacggaagaaggcccgcctgctaccgagtgtggctacgcctgccagccgctggctgtggtggacctcatcgtggacatcatgttcattgtggacatcctcatcaacttccgcaccacctacgtcaatgccaacgaggaggtggtcagccaccccggccgcatcgccgtccactacttcaagggctggttcctcatcgacatggtggccgccatccccttcgacctgctcatcttcggctctggctctgaggagctgatcgggctgctgaagactgcgcggctgctgcggctggtgcgcgtggcgcggaagctggatcgctactcagagtacggcgcggccgtgctgttcttgctcatgtgcacctttgcgctcatcgcgcactggctagcctgcatctggtacgccatcggcaacatggagcagccacacatggactcacgcatcggctggctgcacaacctgggcgaccagataggcaaaccctacaacagcagcggcctgggcggcccctccatcaaggacaagtatgtgacggcgctctacttcaccttcagcagcctcaccagtgtgggcttcggcaccgtctctcccaacaccaactcagagaagatcttctccatctgcgtcatgctcattggctccctcatgtatgctagcatcttcggcaacgtgtcggccatcatccagcggctgtactcgggcacagcccgctaccacacacagatgctgcgggtgcgggagttcatccgcttccaccagatccccaatcccctgcgccagcgcctcgaggagtacttccagcacgcctggtcctacaccaacggcatcgacatgaacgcggtgctgaagggcttccctgagtgcctgcaggctgacatctgcctgcacctgaaccgctcactgctgcagcactgcaaacccttccgaggggccaccaagggctgccttcgggccctggccatgaagttcaagaccacacatgcaccgccaggggacacactggtgcatgctggggacctgctcaccgccctgtacttcatctcccggggctccatcgagatcctgcggggcgacgtcgtcgtggccatcctggggaagaatgacatctttggggagcctctgaacctgtatgcaaggcctggcaagtcgaacggggatgtgcgggccctcacctactgtgacctacacaagatccatcgggacgacctgctggaggtgctggacatgtaccctgagttctccgaccacttctggtccagcctggagatcaccttcaacctgcgagataccaacatgatcccgggctcccccggcagtacggagttagagggtggcttcagtcggcaacgcaagcgcaagttgtccttccgcaggcgcacggacaaggacacggagcagccaggggaggtgtcggccttggggccgggccgggcgggggcagggccgagtagccggggccggccgggggggccgtggggggagagcccgtccagtggcccctccagccctgagagcagtgaggatgagggcccaggccgcagctccagccccctccgcctggtgcccttctccagccccaggccccccggagagccgccgggtggggagcccctgatggaggactgcgagaagagcagcgacacttgcaaccccctgtcaggcgccttctcaggagtgtccaacattttcagcttctggggggacagtcggggccgccagtaccaggagctccctcgatgccccgcccccacccccagcctcctcaacatccccctctccagcccgggtcggcggccccggggcgacgtggagagcaggctggatgccctccagcgccagctcaacaggctggagacccggctgagtgcagacatggccactgtcctgcagctgctacagaggcagatgacgctggtcccgcccgcctacagtgctgtgaccaccccggggcctggccccacttccacatccccgctgttgcccgtcagccccctccccaccctcaccttggactcgctttctcaggtttcccagttcatggcgtgtgaggagctgcccccgggggccccagagcttccccaagaaggccccacacgacgcctctccctaccgggccagctgggggccctcacctcccagcccctgcacagacacggctcggacccgggcagttagtggggctgcccagtgtggacacgtggctcacccagggatcaaggcgctgctgggccgctccccttggaggccctgctcaggaggccctgaccgtggaaggggagaggaactcgaaagcacagctcctcccccagcccttgggaccatcttctcctgcagtcccctgggccccagtgagaggggcaggggcagggccggcagtaggtggggcctgtggtccccccactgccctgagggcattagctggtctaactgcccggaggcacccggccctgggccttaggcacctcaaggacttttctgctatttactgctcttattgttaaggataataattaaggatcatatgaataattaatgaagatgctgatgactatgaataataaataattatcctgaggaga

SEQ ID NO: 332 - DNA, 3884 bp, Homo sapiens
  source 1..3884: mol_type = genomic DNA
  misc_feature 1..3884: note = cDNA of KCNH2 gene SNP c.1886A>G (p.Asn629Ser)
atgccggtgcggaggggccacgtcgcgccgcagaacaccttcctggacaccatcatccgcaagtttgagggccagagccgtaagttcatcatcgccaacgctcgggtggagaactgcgccgtcatctactgcaacgacggcttctgcgagctgtgcggctactcgcgggccgaggtgatgcagcgaccctgcacctgcgacttcctgcacgggccgcgcacgcagcgccgcgctgccgcgcagatcgcgcaggcactgctgggcgccgaggagcgcaaagtggaaatcgccttctaccggaaagatgggagctgcttcctatgtctggtggatgtggtgcccgtgaagaacgaggatggggctgtcatcatgttcatcctcaatttcgaggtggtgatggagaaggacatggtggggtccccggctcatgacaccaaccaccggggcccccccaccagctggctggccccaggccgcgccaagaccttccgcctgaagctgcccgcgctgctggcgctgacggcccgggagtcgtcggtgcggtcgggcggcgcgggcggcgcgggcgccccgggggccgtggtggtggacgtggacctgacgcccgcggcacccagcagcgagtcgctggccctggacgaagtgacagccatggacaaccacgtggcagggctcgggcccgcggaggagcggcgtgcgctggtgggtcccggctctccgccccgcagcgcgcccggccagctcccatcgccccgggcgcacagcctcaaccccgacgcctcgggctccagctgcagcctggcccggacgcgctcccgagaaagctgcgccagcgtgcgccgcgcctcgtcggccgacgacatcgaggccatgcgcgccggggtgctgcccccgccaccgcgccacgccagcaccggggccatgcacccactgcgcagcggcttgctcaactccacctcggactccgacctcgtgcgctaccgcaccattagcaagattccccaaatcaccctcaactttgtggacctcaagggcgaccccttcttggcttcgcccaccagtgaccgtgagatcatagcacctaagataaaggagcgaacccacaatgtcactgagaaggtcacccaggtcctgtccctgggcgccgacgtgctgcctgagtacaagctgcaggcaccgcgcatccaccgctggaccatcctgcattacagccccttcaaggccgtgtgggactggctcatcctgctgctggtcatctacacggctgtcttcacaccctactcggctgccttcctgctgaaggagacggaagaaggcccgcctgctaccgagtgtggctacgcctgccagccgctggctgtggtggacctcatcgtggacatcatgttcattgtggacatcctcatcaacttccgcaccacctacgtcaatgccaacgaggaggtggtcagccaccccggccgcatcgccgtccactacttcaagggctggttcctcatcgacatggtggccgccatccccttcgacctgctcatcttcggctctggctctgaggagctgatcgggctgctgaagactgcgcggctgctgcggctggtgcgcgtggcgcggaagctggatcgctactcagagtacggcgcggccgtgctgttcttgctcatgtgcacctttgcgctcatcgcgcactggctagcctgcatctggtacgccatcggcaacatggagcagccacacatggactcacgcatcggctggctgcacaacctgggcgaccagataggcaaaccctacaacagcagcggcctgggcggcccctccatcaaggacaagtatgtgacggcgctctacttcaccttcagcagcctcaccagtgtgggcttcggcagcgtctctcccaacaccaactcagagaagatcttctccatctgcgtcatgctcattggctccctcatgtatgctagcatcttcggcaacgtgtcggccatcatccagcggctgtactcgggcacagcccgctaccacacacagatgctgcgggtgcgggagttcatccgcttccaccagatccccaatcccctgcgccagcgcctcgaggagtacttccagcacgcctggtcctacaccaacggcatcgacatgaacgcggtgctgaagggcttccctgagtgcctgcaggctgacatctgcctgcacctgaaccgctcactgctgcagcactgcaaacccttccgaggggccaccaagggctgccttcgggccctggccatgaagttcaagaccacacatgcaccgccaggggacacactggtgcatgctggggacctgctcaccgccctgtacttcatctcccggggctccatcgagatcctgcggggcgacgtcgtcgtggccatcctggggaagaatgacatctttggggagcctctgaacctgtatgcaaggcctggcaagtcgaacggggatgtgcgggccctcacctactgtgacctacacaagatccatcgggacgacctgctggaggtgctggacatgtaccctgagttctccgaccacttctggtccagcctggagatcaccttcaacctgcgagataccaacatgatcccgggctcccccggcagtacggagttagagggtggcttcagtcggcaacgcaagcgcaagttgtccttccgcaggcgcacggacaaggacacggagcagccaggggaggtgtcggccttggggccgggccgggcgggggcagggccgagtagccggggccggccgggggggccgtggggggagagcccgtccagtggcccctccagccctgagagcagtgaggatgagggcccaggccgcagctccagccccctccgcctggtgcccttctccagccccaggccccccggagagccgccgggtggggagcccctgatggaggactgcgagaagagcagcgacacttgcaaccccctgtcaggcgccttctcaggagtgtccaacattttcagcttctggggggacagtcggggccgccagtaccaggagctccctcgatgccccgcccccacccccagcctcctcaacatccccctctccagcccgggtcggcggccccggggcgacgtggagagcaggctggatgccctccagcgccagctcaacaggctggagacccggctgagtgcagacatggccactgtcctgcagctgctacagaggcagatgacgctggtcccgcccgcctacagtgctgtgaccaccccggggcctggccccacttccacatccccgctgttgcccgtcagccccctccccaccctcaccttggactcgctttctcaggtttcccagttcatggcgtgtgaggagctgcccccgggggccccagagcttccccaagaaggccccacacgacgcctctccctaccgggccagctgggggccctcacctcccagcccctgcacagacacggctcggacccgggcagttagtggggctgcccagtgtggacacgtggctcacccagggatcaaggcgctgctgggccgctccccttggaggccctgctcaggaggccctgaccgtggaaggggagaggaactcgaaagcacagctcctcccccagcccttgggaccatcttctcctgcagtcccctgggccccagtgagaggggcaggggcagggccggcagtaggtggggcctgtggtccccccactgccctgagggcattagctggtctaactgcccggaggcacccggccctgggccttaggcacctcaaggacttttctgctatttactgctcttattgttaaggataataattaaggatcatatgaataattaatgaagatgctgatgactatgaataataaataattatcctgaggaga

SEQ ID NO: 333 - DNA, 3884 bp, Homo sapiens
  source 1..3884: mol_type = genomic DNA
  misc_feature 1..3884: note = cDNA of KCNH2 gene SNP c.1886A>T (p.Asn629Ile)
atgccggtgcggaggggccacgtcgcgccgcagaacaccttcctggacaccatcatccgcaagtttgagggccagagccgtaagttcatcatcgccaacgctcgggtggagaactgcgccgtcatctactgcaacgacggcttctgcgagctgtgcggctactcgcgggccgaggtgatgcagcgaccctgcacctgcgacttcctgcacgggccgcgcacgcagcgccgcgctgccgcgcagatcgcgcaggcactgctgggcgccgaggagcgcaaagtggaaatcgccttctaccggaaagatgggagctgcttcctatgtctggtggatgtggtgcccgtgaagaacgaggatggggctgtcatcatgttcatcctcaatttcgaggtggtgatggagaaggacatggtggggtccccggctcatgacaccaaccaccggggcccccccaccagctggctggccccaggccgcgccaagaccttccgcctgaagctgcccgcgctgctggcgctgacggcccgggagtcgtcggtgcggtcgggcggcgcgggcggcgcgggcgccccgggggccgtggtggtggacgtggacctgacgcccgcggcacccagcagcgagtcgctggccctggacgaagtgacagccatggacaaccacgtggcagggctcgggcccgcggaggagcggcgtgcgctggtgggtcccggctctccgccccgcagcgcgcccggccagctcccatcgccccgggcgcacagcctcaaccccgacgcctcgggctccagctgcagcctggcccggacgcgctcccgagaaagctgcgccagcgtgcgccgcgcctcgtcggccgacgacatcgaggccatgcgcgccggggtgctgcccccgccaccgcgccacgccagcaccggggccatgcacccactgcgcagcggcttgctcaactccacctcggactccgacctcgtgcgctaccgcaccattagcaagattccccaaatcaccctcaactttgtggacctcaagggcgaccccttcttggcttcgcccaccagtgaccgtgagatcatagcacctaagataaaggagcgaacccacaatgtcactgagaaggtcacccaggtcctgtccctgggcgccgacgtgctgcctgagtacaagctgcaggcaccgcgcatccaccgctggaccatcctgcattacagccccttcaaggccgtgtgggactggctcatcctgctgctggtcatctacacggctgtcttcacaccctactcggctgccttcctgctgaaggagacggaagaaggcccgcctgctaccgagtgtggctacgcctgccagccgctggctgtggtggacctcatcgtggacatcatgttcattgtggacatcctcatcaacttccgcaccacctacgtcaatgccaacgaggaggtggtcagccaccccggccgcatcgccgtccactacttcaagggctggttcctcatcgacatggtggccgccatccccttcgacctgctcatcttcggctctggctctgaggagctgatcgggctgctgaagactgcgcggctgctgcggctggtgcgcgtggcgcggaagctggatcgctactcagagtacggcgcggccgtgctgttcttgctcatgtgcacctttgcgctcatcgcgcactggctagcctgcatctggtacgccatcggcaacatggagcagccacacatggactcacgcatcggctggctgcacaacctgggcgaccagataggcaaaccctacaacagcagcggcctgggcggcccctccatcaaggacaagtatgtgacggcgctctacttcaccttcagcagcctcaccagtgtgggcttcggcatcgtctctcccaacaccaactcagagaagatcttctccatctgcgtcatgctcattggctccctcatgtatgctagcatcttcggcaacgtgtcggccatcatccagcggctgtactcgggcacagcccgctaccacacacagatgctgcgggtgcgggagttcatccgcttccaccagatccccaatcccctgcgccagcgcctcgaggagtacttccagcacgcctggtcctacaccaacggcatcgacatgaacgcggtgctgaagggcttccctgagtgcctgcaggctgacatctgcctgcacctgaaccgctcactgctgcagcactgcaaacccttccgaggggccaccaagggctgccttcgggccctggccatgaagttcaagaccacacatgcaccgccaggggacacactggtgcatgctggggacctgctcaccgccctgtacttcatctcccggggctccatcgagatcctgcggggcgacgtcgtcgtggccatcctggggaagaatgacatctttggggagcctctgaacctgtatgcaaggcctggcaagtcgaacggggatgtgcgggccctcacctactgtgacctacacaagatccatcgggacgacctgctggaggtgctggacatgtaccctgagttctccgaccacttctggtccagcctggagatcaccttcaacctgcgagataccaacatgatcccgggctcccccggcagtacggagttagagggtggcttcagtcggcaacgcaagcgcaagttgtccttccgcaggcgcacggacaaggacacggagcagccaggggaggtgtcggccttggggccgggccgggcgggggcagggccgagtagccggggccggccgggggggccgtggggggagagcccgtccagtggcccctccagccctgagagcagtgaggatgagggcccaggccgcagctccagccccctccgcctggtgcccttctccagccccaggccccccggagagccgccgggtggggagcccctgatggaggactgcgagaagagcagcgacacttgcaaccccctgtcaggcgccttctcaggagtgtccaacattttcagcttctggggggacagtcggggccgccagtaccaggagctccctcgatgccccgcccccacccccagcctcctcaacatccccctctccagcccgggtcggcggccccggggcgacgtggagagcaggctggatgccctccagcgccagctcaacaggctggagacccggctgagtgcagacatggccactgtcctgcagctgctacagaggcagatgacgctggtcccgcccgcctacagtgctgtgaccaccccggggcctggccccacttccacatccccgctgttgcccgtcagccccctccccaccctcaccttggactcgctttctcaggtttcccagttcatggcgtgtgaggagctgcccccgggggccccagagcttccccaagaaggccccacacgacgcctctccctaccgggccagctgggggccctcacctcccagcccctgcacagacacggctcggacccgggcagttagtggggctgcccagtgtggacacgtggctcacccagggatcaaggcgctgctgggccgctccccttggaggccctgctcaggaggccctgaccgtggaaggggagaggaactcgaaagcacagctcctcccccagcccttgggaccatcttctcctgcagtcccctgggccccagtgagaggggcaggggcagggccggcagtaggtggggcctgtggtccccccactgccctgagggcattagctggtctaactgcccggaggcacccggccctgggccttaggcacctcaaggacttttctgctatttactgctcttattgttaaggataataattaaggatcatatgaataattaatgaagatgctgatgactatgaataataaataattatcctgaggaga

SEQ ID NO: 334 - DNA, 3884 bp, Homo sapiens
  source 1..3884: mol_type = genomic DNA
  misc_feature 1..3884: note = cDNA of KCNH2 gene SNP c.1887C>A (p.Asn629Lys)
atgccggtgcggaggggccacgtcgcgccgcagaacaccttcctggacaccatcatccgcaagtttgagggccagagccgtaagttcatcatcgccaacgctcgggtggagaactgcgccgtcatctactgcaacgacggcttctgcgagctgtgcggctactcgcgggccgaggtgatgcagcgaccctgcacctgcgacttcctgcacgggccgcgcacgcagcgccgcgctgccgcgcagatcgcgcaggcactgctgggcgccgaggagcgcaaagtggaaatcgccttctaccggaaagatgggagctgcttcctatgtctggtggatgtggtgcccgtgaagaacgaggatggggctgtcatcatgttcatcctcaatttcgaggtggtgatggagaaggacatggtggggtccccggctcatgacaccaaccaccggggcccccccaccagctggctggccccaggccgcgccaagaccttccgcctgaagctgcccgcgctgctggcgctgacggcccgggagtcgtcggtgcggtcgggcggcgcgggcggcgcgggcgccccgggggccgtggtggtggacgtggacctgacgcccgcggcacccagcagcgagtcgctggccctggacgaagtgacagccatggacaaccacgtggcagggctcgggcccgcggaggagcggcgtgcgctggtgggtcccggctctccgccccgcagcgcgcccggccagctcccatcgccccgggcgcacagcctcaaccccgacgcctcgggctccagctgcagcctggcccggacgcgctcccgagaaagctgcgccagcgtgcgccgcgcctcgtcggccgacgacatcgaggccatgcgcgccggggtgctgcccccgccaccgcgccacgccagcaccggggccatgcacccactgcgcagcggcttgctcaactccacctcggactccgacctcgtgcgctaccgcaccattagcaagattccccaaatcaccctcaactttgtggacctcaagggcgaccccttcttggcttcgcccaccagtgaccgtgagatcatagcacctaagataaaggagcgaacccacaatgtcactgagaaggtcacccaggtcctgtccctgggcgccgacgtgctgcctgagtacaagctgcaggcaccgcgcatccaccgctggaccatcctgcattacagccccttcaaggccgtgtgggactggctcatcctgctgctggtcatctacacggctgtcttcacaccctactcggctgccttcctgctgaaggagacggaagaaggcccgcctgctaccgagtgtggctacgcctgccagccgctggctgtggtggacctcatcgtggacatcatgttcattgtggacatcctcatcaacttccgcaccacctacgtcaatgccaacgaggaggtggtcagccaccccggccgcatcgccgtccactacttcaagggctggttcctcatcgacatggtggccgccatccccttcgacctgctcatcttcggctctggctctgaggagctgatcgggctgctgaagactgcgcggctgctgcggctggtgcgcgtggcgcggaagctggatcgctactcagagtacggcgcggccgtgctgttcttgctcatgtgcacctttgcgctcatcgcgcactggctagcctgcatctggtacgccatcggcaacatggagcagccacacatggactcacgcatcggctggctgcacaacctgggcgaccagataggcaaaccctacaacagcagcggcctgggcggcccctccatcaaggacaagtatgtgacggcgctctacttcaccttcagcagcctcaccagtgtgggcttcggcaaagtctctcccaacaccaactcagagaagatcttctccatctgcgtcatgctcattggctccctcatgtatgctagcatcttcggcaacgtgtcggccatcatccagcggctgtactcgggcacagcccgctaccacacacagatgctgcgggtgcgggagttcatccgcttccaccagatccccaatcccctgcgccagcgcctcgaggagtacttccagcacgcctggtcctacaccaacggcatcgacatgaacgcggtgctgaagggcttccctgagtgcctgcaggctgacatctgcctgcacctgaaccgctcactgctgcagcactgcaaacccttccgaggggccaccaagggctgccttcgggccctggccatgaagttcaagaccacacatgcaccgccaggggacacactggtgcatgctggggacctgctcaccgccctgtacttcatctcccggggctccatcgagatcctgcggggcgacgtcgtcgtggccatcctggggaagaatgacatctttggggagcctctgaacctgtatgcaaggcctggcaagtcgaacggggatgtgcgggccctcacctactgtgacctacacaagatccatcgggacgacctgctggaggtgctggacatgtaccctgagttctccgaccacttctggtccagcctggagatcaccttcaacctgcgagataccaacatgatcccgggctcccccggcagtacggagttagagggtggcttcagtcggcaacgcaagcgcaagttgtccttccgcaggcgcacggacaaggacacggagcagccaggggaggtgtcggccttggggccgggccgggcgggggcagggccgagtagccggggccggccgggggggccgtggggggagagcccgtccagtggcccctccagccctgagagcagtgaggatgagggcccaggccgcagctccagccccctccgcctggtgcccttctccagccccaggccccccggagagccgccgggtggggagcccctgatggaggactgcgagaagagcagcgacacttgcaaccccctgtcaggcgccttctcaggagtgtccaacattttcagcttctggggggacagtcggggccgccagtaccaggagctccctcgatgccccgcccccacccccagcctcctcaacatccccctctccagcccgggtcggcggccccggggcgacgtggagagcaggctggatgccctccagcgccagctcaacaggctggagacccggctgagtgcagacatggccactgtcctgcagctgctacagaggcagatgacgctggtcccgcccgcctacagtgctgtgaccaccccggggcctggccccacttccacatccccgctgttgcccgtcagccccctccccaccctcaccttggactcgctttctcaggtttcccagttcatggcgtgtgaggagctgcccccgggggccccagagcttccccaagaaggccccacacgacgcctctccctaccgggccagctgggggccctcacctcccagcccctgcacagacacggctcggacccgggcagttagtggggctgcccagtgtggacacgtggctcacccagggatcaaggcgctgctgggccgctccccttggaggccctgctcaggaggccctgaccgtggaaggggagaggaactcgaaagcacagctcctcccccagcccttgggaccatcttctcctgcagtcccctgggccccagtgagaggggcaggggcagggccggcagtaggtggggcctgtggtccccccactgccctgagggcattagctggtctaactgcccggaggcacccggccctgggccttaggcacctcaaggacttttctgctatttactgctcttattgttaaggataataattaaggatcatatgaataattaatgaagatgctgatgactatgaataataaataattatcctgaggaga

SEQ ID NO: 335 - DNA, 3884 bp, Homo sapiens
  source 1..3884: mol_type = genomic DNA
  misc_feature 1..3884: note = cDNA of KCNH2 gene SNP c.1888G>A (p.Val630Ile)
atgccggtgcggaggggccacgtcgcgccgcagaacaccttcctggacaccatcatccgcaagtttgagggccagagccgtaagttcatcatcgccaacgctcgggtggagaactgcgccgtcatctactgcaacgacggcttctgcgagctgtgcggctactcgcgggccgaggtgatgcagcgaccctgcacctgcgacttcctgcacgggccgcgcacgcagcgccgcgctgccgcgcagatcgcgcaggcactgctgggcgccgaggagcgcaaagtggaaatcgccttctaccggaaagatgggagctgcttcctatgtctggtggatgtggtgcccgtgaagaacgaggatggggctgtcatcatgttcatcctcaatttcgaggtggtgatggagaaggacatggtggggtccccggctcatgacaccaaccaccggggcccccccaccagctggctggccccaggccgcgccaagaccttccgcctgaagctgcccgcgctgctggcgctgacggcccgggagtcgtcggtgcggtcgggcggcgcgggcggcgcgggcgccccgggggccgtggtggtggacgtggacctgacgcccgcggcacccagcagcgagtcgctggccctggacgaagtgacagccatggacaaccacgtggcagggctcgggcccgcggaggagcggcgtgcgctggtgggtcccggctctccgccccgcagcgcgcccggccagctcccatcgccccgggcgcacagcctcaaccccgacgcctcgggctccagctgcagcctggcccggacgcgctcccgagaaagctgcgccagcgtgcgccgcgcctcgtcggccgacgacatcgaggccatgcgcgccggggtgctgcccccgccaccgcgccacgccagcaccggggccatgcacccactgcgcagcggcttgctcaactccacctcggactccgacctcgtgcgctaccgcaccattagcaagattccccaaatcaccctcaactttgtggacctcaagggcgaccccttcttggcttcgcccaccagtgaccgtgagatcatagcacctaagataaaggagcgaacccacaatgtcactgagaaggtcacccaggtcctgtccctgggcgccgacgtgctgcctgagtacaagctgcaggcaccgcgcatccaccgctggaccatcctgcattacagccccttcaaggccgtgtgggactggctcatcctgctgctggtcatctacacggctgtcttcacaccctactcggctgccttcctgctgaaggagacggaagaaggcccgcctgctaccgagtgtggctacgcctgccagccgctggctgtggtggacctcatcgtggacatcatgttcattgtggacatcctcatcaacttccgcaccacctacgtcaatgccaacgaggaggtggtcagccaccccggccgcatcgccgtccactacttcaagggctggttcctcatcgacatggtggccgccatccccttcgacctgctcatcttcggctctggctctgaggagctgatcgggctgctgaagactgcgcggctgctgcggctggtgcgcgtggcgcggaagctggatcgctactcagagtacggcgcggccgtgctgttcttgctcatgtgcacctttgcgctcatcgcgcactggctagcctgcatctggtacgccatcggcaacatggagcagccacacatggactcacgcatcggctggctgcacaacctgggcgaccagataggcaaaccctacaacagcagcggcctgggcggcccctccatcaaggacaagtatgtgacggcgctctacttcaccttcagcagcctcaccagtgtgggcttcggcaacatctctcccaacaccaactcagagaagatcttctccatctgcgtcatgctcattggctccctcatgtatgctagcatcttcggcaacgtgtcggccatcatccagcggctgtactcgggcacagcccgctaccacacacagatgctgcgggtgcgggagttcatccgcttccaccagatccccaatcccctgcgccagcgcctcgaggagtacttccagcacgcctggtcctacaccaacggcatcgacatgaacgcggtgctgaagggcttccctgagtgcctgcaggctgacatctgcctgcacctgaaccgctcactgctgcagcactgcaaacccttccgaggggccaccaagggctgccttcgggccctggccatgaagttcaagaccacacatgcaccgccaggggacacactggtgcatgctggggacctgctcaccgccctgtacttcatctcccggggctccatcgagatcctgcggggcgacgtcgtcgtggccatcctggggaagaatgacatctttggggagcctctgaacctgtatgcaaggcctggcaagtcgaacggggatgtgcgggccctcacctactgtgacctacacaagatccatcgggacgacctgctggaggtgctggacatgtaccctgagttctccgaccacttctggtccagcctggagatcaccttcaacctgcgagataccaacatgatcccgggctcccccggcagtacggagttagagggtggcttcagtcggcaacgcaagcgcaagttgtccttccgcaggcgcacggacaaggacacggagcagccaggggaggtgtcggccttggggccgggccgggcgggggcagggccgagtagccggggccggccgggggggccgtggggggagagcccgtccagtggcccctccagccctgagagcagtgaggatgagggcccaggccgcagctccagccccctccgcctggtgcccttctccagccccaggccccccggagagccgccgggtggggagcccctgatggaggactgcgagaagagcagcgacacttgcaaccccctgtcaggcgccttctcaggagtgtccaacattttcagcttctggggggacagtcggggccgccagtaccaggagctccctcgatgccccgcccccacccccagcctcctcaacatccccctctccagcccgggtcggcggccccggggcgacgtggagagcaggctggatgccctccagcgccagctcaacaggctggagacccggctgagtgcagacatggccactgtcctgcagctgctacagaggcagatgacgctggtcccgcccgcctacagtgctgtgaccaccccggggcctggccccacttccacatccccgctgttgcccgtcagccccctccccaccctcaccttggactcgctttctcaggtttcccagttcatggcgtgtgaggagctgcccccgggggccccagagcttccccaagaaggccccacacgacgcctctccctaccgggccagctgggggccctcacctcccagcccctgcacagacacggctcggacccgggcagttagtggggctgcccagtgtggacacgtggctcacccagggatcaaggcgctgctgggccgctccccttggaggccctgctcaggaggccctgaccgtggaaggggagaggaactcgaaagcacagctcctcccccagcccttgggaccatcttctcctgcagtcccctgggccccagtgagaggggcaggggcagggccggcagtaggtggggcctgtggtccccccactgccctgagggcattagctggtctaactgcccggaggcacccggccctgggccttaggcacctcaaggacttttctgctatttactgctcttattgttaaggataataattaaggatcatatgaataattaatgaagatgctgatgactatgaataataaataattatcctgaggaga

SEQ ID NO: 336 - DNA, 3884 bp, Homo sapiens
  source 1..3884: mol_type = genomic DNA
  misc_feature 1..3884: note = cDNA of KCNH2 gene SNP c.1888G>C (p.Val630Leu)
atgccggtgcggaggggccacgtcgcgccgcagaacaccttcctggacaccatcatccgcaagtttgagggccagagccgtaagttcatcatcgccaacgctcgggtggagaactgcgccgtcatctactgcaacgacggcttctgcgagctgtgcggctactcgcgggccgaggtgatgcagcgaccctgcacctgcgacttcctgcacgggccgcgcacgcagcgccgcgctgccgcgcagatcgcgcaggcactgctgggcgccgaggagcgcaaagtggaaatcgccttctaccggaaagatgggagctgcttcctatgtctggtggatgtggtgcccgtgaagaacgaggatggggctgtcatcatgttcatcctcaatttcgaggtggtgatggagaaggacatggtggggtccccggctcatgacaccaaccaccggggcccccccaccagctggctggccccaggccgcgccaagaccttccgcctgaagctgcccgcgctgctggcgctgacggcccgggagtcgtcggtgcggtcgggcggcgcgggcggcgcgggcgccccgggggccgtggtggtggacgtggacctgacgcccgcggcacccagcagcgagtcgctggccctggacgaagtgacagccatggacaaccacgtggcagggctcgggcccgcggaggagcggcgtgcgctggtgggtcccggctctccgccccgcagcgcgcccggccagctcccatcgccccgggcgcacagcctcaaccccgacgcctcgggctccagctgcagcctggcccggacgcgctcccgagaaagctgcgccagcgtgcgccgcgcctcgtcggccgacgacatcgaggccatgcgcgccggggtgctgcccccgccaccgcgccacgccagcaccggggccatgcacccactgcgcagcggcttgctcaactccacctcggactccgacctcgtgcgctaccgcaccattagcaagattccccaaatcaccctcaactttgtggacctcaagggcgaccccttcttggcttcgcccaccagtgaccgtgagatcatagcacctaagataaaggagcgaacccacaatgtcactgagaaggtcacccaggtcctgtccctgggcgccgacgtgctgcctgagtacaagctgcaggcaccgcgcatccaccgctggaccatcctgcattacagccccttcaaggccgtgtgggactggctcatcctgctgctggtcatctacacggctgtcttcacaccctactcggctgccttcctgctgaaggagacggaagaaggcccgcctgctaccgagtgtggctacgcctgccagccgctggctgtggtggacctcatcgtggacatcatgttcattgtggacatcctcatcaacttccgcaccacctacgtcaatgccaacgaggaggtggtcagccaccccggccgcatcgccgtccactacttcaagggctggttcctcatcgacatggtggccgccatccccttcgacctgctcatcttcggctctggctctgaggagctgatcgggctgctgaagactgcgcggctgctgcggctggtgcgcgtggcgcggaagctggatcgctactcagagtacggcgcggccgtgctgttcttgctcatgtgcacctttgcgctcatcgcgcactggctagcctgcatctggtacgccatcggcaacatggagcagccacacatggactcacgcatcggctggctgcacaacctgggcgaccagataggcaaaccctacaacagcagcggcctgggcggcccctccatcaaggacaagtatgtgacggcgctctacttcaccttcagcagcctcaccagtgtgggcttcggcaacctctctcccaacaccaactcagagaagatcttctccatctgcgtcatgctcattggctccctcatgtatgctagcatcttcggcaacgtgtcggccatcatccagcggctgtactcgggcacagcccgctaccacacacagatgctgcgggtgcgggagttcatccgcttccaccagatccccaatcccctgcgccagcgcctcgaggagtacttccagcacgcctggtcctacaccaacggcatcgacatgaacgcggtgctgaagggcttccctgagtgcctgcaggctgacatctgcctgcacctgaaccgctcactgctgcagcactgcaaacccttccgaggggccaccaagggctgccttcgggccctggccatgaagttcaagaccacacatgcaccgccaggggacacactggtgcatgctggggacctgctcaccgccctgtacttcatctcccggggctccatcgagatcctgcggggcgacgtcgtcgtggccatcctggggaagaatgacatctttggggagcctctgaacctgtatgcaaggcctggcaagtcgaacggggatgtgcgggccctcacctactgtgacctacacaagatccatcgggacgacctgctggaggtgctggacatgtaccctgagttctccgaccacttctggtccagcctggagatcaccttcaacctgcgagataccaacatgatcccgggctcccccggcagtacggagttagagggtggcttcagtcggcaacgcaagcgcaagttgtccttccgcaggcgcacggacaaggacacggagcagccaggggaggtgtcggccttggggccgggccgggcgggggcagggccgagtagccggggccggccgggggggccgtggggggagagcccgtccagtggcccctccagccctgagagcagtgaggatgagggcccaggccgcagctccagccccctccgcctggtgcccttctccagccccaggccccccggagagccgccgggtggggagcccctgatggaggactgcgagaagagcagcgacacttgcaaccccctgtcaggcgccttctcaggagtgtccaacattttcagcttctggggggacagtcggggccgccagtaccaggagctccctcgatgccccgcccccacccccagcctcctcaacatccccctctccagcccgggtcggcggccccggggcgacgtggagagcaggctggatgccctccagcgccagctcaacaggctggagacccggctgagtgcagacatggccactgtcctgcagctgctacagaggcagatgacgctggtcccgcccgcctacagtgctgtgaccaccccggggcctggccccacttccacatccccgctgttgcccgtcagccccctccccaccctcaccttggactcgctttctcaggtttcccagttcatggcgtgtgaggagctgcccccgggggccccagagcttccccaagaaggccccacacgacgcctctccctaccgggccagctgggggccctcacctcccagcccctgcacagacacggctcggacccgggcagttagtggggctgcccagtgtggacacgtggctcacccagggatcaaggcgctgctgggccgctccccttggaggccctgctcaggaggccctgaccgtggaaggggagaggaactcgaaagcacagctcctcccccagcccttgggaccatcttctcctgcagtcccctgggccccagtgagaggggcaggggcagggccggcagtaggtggggcctgtggtccccccactgccctgagggcattagctggtctaactgcccggaggcacccggccctgggccttaggcacctcaaggacttttctgctatttactgctcttattgttaaggataataattaaggatcatatgaataattaatgaagatgctgatgactatgaataataaataattatcctgaggaga

SEQ ID NO: 337 - DNA, 3884 bp, Homo sapiens
  source 1..3884: mol_type = genomic DNA
  misc_feature 1..3884: note = cDNA of KCNH2 gene SNP c.1889T>C (p.Val630Ala)
atgccggtgcggaggggccacgtcgcgccgcagaacaccttcctggacaccatcatccgcaagtttgagggccagagccgtaagttcatcatcgccaacgctcgggtggagaactgcgccgtcatctactgcaacgacggcttctgcgagctgtgcggctactcgcgggccgaggtgatgcagcgaccctgcacctgcgacttcctgcacgggccgcgcacgcagcgccgcgctgccgcgcagatcgcgcaggcactgctgggcgccgaggagcgcaaagtggaaatcgccttctaccggaaagatgggagctgcttcctatgtctggtggatgtggtgcccgtgaagaacgaggatggggctgtcatcatgttcatcctcaatttcgaggtggtgatggagaaggacatggtggggtccccggctcatgacaccaaccaccggggcccccccaccagctggctggccccaggccgcgccaagaccttccgcctgaagctgcccgcgctgctggcgctgacggcccgggagtcgtcggtgcggtcgggcggcgcgggcggcgcgggcgccccgggggccgtggtggtggacgtggacctgacgcccgcggcacccagcagcgagtcgctggccctggacgaagtgacagccatggacaaccacgtggcagggctcgggcccgcggaggagcggcgtgcgctggtgggtcccggctctccgccccgcagcgcgcccggccagctcccatcgccccgggcgcacagcctcaaccccgacgcctcgggctccagctgcagcctggcccggacgcgctcccgagaaagctgcgccagcgtgcgccgcgcctcgtcggccgacgacatcgaggccatgcgcgccggggtgctgcccccgccaccgcgccacgccagcaccggggccatgcacccactgcgcagcggcttgctcaactccacctcggactccgacctcgtgcgctaccgcaccattagcaagattccccaaatcaccctcaactttgtggacctcaagggcgaccccttcttggcttcgcccaccagtgaccgtgagatcatagcacctaagataaaggagcgaacccacaatgtcactgagaaggtcacccaggtcctgtccctgggcgccgacgtgctgcctgagtacaagctgcaggcaccgcgcatccaccgctggaccatcctgcattacagccccttcaaggccgtgtgggactggctcatcctgctgctggtcatctacacggctgtcttcacaccctactcggctgccttcctgctgaaggagacggaagaaggcccgcctgctaccgagtgtggctacgcctgccagccgctggctgtggtggacctcatcgtggacatcatgttcattgtggacatcctcatcaacttccgcaccacctacgtcaatgccaacgaggaggtggtcagccaccccggccgcatcgccgtccactacttcaagggctggttcctcatcgacatggtggccgccatccccttcgacctgctcatcttcggctctggctctgaggagctgatcgggctgctgaagactgcgcggctgctgcggctggtgcgcgtggcgcggaagctggatcgctactcagagtacggcgcggccgtgctgttcttgctcatgtgcacctttgcgctcatcgcgcactggctagcctgcatctggtacgccatcggcaacatggagcagccacacatggactcacgcatcggctggctgcacaacctgggcgaccagataggcaaaccctacaacagcagcggcctgggcggcccctccatcaaggacaagtatgtgacggcgctctacttcaccttcagcagcctcaccagtgtgggcttcggcaacgcctctcccaacaccaactcagagaagatcttctccatctgcgtcatgctcattggctccctcatgtatgctagcatcttcggcaacgtgtcggccatcatccagcggctgtactcgggcacagcccgctaccacacacagatgctgcgggtgcgggagttcatccgcttccaccagatccccaatcccctgcgccagcgcctcgaggagtacttccagcacgcctggtcctacaccaacggcatcgacatgaacgcggtgctgaagggcttccctgagtgcctgcaggctgacatctgcctgcacctgaaccgctcactgctgcagcactgcaaacccttccgaggggccaccaagggctgccttcgggccctggccatgaagttcaagaccacacatgcaccgccaggggacacactggtgcatgctggggacctgctcaccgccctgtacttcatctcccggggctccatcgagatcctgcggggcgacgtcgtcgtggccatcctggggaagaatgacatctttggggagcctctgaacctgtatgcaaggcctggcaagtcgaacggggatgtgcgggccctcacctactgtgacctacacaagatccatcgggacgacctgctggaggtgctggacatgtaccctgagttctccgaccacttctggtccagcctggagatcaccttcaacctgcgagataccaacatgatcccgggctcccccggcagtacggagttagagggtggcttcagtcggcaacgcaagcgcaagttgtccttccgcaggcgcacggacaaggacacggagcagccaggggaggtgtcggccttggggccgggccgggcgggggcagggccgagtagccggggccggccgggggggccgtggggggagagcccgtccagtggcccctccagccctgagagcagtgaggatgagggcccaggccgcagctccagccccctccgcctggtgcccttctccagccccaggccccccggagagccgccgggtggggagcccctgatggaggactgcgagaagagcagcgacacttgcaaccccctgtcaggcgccttctcaggagtgtccaacattttcagcttctggggggacagtcggggccgccagtaccaggagctccctcgatgccccgcccccacccccagcctcctcaacatccccctctccagcccgggtcggcggccccggggcgacgtggagagcaggctggatgccctccagcgccagctcaacaggctggagacccggctgagtgcagacatggccactgtcctgcagctgctacagaggcagatgacgctggtcccgcccgcctacagtgctgtgaccaccccggggcctggccccacttccacatccccgctgttgcccgtcagccccctccccaccctcaccttggactcgctttctcaggtttcccagttcatggcgtgtgaggagctgcccccgggggccccagagcttccccaagaaggccccacacgacgcctctccctaccgggccagctgggggccctcacctcccagcccctgcacagacacggctcggacccgggcagttagtggggctgcccagtgtggacacgtggctcacccagggatcaaggcgctgctgggccgctccccttggaggccctgctcaggaggccctgaccgtggaaggggagaggaactcgaaagcacagctcctcccccagcccttgggaccatcttctcctgcagtcccctgggccccagtgagaggggcaggggcagggccggcagtaggtggggcctgtggtccccccactgccctgagggcattagctggtctaactgcccggaggcacccggccctgggccttaggcacctcaaggacttttctgctatttactgctcttattgttaaggataataattaaggatcatatgaataattaatgaagatgctgatgactatgaataataaataattatcctgaggaga

SEQ ID NO: 338 - DNA, 3884 bp, Homo sapiens
  source 1..3884: mol_type = genomic DNA
  misc_feature 1..3884: note = cDNA of KCNH2 gene SNP c.188C>A (p.Pro63His)
atgccggtgcggaggggccacgtcgcgccgcagaacaccttcctggacaccatcatccgcaagtttgagggccagagccgtaagttcatcatcgccaacgctcgggtggagaactgcgccgtcatctactgcaacgacggcttctgcgagctgtgcggctactcgcgggccgaggtgatgcagcgacactgcacctgcgacttcctgcacgggccgcgcacgcagcgccgcgctgccgcgcagatcgcgcaggcactgctgggcgccgaggagcgcaaagtggaaatcgccttctaccggaaagatgggagctgcttcctatgtctggtggatgtggtgcccgtgaagaacgaggatggggctgtcatcatgttcatcctcaatttcgaggtggtgatggagaaggacatggtggggtccccggctcatgacaccaaccaccggggcccccccaccagctggctggccccaggccgcgccaagaccttccgcctgaagctgcccgcgctgctggcgctgacggcccgggagtcgtcggtgcggtcgggcggcgcgggcggcgcgggcgccccgggggccgtggtggtggacgtggacctgacgcccgcggcacccagcagcgagtcgctggccctggacgaagtgacagccatggacaaccacgtggcagggctcgggcccgcggaggagcggcgtgcgctggtgggtcccggctctccgccccgcagcgcgcccggccagctcccatcgccccgggcgcacagcctcaaccccgacgcctcgggctccagctgcagcctggcccggacgcgctcccgagaaagctgcgccagcgtgcgccgcgcctcgtcggccgacgacatcgaggccatgcgcgccggggtgctgcccccgccaccgcgccacgccagcaccggggccatgcacccactgcgcagcggcttgctcaactccacctcggactccgacctcgtgcgctaccgcaccattagcaagattccccaaatcaccctcaactttgtggacctcaagggcgaccccttcttggcttcgcccaccagtgaccgtgagatcatagcacctaagataaaggagcgaacccacaatgtcactgagaaggtcacccaggtcctgtccctgggcgccgacgtgctgcctgagtacaagctgcaggcaccgcgcatccaccgctggaccatcctgcattacagccccttcaaggccgtgtgggactggctcatcctgctgctggtcatctacacggctgtcttcacaccctactcggctgccttcctgctgaaggagacggaagaaggcccgcctgctaccgagtgtggctacgcctgccagccgctggctgtggtggacctcatcgtggacatcatgttcattgtggacatcctcatcaacttccgcaccacctacgtcaatgccaacgaggaggtggtcagccaccccggccgcatcgccgtccactacttcaagggctggttcctcatcgacatggtggccgccatccccttcgacctgctcatcttcggctctggctctgaggagctgatcgggctgctgaagactgcgcggctgctgcggctggtgcgcgtggcgcggaagctggatcgctactcagagtacggcgcggccgtgctgttcttgctcatgtgcacctttgcgctcatcgcgcactggctagcctgcatctggtacgccatcggcaacatggagcagccacacatggactcacgcatcggctggctgcacaacctgggcgaccagataggcaaaccctacaacagcagcggcctgggcggcccctccatcaaggacaagtatgtgacggcgctctacttcaccttcagcagcctcaccagtgtgggcttcggcaacgtctctcccaacaccaactcagagaagatcttctccatctgcgtcatgctcattggctccctcatgtatgctagcatcttcggcaacgtgtcggccatcatccagcggctgtactcgggcacagcccgctaccacacacagatgctgcgggtgcgggagttcatccgcttccaccagatccccaatcccctgcgccagcgcctcgaggagtacttccagcacgcctggtcctacaccaacggcatcgacatgaacgcggtgctgaagggcttccctgagtgcctgcaggctgacatctgcctgcacctgaaccgctcactgctgcagcactgcaaacccttccgaggggccaccaagggctgccttcgggccctggccatgaagttcaagaccacacatgcaccgccaggggacacactggtgcatgctggggacctgctcaccgccctgtacttcatctcccggggctccatcgagatcctgcggggcgacgtcgtcgtggccatcctggggaagaatgacatctttggggagcctctgaacctgtatgcaaggcctggcaagtcgaacggggatgtgcgggccctcacctactgtgacctacacaagatccatcgggacgacctgctggaggtgctggacatgtaccctgagttctccgaccacttctggtccagcctggagatcaccttcaacctgcgagataccaacatgatcccgggctcccccggcagtacggagttagagggtggcttcagtcggcaacgcaagcgcaagttgtccttccgcaggcgcacggacaaggacacggagcagccaggggaggtgtcggccttggggccgggccgggcgggggcagggccgagtagccggggccggccgggggggccgtggggggagagcccgtccagtggcccctccagccctgagagcagtgaggatgagggcccaggccgcagctccagccccctccgcctggtgcccttctccagccccaggccccccggagagccgccgggtggggagcccctgatggaggactgcgagaagagcagcgacacttgcaaccccctgtcaggcgccttctcaggagtgtccaacattttcagcttctggggggacagtcggggccgccagtaccaggagctccctcgatgccccgcccccacccccagcctcctcaacatccccctctccagcccgggtcggcggccccggggcgacgtggagagcaggctggatgccctccagcgccagctcaacaggctggagacccggctgagtgcagacatggccactgtcctgcagctgctacagaggcagatgacgctggtcccgcccgcctacagtgctgtgaccaccccggggcctggccccacttccacatccccgctgttgcccgtcagccccctccccaccctcaccttggactcgctttctcaggtttcccagttcatggcgtgtgaggagctgcccccgggggccccagagcttccccaagaaggccccacacgacgcctctccctaccgggccagctgggggccctcacctcccagcccctgcacagacacggctcggacccgggcagttagtggggctgcccagtgtggacacgtggctcacccagggatcaaggcgctgctgggccgctccccttggaggccctgctcaggaggccctgaccgtggaaggggagaggaactcgaaagcacagctcctcccccagcccttgggaccatcttctcctgcagtcccctgggccccagtgagaggggcaggggcagggccggcagtaggtggggcctgtggtccccccactgccctgagggcattagctggtctaactgcccggaggcacccggccctgggccttaggcacctcaaggacttttctgctatttactgctcttattgttaaggataataattaaggatcatatgaataattaatgaagatgctgatgactatgaataataaataattatcctgaggaga

SEQ ID NO: 339 - DNA, 3884 bp, Homo sapiens
  source 1..3884: mol_type = genomic DNA
  misc_feature 1..3884: note = cDNA of KCNH2 gene SNP c.1891T>G (p.Ser631Ala)
atgccggtgcggaggggccacgtcgcgccgcagaacaccttcctggacaccatcatccgcaagtttgagggccagagccgtaagttcatcatcgccaacgctcgggtggagaactgcgccgtcatctactgcaacgacggcttctgcgagctgtgcggctactcgcgggccgaggtgatgcagcgaccctgcacctgcgacttcctgcacgggccgcgcacgcagcgccgcgctgccgcgcagatcgcgcaggcactgctgggcgccgaggagcgcaaagtggaaatcgccttctaccggaaagatgggagctgcttcctatgtctggtggatgtggtgcccgtgaagaacgaggatggggctgtcatcatgttcatcctcaatttcgaggtggtgatggagaaggacatggtggggtccccggctcatgacaccaaccaccggggcccccccaccagctggctggccccaggccgcgccaagaccttccgcctgaagctgcccgcgctgctggcgctgacggcccgggagtcgtcggtgcggtcgggcggcgcgggcggcgcgggcgccccgggggccgtggtggtggacgtggacctgacgcccgcggcacccagcagcgagtcgctggccctggacgaagtgacagccatggacaaccacgtggcagggctcgggcccgcggaggagcggcgtgcgctggtgggtcccggctctccgccccgcagcgcgcccggccagctcccatcgccccgggcgcacagcctcaaccccgacgcctcgggctccagctgcagcctggcccggacgcgctcccgagaaagctgcgccagcgtgcgccgcgcctcgtcggccgacgacatcgaggccatgcgcgccggggtgctgcccccgccaccgcgccacgccagcaccggggccatgcacccactgcgcagcggcttgctcaactccacctcggactccgacctcgtgcgctaccgcaccattagcaagattccccaaatcaccctcaactttgtggacctcaagggcgaccccttcttggcttcgcccaccagtgaccgtgagatcatagcacctaagataaaggagcgaacccacaatgtcactgagaaggtcacccaggtcctgtccctgggcgccgacgtgctgcctgagtacaagctgcaggcaccgcgcatccaccgctggaccatcctgcattacagccccttcaaggccgtgtgggactggctcatcctgctgctggtcatctacacggctgtcttcacaccctactcggctgccttcctgctgaaggagacggaagaaggcccgcctgctaccgagtgtggctacgcctgccagccgctggctgtggtggacctcatcgtggacatcatgttcattgtggacatcctcatcaacttccgcaccacctacgtcaatgccaacgaggaggtggtcagccaccccggccgcatcgccgtccactacttcaagggctggttcctcatcgacatggtggccgccatccccttcgacctgctcatcttcggctctggctctgaggagctgatcgggctgctgaagactgcgcggctgctgcggctggtgcgcgtggcgcggaagctggatcgctactcagagtacggcgcggccgtgctgttcttgctcatgtgcacctttgcgctcatcgcgcactggctagcctgcatctggtacgccatcggcaacatggagcagccacacatggactcacgcatcggctggctgcacaacctgggcgaccagataggcaaaccctacaacagcagcggcctgggcggcccctccatcaaggacaagtatgtgacggcgctctacttcaccttcagcagcctcaccagtgtgggcttcggcaacgtcgctcccaacaccaactcagagaagatcttctccatctgcgtcatgctcattggctccctcatgtatgctagcatcttcggcaacgtgtcggccatcatccagcggctgtactcgggcacagcccgctaccacacacagatgctgcgggtgcgggagttcatccgcttccaccagatccccaatcccctgcgccagcgcctcgaggagtacttccagcacgcctggtcctacaccaacggcatcgacatgaacgcggtgctgaagggcttccctgagtgcctgcaggctgacatctgcctgcacctgaaccgctcactgctgcagcactgcaaacccttccgaggggccaccaagggctgccttcgggccctggccatgaagttcaagaccacacatgcaccgccaggggacacactggtgcatgctggggacctgctcaccgccctgtacttcatctcccggggctccatcgagatcctgcggggcgacgtcgtcgtggccatcctggggaagaatgacatctttggggagcctctgaacctgtatgcaaggcctggcaagtcgaacggggatgtgcgggccctcacctactgtgacctacacaagatccatcgggacgacctgctggaggtgctggacatgtaccctgagttctccgaccacttctggtccagcctggagatcaccttcaacctgcgagataccaacatgatcccgggctcccccggcagtacggagttagagggtggcttcagtcggcaacgcaagcgcaagttgtccttccgcaggcgcacggacaaggacacggagcagccaggggaggtgtcggccttggggccgggccgggcgggggcagggccgagtagccggggccggccgggggggccgtggggggagagcccgtccagtggcccctccagccctgagagcagtgaggatgagggcccaggccgcagctccagccccctccgcctggtgcccttctccagccccaggccccccggagagccgccgggtggggagcccctgatggaggactgcgagaagagcagcgacacttgcaaccccctgtcaggcgccttctcaggagtgtccaacattttcagcttctggggggacagtcggggccgccagtaccaggagctccctcgatgccccgcccccacccccagcctcctcaacatccccctctccagcccgggtcggcggccccggggcgacgtggagagcaggctggatgccctccagcgccagctcaacaggctggagacccggctgagtgcagacatggccactgtcctgcagctgctacagaggcagatgacgctggtcccgcccgcctacagtgctgtgaccaccccggggcctggccccacttccacatccccgctgttgcccgtcagccccctccccaccctcaccttggactcgctttctcaggtttcccagttcatggcgtgtgaggagctgcccccgggggccccagagcttccccaagaaggccccacacgacgcctctccctaccgggccagctgggggccctcacctcccagcccctgcacagacacggctcggacccgggcagttagtggggctgcccagtgtggacacgtggctcacccagggatcaaggcgctgctgggccgctccccttggaggccctgctcaggaggccctgaccgtggaaggggagaggaactcgaaagcacagctcctcccccagcccttgggaccatcttctcctgcagtcccctgggccccagtgagaggggcaggggcagggccggcagtaggtggggcctgtggtccccccactgccctgagggcattagctggtctaactgcccggaggcacccggccctgggccttaggcacctcaaggacttttctgctatttactgctcttattgttaaggataataattaaggatcatatgaataattaatgaagatgctgatgactatgaataataaataattatcctgaggaga

SEQ ID NO: 340 - DNA, 3884 bp, Homo sapiens
  source 1..3884: mol_type = genomic DNA
  misc_feature 1..3884: note = cDNA of KCNH2 gene SNP c.1892C>T (p.Ser631Phe)
atgccggtgcggaggggccacgtcgcgccgcagaacaccttcctggacaccatcatccgcaagtttgagggccagagccgtaagttcatcatcgccaacgctcgggtggagaactgcgccgtcatctactgcaacgacggcttctgcgagctgtgcggctactcgcgggccgaggtgatgcagcgaccctgcacctgcgacttcctgcacgggccgcgcacgcagcgccgcgctgccgcgcagatcgcgcaggcactgctgggcgccgaggagcgcaaagtggaaatcgccttctaccggaaagatgggagctgcttcctatgtctggtggatgtggtgcccgtgaagaacgaggatggggctgtcatcatgttcatcctcaatttcgaggtggtgatggagaaggacatggtggggtccccggctcatgacaccaaccaccggggcccccccaccagctggctggccccaggccgcgccaagaccttccgcctgaagctgcccgcgctgctggcgctgacggcccgggagtcgtcggtgcggtcgggcggcgcgggcggcgcgggcgccccgggggccgtggtggtggacgtggacctgacgcccgcggcacccagcagcgagtcgctggccctggacgaagtgacagccatggacaaccacgtggcagggctcgggcccgcggaggagcggcgtgcgctggtgggtcccggctctccgccccgcagcgcgcccggccagctcccatcgccccgggcgcacagcctcaaccccgacgcctcgggctccagctgcagcctggcccggacgcgctcccgagaaagctgcgccagcgtgcgccgcgcctcgtcggccgacgacatcgaggccatgcgcgccggggtgctgcccccgccaccgcgccacgccagcaccggggccatgcacccactgcgcagcggcttgctcaactccacctcggactccgacctcgtgcgctaccgcaccattagcaagattccccaaatcaccctcaactttgtggacctcaagggcgaccccttcttggcttcgcccaccagtgaccgtgagatcatagcacctaagataaaggagcgaacccacaatgtcactgagaaggtcacccaggtcctgtccctgggcgccgacgtgctgcctgagtacaagctgcaggcaccgcgcatccaccgctggaccatcctgcattacagccccttcaaggccgtgtgggactggctcatcctgctgctggtcatctacacggctgtcttcacaccctactcggctgccttcctgctgaaggagacggaagaaggcccgcctgctaccgagtgtggctacgcctgccagccgctggctgtggtggacctcatcgtggacatcatgttcattgtggacatcctcatcaacttccgcaccacctacgtcaatgccaacgaggaggtggtcagccaccccggccgcatcgccgtccactacttcaagggctggttcctcatcgacatggtggccgccatccccttcgacctgctcatcttcggctctggctctgaggagctgatcgggctgctgaagactgcgcggctgctgcggctggtgcgcgtggcgcggaagctggatcgctactcagagtacggcgcggccgtgctgttcttgctcatgtgcacctttgcgctcatcgcgcactggctagcctgcatctggtacgccatcggcaacatggagcagccacacatggactcacgcatcggctggctgcacaacctgggcgaccagataggcaaaccctacaacagcagcggcctgggcggcccctccatcaaggacaagtatgtgacggcgctctacttcaccttcagcagcctcaccagtgtgggcttcggcaacgtctttcccaacaccaactcagagaagatcttctccatctgcgtcatgctcattggctccctcatgtatgctagcatcttcggcaacgtgtcggccatcatccagcggctgtactcgggcacagcccgctaccacacacagatgctgcgggtgcgggagttcatccgcttccaccagatccccaatcccctgcgccagcgcctcgaggagtacttccagcacgcctggtcctacaccaacggcatcgacatgaacgcggtgctgaagggcttccctgagtgcctgcaggctgacatctgcctgcacctgaaccgctcactgctgcagcactgcaaacccttccgaggggccaccaagggctgccttcgggccctggccatgaagttcaagaccacacatgcaccgccaggggacacactggtgcatgctggggacctgctcaccgccctgtacttcatctcccggggctccatcgagatcctgcggggcgacgtcgtcgtggccatcctggggaagaatgacatctttggggagcctctgaacctgtatgcaaggcctggcaagtcgaacggggatgtgcgggccctcacctactgtgacctacacaagatccatcgggacgacctgctggaggtgctggacatgtaccctgagttctccgaccacttctggtccagcctggagatcaccttcaacctgcgagataccaacatgatcccgggctcccccggcagtacggagttagagggtggcttcagtcggcaacgcaagcgcaagttgtccttccgcaggcgcacggacaaggacacggagcagccaggggaggtgtcggccttggggccgggccgggcgggggcagggccgagtagccggggccggccgggggggccgtggggggagagcccgtccagtggcccctccagccctgagagcagtgaggatgagggcccaggccgcagctccagccccctccgcctggtgcccttctccagccccaggccccccggagagccgccgggtggggagcccctgatggaggactgcgagaagagcagcgacacttgcaaccccctgtcaggcgccttctcaggagtgtccaacattttcagcttctggggggacagtcggggccgccagtaccaggagctccctcgatgccccgcccccacccccagcctcctcaacatccccctctccagcccgggtcggcggccccggggcgacgtggagagcaggctggatgccctccagcgccagctcaacaggctggagacccggctgagtgcagacatggccactgtcctgcagctgctacagaggcagatgacgctggtcccgcccgcctacagtgctgtgaccaccccggggcctggccccacttccacatccccgctgttgcccgtcagccccctccccaccctcaccttggactcgctttctcaggtttcccagttcatggcgtgtgaggagctgcccccgggggccccagagcttccccaagaaggccccacacgacgcctctccctaccgggccagctgggggccctcacctcccagcccctgcacagacacggctcggacccgggcagttagtggggctgcccagtgtggacacgtggctcacccagggatcaaggcgctgctgggccgctccccttggaggccctgctcaggaggccctgaccgtggaaggggagaggaactcgaaagcacagctcctcccccagcccttgggaccatcttctcctgcagtcccctgggccccagtgagaggggcaggggcagggccggcagtaggtggggcctgtggtccccccactgccctgagggcattagctggtctaactgcccggaggcacccggccctgggccttaggcacctcaaggacttttctgctatttactgctcttattgttaaggataataattaaggatcatatgaataattaatgaagatgctgatgactatgaataataaataattatcctgaggaga

SEQ ID NO: 341 - DNA, 3884 bp, Homo sapiens
  source 1..3884: mol_type = genomic DNA
  misc_feature 1..3884: note = cDNA of KCNH2 gene SNP c.1894C>G (p.Pro632Ala)
atgccggtgcggaggggccacgtcgcgccgcagaacaccttcctggacaccatcatccgcaagtttgagggccagagccgtaagttcatcatcgccaacgctcgggtggagaactgcgccgtcatctactgcaacgacggcttctgcgagctgtgcggctactcgcgggccgaggtgatgcagcgaccctgcacctgcgacttcctgcacgggccgcgcacgcagcgccgcgctgccgcgcagatcgcgcaggcactgctgggcgccgaggagcgcaaagtggaaatcgccttctaccggaaagatgggagctgcttcctatgtctggtggatgtggtgcccgtgaagaacgaggatggggctgtcatcatgttcatcctcaatttcgaggtggtgatggagaaggacatggtggggtccccggctcatgacaccaaccaccggggcccccccaccagctggctggccccaggccgcgccaagaccttccgcctgaagctgcccgcgctgctggcgctgacggcccgggagtcgtcggtgcggtcgggcggcgcgggcggcgcgggcgccccgggggccgtggtggtggacgtggacctgacgcccgcggcacccagcagcgagtcgctggccctggacgaagtgacagccatggacaaccacgtggcagggctcgggcccgcggaggagcggcgtgcgctggtgggtcccggctctccgccccgcagcgcgcccggccagctcccatcgccccgggcgcacagcctcaaccccgacgcctcgggctccagctgcagcctggcccggacgcgctcccgagaaagctgcgccagcgtgcgccgcgcctcgtcggccgacgacatcgaggccatgcgcgccggggtgctgcccccgccaccgcgccacgccagcaccggggccatgcacccactgcgcagcggcttgctcaactccacctcggactccgacctcgtgcgctaccgcaccattagcaagattccccaaatcaccctcaactttgtggacctcaagggcgaccccttcttggcttcgcccaccagtgaccgtgagatcatagcacctaagataaaggagcgaacccacaatgtcactgagaaggtcacccaggtcctgtccctgggcgccgacgtgctgcctgagtacaagctgcaggcaccgcgcatccaccgctggaccatcctgcattacagccccttcaaggccgtgtgggactggctcatcctgctgctggtcatctacacggctgtcttcacaccctactcggctgccttcctgctgaaggagacggaagaaggcccgcctgctaccgagtgtggctacgcctgccagccgctggctgtggtggacctcatcgtggacatcatgttcattgtggacatcctcatcaacttccgcaccacctacgtcaatgccaacgaggaggtggtcagccaccccggccgcatcgccgtccactacttcaagggctggttcctcatcgacatggtggccgccatccccttcgacctgctcatcttcggctctggctctgaggagctgatcgggctgctgaagactgcgcggctgctgcggctggtgcgcgtggcgcggaagctggatcgctactcagagtacggcgcggccgtgctgttcttgctcatgtgcacctttgcgctcatcgcgcactggctagcctgcatctggtacgccatcggcaacatggagcagccacacatggactcacgcatcggctggctgcacaacctgggcgaccagataggcaaaccctacaacagcagcggcctgggcggcccctccatcaaggacaagtatgtgacggcgctctacttcaccttcagcagcctcaccagtgtgggcttcggcaacgtctctgccaacaccaactcagagaagatcttctccatctgcgtcatgctcattggctccctcatgtatgctagcatcttcggcaacgtgtcggccatcatccagcggctgtactcgggcacagcccgctaccacacacagatgctgcgggtgcgggagttcatccgcttccaccagatccccaatcccctgcgccagcgcctcgaggagtacttccagcacgcctggtcctacaccaacggcatcgacatgaacgcggtgctgaagggcttccctgagtgcctgcaggctgacatctgcctgcacctgaaccgctcactgctgcagcactgcaaacccttccgaggggccaccaagggctgccttcgggccctggccatgaagttcaagaccacacatgcaccgccaggggacacactggtgcatgctggggacctgctcaccgccctgtacttcatctcccggggctccatcgagatcctgcggggcgacgtcgtcgtggccatcctggggaagaatgacatctttggggagcctctgaacctgtatgcaaggcctggcaagtcgaacggggatgtgcgggccctcacctactgtgacctacacaagatccatcgggacgacctgctggaggtgctggacatgtaccctgagttctccgaccacttctggtccagcctggagatcaccttcaacctgcgagataccaacatgatcccgggctcccccggcagtacggagttagagggtggcttcagtcggcaacgcaagcgcaagttgtccttccgcaggcgcacggacaaggacacggagcagccaggggaggtgtcggccttggggccgggccgggcgggggcagggccgagtagccggggccggccgggggggccgtggggggagagcccgtccagtggcccctccagccctgagagcagtgaggatgagggcccaggccgcagctccagccccctccgcctggtgcccttctccagccccaggccccccggagagccgccgggtggggagcccctgatggaggactgcgagaagagcagcgacacttgcaaccccctgtcaggcgccttctcaggagtgtccaacattttcagcttctggggggacagtcggggccgccagtaccaggagctccctcgatgccccgcccccacccccagcctcctcaacatccccctctccagcccgggtcggcggccccggggcgacgtggagagcaggctggatgccctccagcgccagctcaacaggctggagacccggctgagtgcagacatggccactgtcctgcagctgctacagaggcagatgacgctggtcccgcccgcctacagtgctgtgaccaccccggggcctggccccacttccacatccccgctgttgcccgtcagccccctccccaccctcaccttggactcgctttctcaggtttcccagttcatggcgtgtgaggagctgcccccgggggccccagagcttccccaagaaggccccacacgacgcctctccctaccgggccagctgggggccctcacctcccagcccctgcacagacacggctcggacccgggcagttagtggggctgcccagtgtggacacgtggctcacccagggatcaaggcgctgctgggccgctccccttggaggccctgctcaggaggccctgaccgtggaaggggagaggaactcgaaagcacagctcctcccccagcccttgggaccatcttctcctgcagtcccctgggccccagtgagaggggcaggggcagggccggcagtaggtggggcctgtggtccccccactgccctgagggcattagctggtctaactgcccggaggcacccggccctgggccttaggcacctcaaggacttttctgctatttactgctcttattgttaaggataataattaaggatcatatgaataattaatgaagatgctgatgactatgaataataaataattatcctgaggaga

SEQ ID NO: 342 - DNA, 3884 bp, Homo sapiens
  source 1..3884: mol_type = genomic DNA
  misc_feature 1..3884: note = cDNA of KCNH2 gene SNP c.1894C>T (p.Pro632Ser)
atgccggtgcggaggggccacgtcgcgccgcagaacaccttcctggacaccatcatccgcaagtttgagggccagagccgtaagttcatcatcgccaacgctcgggtggagaactgcgccgtcatctactgcaacgacggcttctgcgagctgtgcggctactcgcgggccgaggtgatgcagcgaccctgcacctgcgacttcctgcacgggccgcgcacgcagcgccgcgctgccgcgcagatcgcgcaggcactgctgggcgccgaggagcgcaaagtggaaatcgccttctaccggaaagatgggagctgcttcctatgtctggtggatgtggtgcccgtgaagaacgaggatggggctgtcatcatgttcatcctcaatttcgaggtggtgatggagaaggacatggtggggtccccggctcatgacaccaaccaccggggcccccccaccagctggctggccccaggccgcgccaagaccttccgcctgaagctgcccgcgctgctggcgctgacggcccgggagtcgtcggtgcggtcgggcggcgcgggcggcgcgggcgccccgggggccgtggtggtggacgtggacctgacgcccgcggcacccagcagcgagtcgctggccctggacgaagtgacagccatggacaaccacgtggcagggctcgggcccgcggaggagcggcgtgcgctggtgggtcccggctctccgccccgcagcgcgcccggccagctcccatcgccccgggcgcacagcctcaaccccgacgcctcgggctccagctgcagcctggcccggacgcgctcccgagaaagctgcgccagcgtgcgccgcgcctcgtcggccgacgacatcgaggccatgcgcgccggggtgctgcccccgccaccgcgccacgccagcaccggggccatgcacccactgcgcagcggcttgctcaactccacctcggactccgacctcgtgcgctaccgcaccattagcaagattccccaaatcaccctcaactttgtggacctcaagggcgaccccttcttggcttcgcccaccagtgaccgtgagatcatagcacctaagataaaggagcgaacccacaatgtcactgagaaggtcacccaggtcctgtccctgggcgccgacgtgctgcctgagtacaagctgcaggcaccgcgcatccaccgctggaccatcctgcattacagccccttcaaggccgtgtgggactggctcatcctgctgctggtcatctacacggctgtcttcacaccctactcggctgccttcctgctgaaggagacggaagaaggcccgcctgctaccgagtgtggctacgcctgccagccgctggctgtggtggacctcatcgtggacatcatgttcattgtggacatcctcatcaacttccgcaccacctacgtcaatgccaacgaggaggtggtcagccaccccggccgcatcgccgtccactacttcaagggctggttcctcatcgacatggtggccgccatccccttcgacctgctcatcttcggctctggctctgaggagctgatcgggctgctgaagactgcgcggctgctgcggctggtgcgcgtggcgcggaagctggatcgctactcagagtacggcgcggccgtgctgttcttgctcatgtgcacctttgcgctcatcgcgcactggctagcctgcatctggtacgccatcggcaacatggagcagccacacatggactcacgcatcggctggctgcacaacctgggcgaccagataggcaaaccctacaacagcagcggcctgggcggcccctccatcaaggacaagtatgtgacggcgctctacttcaccttcagcagcctcaccagtgtgggcttcggcaacgtctcttccaacaccaactcagagaagatcttctccatctgcgtcatgctcattggctccctcatgtatgctagcatcttcggcaacgtgtcggccatcatccagcggctgtactcgggcacagcccgctaccacacacagatgctgcgggtgcgggagttcatccgcttccaccagatccccaatcccctgcgccagcgcctcgaggagtacttccagcacgcctggtcctacaccaacggcatcgacatgaacgcggtgctgaagggcttccctgagtgcctgcaggctgacatctgcctgcacctgaaccgctcactgctgcagcactgcaaacccttccgaggggccaccaagggctgccttcgggccctggccatgaagttcaagaccacacatgcaccgccaggggacacactggtgcatgctggggacctgctcaccgccctgtacttcatctcccggggctccatcgagatcctgcggggcgacgtcgtcgtggccatcctggggaagaatgacatctttggggagcctctgaacctgtatgcaaggcctggcaagtcgaacggggatgtgcgggccctcacctactgtgacctacacaagatccatcgggacgacctgctggaggtgctggacatgtaccctgagttctccgaccacttctggtccagcctggagatcaccttcaacctgcgagataccaacatgatcccgggctcccccggcagtacggagttagagggtggcttcagtcggcaacgcaagcgcaagttgtccttccgcaggcgcacggacaaggacacggagcagccaggggaggtgtcggccttggggccgggccgggcgggggcagggccgagtagccggggccggccgggggggccgtggggggagagcccgtccagtggcccctccagccctgagagcagtgaggatgagggcccaggccgcagctccagccccctccgcctggtgcccttctccagccccaggccccccggagagccgccgggtggggagcccctgatggaggactgcgagaagagcagcgacacttgcaaccccctgtcaggcgccttctcaggagtgtccaacattttcagcttctggggggacagtcggggccgccagtaccaggagctccctcgatgccccgcccccacccccagcctcctcaacatccccctctccagcccgggtcggcggccccggggcgacgtggagagcaggctggatgccctccagcgccagctcaacaggctggagacccggctgagtgcagacatggccactgtcctgcagctgctacagaggcagatgacgctggtcccgcccgcctacagtgctgtgaccaccccggggcctggccccacttccacatccccgctgttgcccgtcagccccctccccaccctcaccttggactcgctttctcaggtttcccagttcatggcgtgtgaggagctgcccccgggggccccagagcttccccaagaaggccccacacgacgcctctccctaccgggccagctgggggccctcacctcccagcccctgcacagacacggctcggacccgggcagttagtggggctgcccagtgtggacacgtggctcacccagggatcaaggcgctgctgggccgctccccttggaggccctgctcaggaggccctgaccgtggaaggggagaggaactcgaaagcacagctcctcccccagcccttgggaccatcttctcctgcagtcccctgggccccagtgagaggggcaggggcagggccggcagtaggtggggcctgtggtccccccactgccctgagggcattagctggtctaactgcccggaggcacccggccctgggccttaggcacctcaaggacttttctgctatttactgctcttattgttaaggataataattaaggatcatatgaataattaatgaagatgctgatgactatgaataataaataattatcctgaggaga

SEQ ID NO: 343 - DNA, 3884 bp, Homo sapiens
  source 1..3884: mol_type = genomic DNA
  misc_feature 1..3884: note = cDNA of KCNH2 gene SNP c.1897A>C (p.Asn633His)
atgccggtgcggaggggccacgtcgcgccgcagaacaccttcctggacaccatcatccgcaagtttgagggccagagccgtaagttcatcatcgccaacgctcgggtggagaactgcgccgtcatctactgcaacgacggcttctgcgagctgtgcggctactcgcgggccgaggtgatgcagcgaccctgcacctgcgacttcctgcacgggccgcgcacgcagcgccgcgctgccgcgcagatcgcgcaggcactgctgggcgccgaggagcgcaaagtggaaatcgccttctaccggaaagatgggagctgcttcctatgtctggtggatgtggtgcccgtgaagaacgaggatggggctgtcatcatgttcatcctcaatttcgaggtggtgatggagaaggacatggtggggtccccggctcatgacaccaaccaccggggcccccccaccagctggctggccccaggccgcgccaagaccttccgcctgaagctgcccgcgctgctggcgctgacggcccgggagtcgtcggtgcggtcgggcggcgcgggcggcgcgggcgccccgggggccgtggtggtggacgtggacctgacgcccgcggcacccagcagcgagtcgctggccctggacgaagtgacagccatggacaaccacgtggcagggctcgggcccgcggaggagcggcgtgcgctggtgggtcccggctctccgccccgcagcgcgcccggccagctcccatcgccccgggcgcacagcctcaaccccgacgcctcgggctccagctgcagcctggcccggacgcgctcccgagaaagctgcgccagcgtgcgccgcgcctcgtcggccgacgacatcgaggccatgcgcgccggggtgctgcccccgccaccgcgccacgccagcaccggggccatgcacccactgcgcagcggcttgctcaactccacctcggactccgacctcgtgcgctaccgcaccattagcaagattccccaaatcaccctcaactttgtggacctcaagggcgaccccttcttggcttcgcccaccagtgaccgtgagatcatagcacctaagataaaggagcgaacccacaatgtcactgagaaggtcacccaggtcctgtccctgggcgccgacgtgctgcctgagtacaagctgcaggcaccgcgcatccaccgctggaccatcctgcattacagccccttcaaggccgtgtgggactggctcatcctgctgctggtcatctacacggctgtcttcacaccctactcggctgccttcctgctgaaggagacggaagaaggcccgcctgctaccgagtgtggctacgcctgccagccgctggctgtggtggacctcatcgtggacatcatgttcattgtggacatcctcatcaacttccgcaccacctacgtcaatgccaacgaggaggtggtcagccaccccggccgcatcgccgtccactacttcaagggctggttcctcatcgacatggtggccgccatccccttcgacctgctcatcttcggctctggctctgaggagctgatcgggctgctgaagactgcgcggctgctgcggctggtgcgcgtggcgcggaagctggatcgctactcagagtacggcgcggccgtgctgttcttgctcatgtgcacctttgcgctcatcgcgcactggctagcctgcatctggtacgccatcggcaacatggagcagccacacatggactcacgcatcggctggctgcacaacctgggcgaccagataggcaaaccctacaacagcagcggcctgggcggcccctccatcaaggacaagtatgtgacggcgctctacttcaccttcagcagcctcaccagtgtgggcttcggcaacgtctctccccacaccaactcagagaagatcttctccatctgcgtcatgctcattggctccctcatgtatgctagcatcttcggcaacgtgtcggccatcatccagcggctgtactcgggcacagcccgctaccacacacagatgctgcgggtgcgggagttcatccgcttccaccagatccccaatcccctgcgccagcgcctcgaggagtacttccagcacgcctggtcctacaccaacggcatcgacatgaacgcggtgctgaagggcttccctgagtgcctgcaggctgacatctgcctgcacctgaaccgctcactgctgcagcactgcaaacccttccgaggggccaccaagggctgccttcgggccctggccatgaagttcaagaccacacatgcaccgccaggggacacactggtgcatgctggggacctgctcaccgccctgtacttcatctcccggggctccatcgagatcctgcggggcgacgtcgtcgtggccatcctggggaagaatgacatctttggggagcctctgaacctgtatgcaaggcctggcaagtcgaacggggatgtgcgggccctcacctactgtgacctacacaagatccatcgggacgacctgctggaggtgctggacatgtaccctgagttctccgaccacttctggtccagcctggagatcaccttcaacctgcgagataccaacatgatcccgggctcccccggcagtacggagttagagggtggcttcagtcggcaacgcaagcgcaagttgtccttccgcaggcgcacggacaaggacacggagcagccaggggaggtgtcggccttggggccgggccgggcgggggcagggccgagtagccggggccggccgggggggccgtggggggagagcccgtccagtggcccctccagccctgagagcagtgaggatgagggcccaggccgcagctccagccccctccgcctggtgcccttctccagccccaggccccccggagagccgccgggtggggagcccctgatggaggactgcgagaagagcagcgacacttgcaaccccctgtcaggcgccttctcaggagtgtccaacattttcagcttctggggggacagtcggggccgccagtaccaggagctccctcgatgccccgcccccacccccagcctcctcaacatccccctctccagcccgggtcggcggccccggggcgacgtggagagcaggctggatgccctccagcgccagctcaacaggctggagacccggctgagtgcagacatggccactgtcctgcagctgctacagaggcagatgacgctggtcccgcccgcctacagtgctgtgaccaccccggggcctggccccacttccacatccccgctgttgcccgtcagccccctccccaccctcaccttggactcgctttctcaggtttcccagttcatggcgtgtgaggagctgcccccgggggccccagagcttccccaagaaggccccacacgacgcctctccctaccgggccagctgggggccctcacctcccagcccctgcacagacacggctcggacccgggcagttagtggggctgcccagtgtggacacgtggctcacccagggatcaaggcgctgctgggccgctccccttggaggccctgctcaggaggccctgaccgtggaaggggagaggaactcgaaagcacagctcctcccccagcccttgggaccatcttctcctgcagtcccctgggccccagtgagaggggcaggggcagggccggcagtaggtggggcctgtggtccccccactgccctgagggcattagctggtctaactgcccggaggcacccggccctgggccttaggcacctcaaggacttttctgctatttactgctcttattgttaaggataataattaaggatcatatgaataattaatgaagatgctgatgactatgaataataaataattatcctgaggaga

SEQ ID NO: 344 - DNA, 3884 bp, Homo sapiens
  source 1..3884: mol_type = genomic DNA
  misc_feature 1..3884: note = cDNA of KCNH2 gene SNP c.1897A>G (p.Asn633Asp)
atgccggtgcggaggggccacgtcgcgccgcagaacaccttcctggacaccatcatccgcaagtttgagggccagagccgtaagttcatcatcgccaacgctcgggtggagaactgcgccgtcatctactgcaacgacggcttctgcgagctgtgcggctactcgcgggccgaggtgatgcagcgaccctgcacctgcgacttcctgcacgggccgcgcacgcagcgccgcgctgccgcgcagatcgcgcaggcactgctgggcgccgaggagcgcaaagtggaaatcgccttctaccggaaagatgggagctgcttcctatgtctggtggatgtggtgcccgtgaagaacgaggatggggctgtcatcatgttcatcctcaatttcgaggtggtgatggagaaggacatggtggggtccccggctcatgacaccaaccaccggggcccccccaccagctggctggccccaggccgcgccaagaccttccgcctgaagctgcccgcgctgctggcgctgacggcccgggagtcgtcggtgcggtcgggcggcgcgggcggcgcgggcgccccgggggccgtggtggtggacgtggacctgacgcccgcggcacccagcagcgagtcgctggccctggacgaagtgacagccatggacaaccacgtggcagggctcgggcccgcggaggagcggcgtgcgctggtgggtcccggctctccgccccgcagcgcgcccggccagctcccatcgccccgggcgcacagcctcaaccccgacgcctcgggctccagctgcagcctggcccggacgcgctcccgagaaagctgcgccagcgtgcgccgcgcctcgtcggccgacgacatcgaggccatgcgcgccggggtgctgcccccgccaccgcgccacgccagcaccggggccatgcacccactgcgcagcggcttgctcaactccacctcggactccgacctcgtgcgctaccgcaccattagcaagattccccaaatcaccctcaactttgtggacctcaagggcgaccccttcttggcttcgcccaccagtgaccgtgagatcatagcacctaagataaaggagcgaacccacaatgtcactgagaaggtcacccaggtcctgtccctgggcgccgacgtgctgcctgagtacaagctgcaggcaccgcgcatccaccgctggaccatcctgcattacagccccttcaaggccgtgtgggactggctcatcctgctgctggtcatctacacggctgtcttcacaccctactcggctgccttcctgctgaaggagacggaagaaggcccgcctgctaccgagtgtggctacgcctgccagccgctggctgtggtggacctcatcgtggacatcatgttcattgtggacatcctcatcaacttccgcaccacctacgtcaatgccaacgaggaggtggtcagccaccccggccgcatcgccgtccactacttcaagggctggttcctcatcgacatggtggccgccatccccttcgacctgctcatcttcggctctggctctgaggagctgatcgggctgctgaagactgcgcggctgctgcggctggtgcgcgtggcgcggaagctggatcgctactcagagtacggcgcggccgtgctgttcttgctcatgtgcacctttgcgctcatcgcgcactggctagcctgcatctggtacgccatcggcaacatggagcagccacacatggactcacgcatcggctggctgcacaacctgggcgaccagataggcaaaccctacaacagcagcggcctgggcggcccctccatcaaggacaagtatgtgacggcgctctacttcaccttcagcagcctcaccagtgtgggcttcggcaacgtctctcccgacaccaactcagagaagatcttctccatctgcgtcatgctcattggctccctcatgtatgctagcatcttcggcaacgtgtcggccatcatccagcggctgtactcgggcacagcccgctaccacacacagatgctgcgggtgcgggagttcatccgcttccaccagatccccaatcccctgcgccagcgcctcgaggagtacttccagcacgcctggtcctacaccaacggcatcgacatgaacgcggtgctgaagggcttccctgagtgcctgcaggctgacatctgcctgcacctgaaccgctcactgctgcagcactgcaaacccttccgaggggccaccaagggctgccttcgggccctggccatgaagttcaagaccacacatgcaccgccaggggacacactggtgcatgctggggacctgctcaccgccctgtacttcatctcccggggctccatcgagatcctgcggggcgacgtcgtcgtggccatcctggggaagaatgacatctttggggagcctctgaacctgtatgcaaggcctggcaagtcgaacggggatgtgcgggccctcacctactgtgacctacacaagatccatcgggacgacctgctggaggtgctggacatgtaccctgagttctccgaccacttctggtccagcctggagatcaccttcaacctgcgagataccaacatgatcccgggctcccccggcagtacggagttagagggtggcttcagtcggcaacgcaagcgcaagttgtccttccgcaggcgcacggacaaggacacggagcagccaggggaggtgtcggccttggggccgggccgggcgggggcagggccgagtagccggggccggccgggggggccgtggggggagagcccgtccagtggcccctccagccctgagagcagtgaggatgagggcccaggccgcagctccagccccctccgcctggtgcccttctccagccccaggccccccggagagccgccgggtggggagcccctgatggaggactgcgagaagagcagcgacacttgcaaccccctgtcaggcgccttctcaggagtgtccaacattttcagcttctggggggacagtcggggccgccagtaccaggagctccctcgatgccccgcccccacccccagcctcctcaacatccccctctccagcccgggtcggcggccccggggcgacgtggagagcaggctggatgccctccagcgccagctcaacaggctggagacccggctgagtgcagacatggccactgtcctgcagctgctacagaggcagatgacgctggtcccgcccgcctacagtgctgtgaccaccccggggcctggccccacttccacatccccgctgttgcccgtcagccccctccccaccctcaccttggactcgctttctcaggtttcccagttcatggcgtgtgaggagctgcccccgggggccccagagcttccccaagaaggccccacacgacgcctctccctaccgggccagctgggggccctcacctcccagcccctgcacagacacggctcggacccgggcagttagtggggctgcccagtgtggacacgtggctcacccagggatcaaggcgctgctgggccgctccccttggaggccctgctcaggaggccctgaccgtggaaggggagaggaactcgaaagcacagctcctcccccagcccttgggaccatcttctcctgcagtcccctgggccccagtgagaggggcaggggcagggccggcagtaggtggggcctgtggtccccccactgccctgagggcattagctggtctaactgcccggaggcacccggccctgggccttaggcacctcaaggacttttctgctatttactgctcttattgttaaggataataattaaggatcatatgaataattaatgaagatgctgatgactatgaataataaataattatcctgaggaga

SEQ ID NO: 345 - DNA, 3884 bp, Homo sapiens
  source 1..3884: mol_type = genomic DNA
  misc_feature 1..3884: note = cDNA of KCNH2 gene SNP c.1898A>G (p.Asn633Ser)
atgccggtgcggaggggccacgtcgcgccgcagaacaccttcctggacaccatcatccgcaagtttgagggccagagccgtaagttcatcatcgccaacgctcgggtggagaactgcgccgtcatctactgcaacgacggcttctgcgagctgtgcggctactcgcgggccgaggtgatgcagcgaccctgcacctgcgacttcctgcacgggccgcgcacgcagcgccgcgctgccgcgcagatcgcgcaggcactgctgggcgccgaggagcgcaaagtggaaatcgccttctaccggaaagatgggagctgcttcctatgtctggtggatgtggtgcccgtgaagaacgaggatggggctgtcatcatgttcatcctcaatttcgaggtggtgatggagaaggacatggtggggtccccggctcatgacaccaaccaccggggcccccccaccagctggctggccccaggccgcgccaagaccttccgcctgaagctgcccgcgctgctggcgctgacggcccgggagtcgtcggtgcggtcgggcggcgcgggcggcgcgggcgccccgggggccgtggtggtggacgtggacctgacgcccgcggcacccagcagcgagtcgctggccctggacgaagtgacagccatggacaaccacgtggcagggctcgggcccgcggaggagcggcgtgcgctggtgggtcccggctctccgccccgcagcgcgcccggccagctcccatcgccccgggcgcacagcctcaaccccgacgcctcgggctccagctgcagcctggcccggacgcgctcccgagaaagctgcgccagcgtgcgccgcgcctcgtcggccgacgacatcgaggccatgcgcgccggggtgctgcccccgccaccgcgccacgccagcaccggggccatgcacccactgcgcagcggcttgctcaactccacctcggactccgacctcgtgcgctaccgcaccattagcaagattccccaaatcaccctcaactttgtggacctcaagggcgaccccttcttggcttcgcccaccagtgaccgtgagatcatagcacctaagataaaggagcgaacccacaatgtcactgagaaggtcacccaggtcctgtccctgggcgccgacgtgctgcctgagtacaagctgcaggcaccgcgcatccaccgctggaccatcctgcattacagccccttcaaggccgtgtgggactggctcatcctgctgctggtcatctacacggctgtcttcacaccctactcggctgccttcctgctgaaggagacggaagaaggcccgcctgctaccgagtgtggctacgcctgccagccgctggctgtggtggacctcatcgtggacatcatgttcattgtggacatcctcatcaacttccgcaccacctacgtcaatgccaacgaggaggtggtcagccaccccggccgcatcgccgtccactacttcaagggctggttcctcatcgacatggtggccgccatccccttcgacctgctcatcttcggctctggctctgaggagctgatcgggctgctgaagactgcgcggctgctgcggctggtgcgcgtggcgcggaagctggatcgctactcagagtacggcgcggccgtgctgttcttgctcatgtgcacctttgcgctcatcgcgcactggctagcctgcatctggtacgccatcggcaacatggagcagccacacatggactcacgcatcggctggctgcacaacctgggcgaccagataggcaaaccctacaacagcagcggcctgggcggcccctccatcaaggacaagtatgtgacggcgctctacttcaccttcagcagcctcaccagtgtgggcttcggcaacgtctctcccagcaccaactcagagaagatcttctccatctgcgtcatgctcattggctccctcatgtatgctagcatcttcggcaacgtgtcggccatcatccagcggctgtactcgggcacagcccgctaccacacacagatgctgcgggtgcgggagttcatccgcttccaccagatccccaatcccctgcgccagcgcctcgaggagtacttccagcacgcctggtcctacaccaacggcatcgacatgaacgcggtgctgaagggcttccctgagtgcctgcaggctgacatctgcctgcacctgaaccgctcactgctgcagcactgcaaacccttccgaggggccaccaagggctgccttcgggccctggccatgaagttcaagaccacacatgcaccgccaggggacacactggtgcatgctggggacctgctcaccgccctgtacttcatctcccggggctccatcgagatcctgcggggcgacgtcgtcgtggccatcctggggaagaatgacatctttggggagcctctgaacctgtatgcaaggcctggcaagtcgaacggggatgtgcgggccctcacctactgtgacctacacaagatccatcgggacgacctgctggaggtgctggacatgtaccctgagttctccgaccacttctggtccagcctggagatcaccttcaacctgcgagataccaacatgatcccgggctcccccggcagtacggagttagagggtggcttcagtcggcaacgcaagcgcaagttgtccttccgcaggcgcacggacaaggacacggagcagccaggggaggtgtcggccttggggccgggccgggcgggggcagggccgagtagccggggccggccgggggggccgtggggggagagcccgtccagtggcccctccagccctgagagcagtgaggatgagggcccaggccgcagctccagccccctccgcctggtgcccttctccagccccaggccccccggagagccgccgggtggggagcccctgatggaggactgcgagaagagcagcgacacttgcaaccccctgtcaggcgccttctcaggagtgtccaacattttcagcttctggggggacagtcggggccgccagtaccaggagctccctcgatgccccgcccccacccccagcctcctcaacatccccctctccagcccgggtcggcggccccggggcgacgtggagagcaggctggatgccctccagcgccagctcaacaggctggagacccggctgagtgcagacatggccactgtcctgcagctgctacagaggcagatgacgctggtcccgcccgcctacagtgctgtgaccaccccggggcctggccccacttccacatccccgctgttgcccgtcagccccctccccaccctcaccttggactcgctttctcaggtttcccagttcatggcgtgtgaggagctgcccccgggggccccagagcttccccaagaaggccccacacgacgcctctccctaccgggccagctgggggccctcacctcccagcccctgcacagacacggctcggacccgggcagttagtggggctgcccagtgtggacacgtggctcacccagggatcaaggcgctgctgggccgctccccttggaggccctgctcaggaggccctgaccgtggaaggggagaggaactcgaaagcacagctcctcccccagcccttgggaccatcttctcctgcagtcccctgggccccagtgagaggggcaggggcagggccggcagtaggtggggcctgtggtccccccactgccctgagggcattagctggtctaactgcccggaggcacccggccctgggccttaggcacctcaaggacttttctgctatttactgctcttattgttaaggataataattaaggatcatatgaataattaatgaagatgctgatgactatgaataataaataattatcctgaggaga

SEQ ID NO: 346 - DNA, 3884 bp, Homo sapiens
  source 1..3884: mol_type = genomic DNA
  misc_feature 1..3884: note = cDNA of KCNH2 gene SNP c.1898A>T (p.Asn633Ile)
atgccggtgcggaggggccacgtcgcgccgcagaacaccttcctggacaccatcatccgcaagtttgagggccagagccgtaagttcatcatcgccaacgctcgggtggagaactgcgccgtcatctactgcaacgacggcttctgcgagctgtgcggctactcgcgggccgaggtgatgcagcgaccctgcacctgcgacttcctgcacgggccgcgcacgcagcgccgcgctgccgcgcagatcgcgcaggcactgctgggcgccgaggagcgcaaagtggaaatcgccttctaccggaaagatgggagctgcttcctatgtctggtggatgtggtgcccgtgaagaacgaggatggggctgtcatcatgttcatcctcaatttcgaggtggtgatggagaaggacatggtggggtccccggctcatgacaccaaccaccggggcccccccaccagctggctggccccaggccgcgccaagaccttccgcctgaagctgcccgcgctgctggcgctgacggcccgggagtcgtcggtgcggtcgggcggcgcgggcggcgcgggcgccccgggggccgtggtggtggacgtggacctgacgcccgcggcacccagcagcgagtcgctggccctggacgaagtgacagccatggacaaccacgtggcagggctcgggcccgcggaggagcggcgtgcgctggtgggtcccggctctccgccccgcagcgcgcccggccagctcccatcgccccgggcgcacagcctcaaccccgacgcctcgggctccagctgcagcctggcccggacgcgctcccgagaaagctgcgccagcgtgcgccgcgcctcgtcggccgacgacatcgaggccatgcgcgccggggtgctgcccccgccaccgcgccacgccagcaccggggccatgcacccactgcgcagcggcttgctcaactccacctcggactccgacctcgtgcgctaccgcaccattagcaagattccccaaatcaccctcaactttgtggacctcaagggcgaccccttcttggcttcgcccaccagtgaccgtgagatcatagcacctaagataaaggagcgaacccacaatgtcactgagaaggtcacccaggtcctgtccctgggcgccgacgtgctgcctgagtacaagctgcaggcaccgcgcatccaccgctggaccatcctgcattacagccccttcaaggccgtgtgggactggctcatcctgctgctggtcatctacacggctgtcttcacaccctactcggctgccttcctgctgaaggagacggaagaaggcccgcctgctaccgagtgtggctacgcctgccagccgctggctgtggtggacctcatcgtggacatcatgttcattgtggacatcctcatcaacttccgcaccacctacgtcaatgccaacgaggaggtggtcagccaccccggccgcatcgccgtccactacttcaagggctggttcctcatcgacatggtggccgccatccccttcgacctgctcatcttcggctctggctctgaggagctgatcgggctgctgaagactgcgcggctgctgcggctggtgcgcgtggcgcggaagctggatcgctactcagagtacggcgcggccgtgctgttcttgctcatgtgcacctttgcgctcatcgcgcactggctagcctgcatctggtacgccatcggcaacatggagcagccacacatggactcacgcatcggctggctgcacaacctgggcgaccagataggcaaaccctacaacagcagcggcctgggcggcccctccatcaaggacaagtatgtgacggcgctctacttcaccttcagcagcctcaccagtgtgggcttcggcaacgtctctcccatcaccaactcagagaagatcttctccatctgcgtcatgctcattggctccctcatgtatgctagcatcttcggcaacgtgtcggccatcatccagcggctgtactcgggcacagcccgctaccacacacagatgctgcgggtgcgggagttcatccgcttccaccagatccccaatcccctgcgccagcgcctcgaggagtacttccagcacgcctggtcctacaccaacggcatcgacatgaacgcggtgctgaagggcttccctgagtgcctgcaggctgacatctgcctgcacctgaaccgctcactgctgcagcactgcaaacccttccgaggggccaccaagggctgccttcgggccctggccatgaagttcaagaccacacatgcaccgccaggggacacactggtgcatgctggggacctgctcaccgccctgtacttcatctcccggggctccatcgagatcctgcggggcgacgtcgtcgtggccatcctggggaagaatgacatctttggggagcctctgaacctgtatgcaaggcctggcaagtcgaacggggatgtgcgggccctcacctactgtgacctacacaagatccatcgggacgacctgctggaggtgctggacatgtaccctgagttctccgaccacttctggtccagcctggagatcaccttcaacctgcgagataccaacatgatcccgggctcccccggcagtacggagttagagggtggcttcagtcggcaacgcaagcgcaagttgtccttccgcaggcgcacggacaaggacacggagcagccaggggaggtgtcggccttggggccgggccgggcgggggcagggccgagtagccggggccggccgggggggccgtggggggagagcccgtccagtggcccctccagccctgagagcagtgaggatgagggcccaggccgcagctccagccccctccgcctggtgcccttctccagccccaggccccccggagagccgccgggtggggagcccctgatggaggactgcgagaagagcagcgacacttgcaaccccctgtcaggcgccttctcaggagtgtccaacattttcagcttctggggggacagtcggggccgccagtaccaggagctccctcgatgccccgcccccacccccagcctcctcaacatccccctctccagcccgggtcggcggccccggggcgacgtggagagcaggctggatgccctccagcgccagctcaacaggctggagacccggctgagtgcagacatggccactgtcctgcagctgctacagaggcagatgacgctggtcccgcccgcctacagtgctgtgaccaccccggggcctggccccacttccacatccccgctgttgcccgtcagccccctccccaccctcaccttggactcgctttctcaggtttcccagttcatggcgtgtgaggagctgcccccgggggccccagagcttccccaagaaggccccacacgacgcctctccctaccgggccagctgggggccctcacctcccagcccctgcacagacacggctcggacccgggcagttagtggggctgcccagtgtggacacgtggctcacccagggatcaaggcgctgctgggccgctccccttggaggccctgctcaggaggccctgaccgtggaaggggagaggaactcgaaagcacagctcctcccccagcccttgggaccatcttctcctgcagtcccctgggccccagtgagaggggcaggggcagggccggcagtaggtggggcctgtggtccccccactgccctgagggcattagctggtctaactgcccggaggcacccggccctgggccttaggcacctcaaggacttttctgctatttactgctcttattgttaaggataataattaaggatcatatgaataattaatgaagatgctgatgactatgaataataaataattatcctgaggaga

SEQ ID NO: 347 - DNA, 3884 bp, Homo sapiens
  source 1..3884: mol_type = genomic DNA
  misc_feature 1..3884: note = cDNA of KCNH2 gene SNP c.1900A>G (p.Thr634Ala)
atgccggtgcggaggggccacgtcgcgccgcagaacaccttcctggacaccatcatccgcaagtttgagggccagagccgtaagttcatcatcgccaacgctcgggtggagaactgcgccgtcatctactgcaacgacggcttctgcgagctgtgcggctactcgcgggccgaggtgatgcagcgaccctgcacctgcgacttcctgcacgggccgcgcacgcagcgccgcgctgccgcgcagatcgcgcaggcactgctgggcgccgaggagcgcaaagtggaaatcgccttctaccggaaagatgggagctgcttcctatgtctggtggatgtggtgcccgtgaagaacgaggatggggctgtcatcatgttcatcctcaatttcgaggtggtgatggagaaggacatggtggggtccccggctcatgacaccaaccaccggggcccccccaccagctggctggccccaggccgcgccaagaccttccgcctgaagctgcccgcgctgctggcgctgacggcccgggagtcgtcggtgcggtcgggcggcgcgggcggcgcgggcgccccgggggccgtggtggtggacgtggacctgacgcccgcggcacccagcagcgagtcgctggccctggacgaagtgacagccatggacaaccacgtggcagggctcgggcccgcggaggagcggcgtgcgctggtgggtcccggctctccgccccgcagcgcgcccggccagctcccatcgccccgggcgcacagcctcaaccccgacgcctcgggctccagctgcagcctggcccggacgcgctcccgagaaagctgcgccagcgtgcgccgcgcctcgtcggccgacgacatcgaggccatgcgcgccggggtgctgcccccgccaccgcgccacgccagcaccggggccatgcacccactgcgcagcggcttgctcaactccacctcggactccgacctcgtgcgctaccgcaccattagcaagattccccaaatcaccctcaactttgtggacctcaagggcgaccccttcttggcttcgcccaccagtgaccgtgagatcatagcacctaagataaaggagcgaacccacaatgtcactgagaaggtcacccaggtcctgtccctgggcgccgacgtgctgcctgagtacaagctgcaggcaccgcgcatccaccgctggaccatcctgcattacagccccttcaaggccgtgtgggactggctcatcctgctgctggtcatctacacggctgtcttcacaccctactcggctgccttcctgctgaaggagacggaagaaggcccgcctgctaccgagtgtggctacgcctgccagccgctggctgtggtggacctcatcgtggacatcatgttcattgtggacatcctcatcaacttccgcaccacctacgtcaatgccaacgaggaggtggtcagccaccccggccgcatcgccgtccactacttcaagggctggttcctcatcgacatggtggccgccatccccttcgacctgctcatcttcggctctggctctgaggagctgatcgggctgctgaagactgcgcggctgctgcggctggtgcgcgtggcgcggaagctggatcgctactcagagtacggcgcggccgtgctgttcttgctcatgtgcacctttgcgctcatcgcgcactggctagcctgcatctggtacgccatcggcaacatggagcagccacacatggactcacgcatcggctggctgcacaacctgggcgaccagataggcaaaccctacaacagcagcggcctgggcggcccctccatcaaggacaagtatgtgacggcgctctacttcaccttcagcagcctcaccagtgtgggcttcggcaacgtctctcccaacgccaactcagagaagatcttctccatctgcgtcatgctcattggctccctcatgtatgctagcatcttcggcaacgtgtcggccatcatccagcggctgtactcgggcacagcccgctaccacacacagatgctgcgggtgcgggagttcatccgcttccaccagatccccaatcccctgcgccagcgcctcgaggagtacttccagcacgcctggtcctacaccaacggcatcgacatgaacgcggtgctgaagggcttccctgagtgcctgcaggctgacatctgcctgcacctgaaccgctcactgctgcagcactgcaaacccttccgaggggccaccaagggctgccttcgggccctggccatgaagttcaagaccacacatgcaccgccaggggacacactggtgcatgctggggacctgctcaccgccctgtacttcatctcccggggctccatcgagatcctgcggggcgacgtcgtcgtggccatcctggggaagaatgacatctttggggagcctctgaacctgtatgcaaggcctggcaagtcgaacggggatgtgcgggccctcacctactgtgacctacacaagatccatcgggacgacctgctggaggtgctggacatgtaccctgagttctccgaccacttctggtccagcctggagatcaccttcaacctgcgagataccaacatgatcccgggctcccccggcagtacggagttagagggtggcttcagtcggcaacgcaagcgcaagttgtccttccgcaggcgcacggacaaggacacggagcagccaggggaggtgtcggccttggggccgggccgggcgggggcagggccgagtagccggggccggccgggggggccgtggggggagagcccgtccagtggcccctccagccctgagagcagtgaggatgagggcccaggccgcagctccagccccctccgcctggtgcccttctccagccccaggccccccggagagccgccgggtggggagcccctgatggaggactgcgagaagagcagcgacacttgcaaccccctgtcaggcgccttctcaggagtgtccaacattttcagcttctggggggacagtcggggccgccagtaccaggagctccctcgatgccccgcccccacccccagcctcctcaacatccccctctccagcccgggtcggcggccccggggcgacgtggagagcaggctggatgccctccagcgccagctcaacaggctggagacccggctgagtgcagacatggccactgtcctgcagctgctacagaggcagatgacgctggtcccgcccgcctacagtgctgtgaccaccccggggcctggccccacttccacatccccgctgttgcccgtcagccccctccccaccctcaccttggactcgctttctcaggtttcccagttcatggcgtgtgaggagctgcccccgggggccccagagcttccccaagaaggccccacacgacgcctctccctaccgggccagctgggggccctcacctcccagcccctgcacagacacggctcggacccgggcagttagtggggctgcccagtgtggacacgtggctcacccagggatcaaggcgctgctgggccgctccccttggaggccctgctcaggaggccctgaccgtggaaggggagaggaactcgaaagcacagctcctcccccagcccttgggaccatcttctcctgcagtcccctgggccccagtgagaggggcaggggcagggccggcagtaggtggggcctgtggtccccccactgccctgagggcattagctggtctaactgcccggaggcacccggccctgggccttaggcacctcaaggacttttctgctatttactgctcttattgttaaggataataattaaggatcatatgaataattaatgaagatgctgatgactatgaataataaataattatcctgaggaga

SEQ ID NO: 348 - DNA, 3884 bp, Homo sapiens
  source 1..3884: mol_type = genomic DNA
  misc_feature 1..3884: note = cDNA of KCNH2 gene SNP c.1901C>T (p.Thr634Ile)
atgccggtgcggaggggccacgtcgcgccgcagaacaccttcctggacaccatcatccgcaagtttgagggccagagccgtaagttcatcatcgccaacgctcgggtggagaactgcgccgtcatctactgcaacgacggcttctgcgagctgtgcggctactcgcgggccgaggtgatgcagcgaccctgcacctgcgacttcctgcacgggccgcgcacgcagcgccgcgctgccgcgcagatcgcgcaggcactgctgggcgccgaggagcgcaaagtggaaatcgccttctaccggaaagatgggagctgcttcctatgtctggtggatgtggtgcccgtgaagaacgaggatggggctgtcatcatgttcatcctcaatttcgaggtggtgatggagaaggacatggtggggtccccggctcatgacaccaaccaccggggcccccccaccagctggctggccccaggccgcgccaagaccttccgcctgaagctgcccgcgctgctggcgctgacggcccgggagtcgtcggtgcggtcgggcggcgcgggcggcgcgggcgccccgggggccgtggtggtggacgtggacctgacgcccgcggcacccagcagcgagtcgctggccctggacgaagtgacagccatggacaaccacgtggcagggctcgggcccgcggaggagcggcgtgcgctggtgggtcccggctctccgccccgcagcgcgcccggccagctcccatcgccccgggcgcacagcctcaaccccgacgcctcgggctccagctgcagcctggcccggacgcgctcccgagaaagctgcgccagcgtgcgccgcgcctcgtcggccgacgacatcgaggccatgcgcgccggggtgctgcccccgccaccgcgccacgccagcaccggggccatgcacccactgcgcagcggcttgctcaactccacctcggactccgacctcgtgcgctaccgcaccattagcaagattccccaaatcaccctcaactttgtggacctcaagggcgaccccttcttggcttcgcccaccagtgaccgtgagatcatagcacctaagataaaggagcgaacccacaatgtcactgagaaggtcacccaggtcctgtccctgggcgccgacgtgctgcctgagtacaagctgcaggcaccgcgcatccaccgctggaccatcctgcattacagccccttcaaggccgtgtgggactggctcatcctgctgctggtcatctacacggctgtcttcacaccctactcggctgccttcctgctgaaggagacggaagaaggcccgcctgctaccgagtgtggctacgcctgccagccgctggctgtggtggacctcatcgtggacatcatgttcattgtggacatcctcatcaacttccgcaccacctacgtcaatgccaacgaggaggtggtcagccaccccggccgcatcgccgtccactacttcaagggctggttcctcatcgacatggtggccgccatccccttcgacctgctcatcttcggctctggctctgaggagctgatcgggctgctgaagactgcgcggctgctgcggctggtgcgcgtggcgcggaagctggatcgctactcagagtacggcgcggccgtgctgttcttgctcatgtgcacctttgcgctcatcgcgcactggctagcctgcatctggtacgccatcggcaacatggagcagccacacatggactcacgcatcggctggctgcacaacctgggcgaccagataggcaaaccctacaacagcagcggcctgggcggcccctccatcaaggacaagtatgtgacggcgctctacttcaccttcagcagcctcaccagtgtgggcttcggcaacgtctctcccaacatcaactcagagaagatcttctccatctgcgtcatgctcattggctccctcatgtatgctagcatcttcggcaacgtgtcggccatcatccagcggctgtactcgggcacagcccgctaccacacacagatgctgcgggtgcgggagttcatccgcttccaccagatccccaatcccctgcgccagcgcctcgaggagtacttccagcacgcctggtcctacaccaacggcatcgacatgaacgcggtgctgaagggcttccctgagtgcctgcaggctgacatctgcctgcacctgaaccgctcactgctgcagcactgcaaacccttccgaggggccaccaagggctgccttcgggccctggccatgaagttcaagaccacacatgcaccgccaggggacacactggtgcatgctggggacctgctcaccgccctgtacttcatctcccggggctccatcgagatcctgcggggcgacgtcgtcgtggccatcctggggaagaatgacatctttggggagcctctgaacctgtatgcaaggcctggcaagtcgaacggggatgtgcgggccctcacctactgtgacctacacaagatccatcgggacgacctgctggaggtgctggacatgtaccctgagttctccgaccacttctggtccagcctggagatcaccttcaacctgcgagataccaacatgatcccgggctcccccggcagtacggagttagagggtggcttcagtcggcaacgcaagcgcaagttgtccttccgcaggcgcacggacaaggacacggagcagccaggggaggtgtcggccttggggccgggccgggcgggggcagggccgagtagccggggccggccgggggggccgtggggggagagcccgtccagtggcccctccagccctgagagcagtgaggatgagggcccaggccgcagctccagccccctccgcctggtgcccttctccagccccaggccccccggagagccgccgggtggggagcccctgatggaggactgcgagaagagcagcgacacttgcaaccccctgtcaggcgccttctcaggagtgtccaacattttcagcttctggggggacagtcggggccgccagtaccaggagctccctcgatgccccgcccccacccccagcctcctcaacatccccctctccagcccgggtcggcggccccggggcgacgtggagagcaggctggatgccctccagcgccagctcaacaggctggagacccggctgagtgcagacatggccactgtcctgcagctgctacagaggcagatgacgctggtcccgcccgcctacagtgctgtgaccaccccggggcctggccccacttccacatccccgctgttgcccgtcagccccctccccaccctcaccttggactcgctttctcaggtttcccagttcatggcgtgtgaggagctgcccccgggggccccagagcttccccaagaaggccccacacgacgcctctccctaccgggccagctgggggccctcacctcccagcccctgcacagacacggctcggacccgggcagttagtggggctgcccagtgtggacacgtggctcacccagggatcaaggcgctgctgggccgctccccttggaggccctgctcaggaggccctgaccgtggaaggggagaggaactcgaaagcacagctcctcccccagcccttgggaccatcttctcctgcagtcccctgggccccagtgagaggggcaggggcagggccggcagtaggtggggcctgtggtccccccactgccctgagggcattagctggtctaactgcccggaggcacccggccctgggccttaggcacctcaaggacttttctgctatttactgctcttattgttaaggataataattaaggatcatatgaataattaatgaagatgctgatgactatgaataataaataattatcctgaggaga

SEQ ID NO: 349 - DNA, 3884 bp, Homo sapiens
  source 1..3884: mol_type = genomic DNA
  misc_feature 1..3884: note = cDNA of KCNH2 gene SNP c.1903A>G (p.Asn635Asp)
atgccggtgcggaggggccacgtcgcgccgcagaacaccttcctggacaccatcatccgcaagtttgagggccagagccgtaagttcatcatcgccaacgctcgggtggagaactgcgccgtcatctactgcaacgacggcttctgcgagctgtgcggctactcgcgggccgaggtgatgcagcgaccctgcacctgcgacttcctgcacgggccgcgcacgcagcgccgcgctgccgcgcagatcgcgcaggcactgctgggcgccgaggagcgcaaagtggaaatcgccttctaccggaaagatgggagctgcttcctatgtctggtggatgtggtgcccgtgaagaacgaggatggggctgtcatcatgttcatcctcaatttcgaggtggtgatggagaaggacatggtggggtccccggctcatgacaccaaccaccggggcccccccaccagctggctggccccaggccgcgccaagaccttccgcctgaagctgcccgcgctgctggcgctgacggcccgggagtcgtcggtgcggtcgggcggcgcgggcggcgcgggcgccccgggggccgtggtggtggacgtggacctgacgcccgcggcacccagcagcgagtcgctggccctggacgaagtgacagccatggacaaccacgtggcagggctcgggcccgcggaggagcggcgtgcgctggtgggtcccggctctccgccccgcagcgcgcccggccagctcccatcgccccgggcgcacagcctcaaccccgacgcctcgggctccagctgcagcctggcccggacgcgctcccgagaaagctgcgccagcgtgcgccgcgcctcgtcggccgacgacatcgaggccatgcgcgccggggtgctgcccccgccaccgcgccacgccagcaccggggccatgcacccactgcgcagcggcttgctcaactccacctcggactccgacctcgtgcgctaccgcaccattagcaagattccccaaatcaccctcaactttgtggacctcaagggcgaccccttcttggcttcgcccaccagtgaccgtgagatcatagcacctaagataaaggagcgaacccacaatgtcactgagaaggtcacccaggtcctgtccctgggcgccgacgtgctgcctgagtacaagctgcaggcaccgcgcatccaccgctggaccatcctgcattacagccccttcaaggccgtgtgggactggctcatcctgctgctggtcatctacacggctgtcttcacaccctactcggctgccttcctgctgaaggagacggaagaaggcccgcctgctaccgagtgtggctacgcctgccagccgctggctgtggtggacctcatcgtggacatcatgttcattgtggacatcctcatcaacttccgcaccacctacgtcaatgccaacgaggaggtggtcagccaccccggccgcatcgccgtccactacttcaagggctggttcctcatcgacatggtggccgccatccccttcgacctgctcatcttcggctctggctctgaggagctgatcgggctgctgaagactgcgcggctgctgcggctggtgcgcgtggcgcggaagctggatcgctactcagagtacggcgcggccgtgctgttcttgctcatgtgcacctttgcgctcatcgcgcactggctagcctgcatctggtacgccatcggcaacatggagcagccacacatggactcacgcatcggctggctgcacaacctgggcgaccagataggcaaaccctacaacagcagcggcctgggcggcccctccatcaaggacaagtatgtgacggcgctctacttcaccttcagcagcctcaccagtgtgggcttcggcaacgtctctcccaacaccgactcagagaagatcttctccatctgcgtcatgctcattggctccctcatgtatgctagcatcttcggcaacgtgtcggccatcatccagcggctgtactcgggcacagcccgctaccacacacagatgctgcgggtgcgggagttcatccgcttccaccagatccccaatcccctgcgccagcgcctcgaggagtacttccagcacgcctggtcctacaccaacggcatcgacatgaacgcggtgctgaagggcttccctgagtgcctgcaggctgacatctgcctgcacctgaaccgctcactgctgcagcactgcaaacccttccgaggggccaccaagggctgccttcgggccctggccatgaagttcaagaccacacatgcaccgccaggggacacactggtgcatgctggggacctgctcaccgccctgtacttcatctcccggggctccatcgagatcctgcggggcgacgtcgtcgtggccatcctggggaagaatgacatctttggggagcctctgaacctgtatgcaaggcctggcaagtcgaacggggatgtgcgggccctcacctactgtgacctacacaagatccatcgggacgacctgctggaggtgctggacatgtaccctgagttctccgaccacttctggtccagcctggagatcaccttcaacctgcgagataccaacatgatcccgggctcccccggcagtacggagttagagggtggcttcagtcggcaacgcaagcgcaagttgtccttccgcaggcgcacggacaaggacacggagcagccaggggaggtgtcggccttggggccgggccgggcgggggcagggccgagtagccggggccggccgggggggccgtggggggagagcccgtccagtggcccctccagccctgagagcagtgaggatgagggcccaggccgcagctccagccccctccgcctggtgcccttctccagccccaggccccccggagagccgccgggtggggagcccctgatggaggactgcgagaagagcagcgacacttgcaaccccctgtcaggcgccttctcaggagtgtccaacattttcagcttctggggggacagtcggggccgccagtaccaggagctccctcgatgccccgcccccacccccagcctcctcaacatccccctctccagcccgggtcggcggccccggggcgacgtggagagcaggctggatgccctccagcgccagctcaacaggctggagacccggctgagtgcagacatggccactgtcctgcagctgctacagaggcagatgacgctggtcccgcccgcctacagtgctgtgaccaccccggggcctggccccacttccacatccccgctgttgcccgtcagccccctccccaccctcaccttggactcgctttctcaggtttcccagttcatggcgtgtgaggagctgcccccgggggccccagagcttccccaagaaggccccacacgacgcctctccctaccgggccagctgggggccctcacctcccagcccctgcacagacacggctcggacccgggcagttagtggggctgcccagtgtggacacgtggctcacccagggatcaaggcgctgctgggccgctccccttggaggccctgctcaggaggccctgaccgtggaaggggagaggaactcgaaagcacagctcctcccccagcccttgggaccatcttctcctgcagtcccctgggccccagtgagaggggcaggggcagggccggcagtaggtggggcctgtggtccccccactgccctgagggcattagctggtctaactgcccggaggcacccggccctgggccttaggcacctcaaggacttttctgctatttactgctcttattgttaaggataataattaaggatcatatgaataattaatgaagatgctgatgactatgaataataaataattatcctgaggaga

SEQ ID NO: 350 - DNA, 3884 bp, Homo sapiens
  source 1..3884: mol_type = genomic DNA
  misc_feature 1..3884: note = cDNA of KCNH2 gene SNP c.1904A>G (p.Asn635Ser)
atgccggtgcggaggggccacgtcgcgccgcagaacaccttcctggacaccatcatccgcaagtttgagggccagagccgtaagttcatcatcgccaacgctcgggtggagaactgcgccgtcatctactgcaacgacggcttctgcgagctgtgcggctactcgcgggccgaggtgatgcagcgaccctgcacctgcgacttcctgcacgggccgcgcacgcagcgccgcgctgccgcgcagatcgcgcaggcactgctgggcgccgaggagcgcaaagtggaaatcgccttctaccggaaagatgggagctgcttcctatgtctggtggatgtggtgcccgtgaagaacgaggatggggctgtcatcatgttcatcctcaatttcgaggtggtgatggagaaggacatggtggggtccccggctcatgacaccaaccaccggggcccccccaccagctggctggccccaggccgcgccaagaccttccgcctgaagctgcccgcgctgctggcgctgacggcccgggagtcgtcggtgcggtcgggcggcgcgggcggcgcgggcgccccgggggccgtggtggtggacgtggacctgacgcccgcggcacccagcagcgagtcgctggccctggacgaagtgacagccatggacaaccacgtggcagggctcgggcccgcggaggagcggcgtgcgctggtgggtcccggctctccgccccgcagcgcgcccggccagctcccatcgccccgggcgcacagcctcaaccccgacgcctcgggctccagctgcagcctggcccggacgcgctcccgagaaagctgcgccagcgtgcgccgcgcctcgtcggccgacgacatcgaggccatgcgcgccggggtgctgcccccgccaccgcgccacgccagcaccggggccatgcacccactgcgcagcggcttgctcaactccacctcggactccgacctcgtgcgctaccgcaccattagcaagattccccaaatcaccctcaactttgtggacctcaagggcgaccccttcttggcttcgcccaccagtgaccgtgagatcatagcacctaagataaaggagcgaacccacaatgtcactgagaaggtcacccaggtcctgtccctgggcgccgacgtgctgcctgagtacaagctgcaggcaccgcgcatccaccgctggaccatcctgcattacagccccttcaaggccgtgtgggactggctcatcctgctgctggtcatctacacggctgtcttcacaccctactcggctgccttcctgctgaaggagacggaagaaggcccgcctgctaccgagtgtggctacgcctgccagccgctggctgtggtggacctcatcgtggacatcatgttcattgtggacatcctcatcaacttccgcaccacctacgtcaatgccaacgaggaggtggtcagccaccccggccgcatcgccgtccactacttcaagggctggttcctcatcgacatggtggccgccatccccttcgacctgctcatcttcggctctggctctgaggagctgatcgggctgctgaagactgcgcggctgctgcggctggtgcgcgtggcgcggaagctggatcgctactcagagtacggcgcggccgtgctgttcttgctcatgtgcacctttgcgctcatcgcgcactggctagcctgcatctggtacgccatcggcaacatggagcagccacacatggactcacgcatcggctggctgcacaacctgggcgaccagataggcaaaccctacaacagcagcggcctgggcggcccctccatcaaggacaagtatgtgacggcgctctacttcaccttcagcagcctcaccagtgtgggcttcggcaacgtctctcccaacaccagctcagagaagatcttctccatctgcgtcatgctcattggctccctcatgtatgctagcatcttcggcaacgtgtcggccatcatccagcggctgtactcgggcacagcccgctaccacacacagatgctgcgggtgcgggagttcatccgcttccaccagatccccaatcccctgcgccagcgcctcgaggagtacttccagcacgcctggtcctacaccaacggcatcgacatgaacgcggtgctgaagggcttccctgagtgcctgcaggctgacatctgcctgcacctgaaccgctcactgctgcagcactgcaaacccttccgaggggccaccaagggctgccttcgggccctggccatgaagttcaagaccacacatgcaccgccaggggacacactggtgcatgctggggacctgctcaccgccctgtacttcatctcccggggctccatcgagatcctgcggggcgacgtcgtcgtggccatcctggggaagaatgacatctttggggagcctctgaacctgtatgcaaggcctggcaagtcgaacggggatgtgcgggccctcacctactgtgacctacacaagatccatcgggacgacctgctggaggtgctggacatgtaccctgagttctccgaccacttctggtccagcctggagatcaccttcaacctgcgagataccaacatgatcccgggctcccccggcagtacggagttagagggtggcttcagtcggcaacgcaagcgcaagttgtccttccgcaggcgcacggacaaggacacggagcagccaggggaggtgtcggccttggggccgggccgggcgggggcagggccgagtagccggggccggccgggggggccgtggggggagagcccgtccagtggcccctccagccctgagagcagtgaggatgagggcccaggccgcagctccagccccctccgcctggtgcccttctccagccccaggccccccggagagccgccgggtggggagcccctgatggaggactgcgagaagagcagcgacacttgcaaccccctgtcaggcgccttctcaggagtgtccaacattttcagcttctggggggacagtcggggccgccagtaccaggagctccctcgatgccccgcccccacccccagcctcctcaacatccccctctccagcccgggtcggcggccccggggcgacgtggagagcaggctggatgccctccagcgccagctcaacaggctggagacccggctgagtgcagacatggccactgtcctgcagctgctacagaggcagatgacgctggtcccgcccgcctacagtgctgtgaccaccccggggcctggccccacttccacatccccgctgttgcccgtcagccccctccccaccctcaccttggactcgctttctcaggtttcccagttcatggcgtgtgaggagctgcccccgggggccccagagcttccccaagaaggccccacacgacgcctctccctaccgggccagctgggggccctcacctcccagcccctgcacagacacggctcggacccgggcagttagtggggctgcccagtgtggacacgtggctcacccagggatcaaggcgctgctgggccgctccccttggaggccctgctcaggaggccctgaccgtggaaggggagaggaactcgaaagcacagctcctcccccagcccttgggaccatcttctcctgcagtcccctgggccccagtgagaggggcaggggcagggccggcagtaggtggggcctgtggtccccccactgccctgagggcattagctggtctaactgcccggaggcacccggccctgggccttaggcacctcaaggacttttctgctatttactgctcttattgttaaggataataattaaggatcatatgaataattaatgaagatgctgatgactatgaataataaataattatcctgaggaga

SEQ ID NO: 351 - DNA, 3884 bp, Homo sapiens
  source 1..3884: mol_type = genomic DNA
  misc_feature 1..3884: note = cDNA of KCNH2 gene SNP c.1904A>T (p.Asn635Ile)
atgccggtgcggaggggccacgtcgcgccgcagaacaccttcctggacaccatcatccgcaagtttgagggccagagccgtaagttcatcatcgccaacgctcgggtggagaactgcgccgtcatctactgcaacgacggcttctgcgagctgtgcggctactcgcgggccgaggtgatgcagcgaccctgcacctgcgacttcctgcacgggccgcgcacgcagcgccgcgctgccgcgcagatcgcgcaggcactgctgggcgccgaggagcgcaaagtggaaatcgccttctaccggaaagatgggagctgcttcctatgtctggtggatgtggtgcccgtgaagaacgaggatggggctgtcatcatgttcatcctcaatttcgaggtggtgatggagaaggacatggtggggtccccggctcatgacaccaaccaccggggcccccccaccagctggctggccccaggccgcgccaagaccttccgcctgaagctgcccgcgctgctggcgctgacggcccgggagtcgtcggtgcggtcgggcggcgcgggcggcgcgggcgccccgggggccgtggtggtggacgtggacctgacgcccgcggcacccagcagcgagtcgctggccctggacgaagtgacagccatggacaaccacgtggcagggctcgggcccgcggaggagcggcgtgcgctggtgggtcccggctctccgccccgcagcgcgcccggccagctcccatcgccccgggcgcacagcctcaaccccgacgcctcgggctccagctgcagcctggcccggacgcgctcccgagaaagctgcgccagcgtgcgccgcgcctcgtcggccgacgacatcgaggccatgcgcgccggggtgctgcccccgccaccgcgccacgccagcaccggggccatgcacccactgcgcagcggcttgctcaactccacctcggactccgacctcgtgcgctaccgcaccattagcaagattccccaaatcaccctcaactttgtggacctcaagggcgaccccttcttggcttcgcccaccagtgaccgtgagatcatagcacctaagataaaggagcgaacccacaatgtcactgagaaggtcacccaggtcctgtccctgggcgccgacgtgctgcctgagtacaagctgcaggcaccgcgcatccaccgctggaccatcctgcattacagccccttcaaggccgtgtgggactggctcatcctgctgctggtcatctacacggctgtcttcacaccctactcggctgccttcctgctgaaggagacggaagaaggcccgcctgctaccgagtgtggctacgcctgccagccgctggctgtggtggacctcatcgtggacatcatgttcattgtggacatcctcatcaacttccgcaccacctacgtcaatgccaacgaggaggtggtcagccaccccggccgcatcgccgtccactacttcaagggctggttcctcatcgacatggtggccgccatccccttcgacctgctcatcttcggctctggctctgaggagctgatcgggctgctgaagactgcgcggctgctgcggctggtgcgcgtggcgcggaagctggatcgctactcagagtacggcgcggccgtgctgttcttgctcatgtgcacctttgcgctcatcgcgcactggctagcctgcatctggtacgccatcggcaacatggagcagccacacatggactcacgcatcggctggctgcacaacctgggcgaccagataggcaaaccctacaacagcagcggcctgggcggcccctccatcaaggacaagtatgtgacggcgctctacttcaccttcagcagcctcaccagtgtgggcttcggcaacgtctctcccaacaccatctcagagaagatcttctccatctgcgtcatgctcattggctccctcatgtatgctagcatcttcggcaacgtgtcggccatcatccagcggctgtactcgggcacagcccgctaccacacacagatgctgcgggtgcgggagttcatccgcttccaccagatccccaatcccctgcgccagcgcctcgaggagtacttccagcacgcctggtcctacaccaacggcatcgacatgaacgcggtgctgaagggcttccctgagtgcctgcaggctgacatctgcctgcacctgaaccgctcactgctgcagcactgcaaacccttccgaggggccaccaagggctgccttcgggccctggccatgaagttcaagaccacacatgcaccgccaggggacacactggtgcatgctggggacctgctcaccgccctgtacttcatctcccggggctccatcgagatcctgcggggcgacgtcgtcgtggccatcctggggaagaatgacatctttggggagcctctgaacctgtatgcaaggcctggcaagtcgaacggggatgtgcgggccctcacctactgtgacctacacaagatccatcgggacgacctgctggaggtgctggacatgtaccctgagttctccgaccacttctggtccagcctggagatcaccttcaacctgcgagataccaacatgatcccgggctcccccggcagtacggagttagagggtggcttcagtcggcaacgcaagcgcaagttgtccttccgcaggcgcacggacaaggacacggagcagccaggggaggtgtcggccttggggccgggccgggcgggggcagggccgagtagccggggccggccgggggggccgtggggggagagcccgtccagtggcccctccagccctgagagcagtgaggatgagggcccaggccgcagctccagccccctccgcctggtgcccttctccagccccaggccccccggagagccgccgggtggggagcccctgatggaggactgcgagaagagcagcgacacttgcaaccccctgtcaggcgccttctcaggagtgtccaacattttcagcttctggggggacagtcggggccgccagtaccaggagctccctcgatgccccgcccccacccccagcctcctcaacatccccctctccagcccgggtcggcggccccggggcgacgtggagagcaggctggatgccctccagcgccagctcaacaggctggagacccggctgagtgcagacatggccactgtcctgcagctgctacagaggcagatgacgctggtcccgcccgcctacagtgctgtgaccaccccggggcctggccccacttccacatccccgctgttgcccgtcagccccctccccaccctcaccttggactcgctttctcaggtttcccagttcatggcgtgtgaggagctgcccccgggggccccagagcttccccaagaaggccccacacgacgcctctccctaccgggccagctgggggccctcacctcccagcccctgcacagacacggctcggacccgggcagttagtggggctgcccagtgtggacacgtggctcacccagggatcaaggcgctgctgggccgctccccttggaggccctgctcaggaggccctgaccgtggaaggggagaggaactcgaaagcacagctcctcccccagcccttgggaccatcttctcctgcagtcccctgggccccagtgagaggggcaggggcagggccggcagtaggtggggcctgtggtccccccactgccctgagggcattagctggtctaactgcccggaggcacccggccctgggccttaggcacctcaaggacttttctgctatttactgctcttattgttaaggataataattaaggatcatatgaataattaatgaagatgctgatgactatgaataataaataattatcctgaggaga

SEQ ID NO: 352 - DNA, 3884 bp, Homo sapiens
  source 1..3884: mol_type = genomic DNA
  misc_feature 1..3884: note = cDNA of KCNH2 gene SNP c.1905C>G (p.Asn635Lys)
atgccggtgcggaggggccacgtcgcgccgcagaacaccttcctggacaccatcatccgcaagtttgagggccagagccgtaagttcatcatcgccaacgctcgggtggagaactgcgccgtcatctactgcaacgacggcttctgcgagctgtgcggctactcgcgggccgaggtgatgcagcgaccctgcacctgcgacttcctgcacgggccgcgcacgcagcgccgcgctgccgcgcagatcgcgcaggcactgctgggcgccgaggagcgcaaagtggaaatcgccttctaccggaaagatgggagctgcttcctatgtctggtggatgtggtgcccgtgaagaacgaggatggggctgtcatcatgttcatcctcaatttcgaggtggtgatggagaaggacatggtggggtccccggctcatgacaccaaccaccggggcccccccaccagctggctggccccaggccgcgccaagaccttccgcctgaagctgcccgcgctgctggcgctgacggcccgggagtcgtcggtgcggtcgggcggcgcgggcggcgcgggcgccccgggggccgtggtggtggacgtggacctgacgcccgcggcacccagcagcgagtcgctggccctggacgaagtgacagccatggacaaccacgtggcagggctcgggcccgcggaggagcggcgtgcgctggtgggtcccggctctccgccccgcagcgcgcccggccagctcccatcgccccgggcgcacagcctcaaccccgacgcctcgggctccagctgcagcctggcccggacgcgctcccgagaaagctgcgccagcgtgcgccgcgcctcgtcggccgacgacatcgaggccatgcgcgccggggtgctgcccccgccaccgcgccacgccagcaccggggccatgcacccactgcgcagcggcttgctcaactccacctcggactccgacctcgtgcgctaccgcaccattagcaagattccccaaatcaccctcaactttgtggacctcaagggcgaccccttcttggcttcgcccaccagtgaccgtgagatcatagcacctaagataaaggagcgaacccacaatgtcactgagaaggtcacccaggtcctgtccctgggcgccgacgtgctgcctgagtacaagctgcaggcaccgcgcatccaccgctggaccatcctgcattacagccccttcaaggccgtgtgggactggctcatcctgctgctggtcatctacacggctgtcttcacaccctactcggctgccttcctgctgaaggagacggaagaaggcccgcctgctaccgagtgtggctacgcctgccagccgctggctgtggtggacctcatcgtggacatcatgttcattgtggacatcctcatcaacttccgcaccacctacgtcaatgccaacgaggaggtggtcagccaccccggccgcatcgccgtccactacttcaagggctggttcctcatcgacatggtggccgccatccccttcgacctgctcatcttcggctctggctctgaggagctgatcgggctgctgaagactgcgcggctgctgcggctggtgcgcgtggcgcggaagctggatcgctactcagagtacggcgcggccgtgctgttcttgctcatgtgcacctttgcgctcatcgcgcactggctagcctgcatctggtacgccatcggcaacatggagcagccacacatggactcacgcatcggctggctgcacaacctgggcgaccagataggcaaaccctacaacagcagcggcctgggcggcccctccatcaaggacaagtatgtgacggcgctctacttcaccttcagcagcctcaccagtgtgggcttcggcaacgtctctcccaacaccaagtcagagaagatcttctccatctgcgtcatgctcattggctccctcatgtatgctagcatcttcggcaacgtgtcggccatcatccagcggctgtactcgggcacagcccgctaccacacacagatgctgcgggtgcgggagttcatccgcttccaccagatccccaatcccctgcgccagcgcctcgaggagtacttccagcacgcctggtcctacaccaacggcatcgacatgaacgcggtgctgaagggcttccctgagtgcctgcaggctgacatctgcctgcacctgaaccgctcactgctgcagcactgcaaacccttccgaggggccaccaagggctgccttcgggccctggccatgaagttcaagaccacacatgcaccgccaggggacacactggtgcatgctggggacctgctcaccgccctgtacttcatctcccggggctccatcgagatcctgcggggcgacgtcgtcgtggccatcctggggaagaatgacatctttggggagcctctgaacctgtatgcaaggcctggcaagtcgaacggggatgtgcgggccctcacctactgtgacctacacaagatccatcgggacgacctgctggaggtgctggacatgtaccctgagttctccgaccacttctggtccagcctggagatcaccttcaacctgcgagataccaacatgatcccgggctcccccggcagtacggagttagagggtggcttcagtcggcaacgcaagcgcaagttgtccttccgcaggcgcacggacaaggacacggagcagccaggggaggtgtcggccttggggccgggccgggcgggggcagggccgagtagccggggccggccgggggggccgtggggggagagcccgtccagtggcccctccagccctgagagcagtgaggatgagggcccaggccgcagctccagccccctccgcctggtgcccttctccagccccaggccccccggagagccgccgggtggggagcccctgatggaggactgcgagaagagcagcgacacttgcaaccccctgtcaggcgccttctcaggagtgtccaacattttcagcttctggggggacagtcggggccgccagtaccaggagctccctcgatgccccgcccccacccccagcctcctcaacatccccctctccagcccgggtcggcggccccggggcgacgtggagagcaggctggatgccctccagcgccagctcaacaggctggagacccggctgagtgcagacatggccactgtcctgcagctgctacagaggcagatgacgctggtcccgcccgcctacagtgctgtgaccaccccggggcctggccccacttccacatccccgctgttgcccgtcagccccctccccaccctcaccttggactcgctttctcaggtttcccagttcatggcgtgtgaggagctgcccccgggggccccagagcttccccaagaaggccccacacgacgcctctccctaccgggccagctgggggccctcacctcccagcccctgcacagacacggctcggacccgggcagttagtggggctgcccagtgtggacacgtggctcacccagggatcaaggcgctgctgggccgctccccttggaggccctgctcaggaggccctgaccgtggaaggggagaggaactcgaaagcacagctcctcccccagcccttgggaccatcttctcctgcagtcccctgggccccagtgagaggggcaggggcagggccggcagtaggtggggcctgtggtccccccactgccctgagggcattagctggtctaactgcccggaggcacccggccctgggccttaggcacctcaaggacttttctgctatttactgctcttattgttaaggataataattaaggatcatatgaataattaatgaagatgctgatgactatgaataataaataattatcctgaggaga

SEQ ID NO: 353 - DNA, 3884 bp, Homo sapiens
  source 1..3884: mol_type = genomic DNA
  misc_feature 1..3884: note = cDNA of KCNH2 gene SNP c.1907C>T (p.Ser636Leu)
atgccggtgcggaggggccacgtcgcgccgcagaacaccttcctggacaccatcatccgcaagtttgagggccagagccgtaagttcatcatcgccaacgctcgggtggagaactgcgccgtcatctactgcaacgacggcttctgcgagctgtgcggctactcgcgggccgaggtgatgcagcgaccctgcacctgcgacttcctgcacgggccgcgcacgcagcgccgcgctgccgcgcagatcgcgcaggcactgctgggcgccgaggagcgcaaagtggaaatcgccttctaccggaaagatgggagctgcttcctatgtctggtggatgtggtgcccgtgaagaacgaggatggggctgtcatcatgttcatcctcaatttcgaggtggtgatggagaaggacatggtggggtccccggctcatgacaccaaccaccggggcccccccaccagctggctggccccaggccgcgccaagaccttccgcctgaagctgcccgcgctgctggcgctgacggcccgggagtcgtcggtgcggtcgggcggcgcgggcggcgcgggcgccccgggggccgtggtggtggacgtggacctgacgcccgcggcacccagcagcgagtcgctggccctggacgaagtgacagccatggacaaccacgtggcagggctcgggcccgcggaggagcggcgtgcgctggtgggtcccggctctccgccccgcagcgcgcccggccagctcccatcgccccgggcgcacagcctcaaccccgacgcctcgggctccagctgcagcctggcccggacgcgctcccgagaaagctgcgccagcgtgcgccgcgcctcgtcggccgacgacatcgaggccatgcgcgccggggtgctgcccccgccaccgcgccacgccagcaccggggccatgcacccactgcgcagcggcttgctcaactccacctcggactccgacctcgtgcgctaccgcaccattagcaagattccccaaatcaccctcaactttgtggacctcaagggcgaccccttcttggcttcgcccaccagtgaccgtgagatcatagcacctaagataaaggagcgaacccacaatgtcactgagaaggtcacccaggtcctgtccctgggcgccgacgtgctgcctgagtacaagctgcaggcaccgcgcatccaccgctggaccatcctgcattacagccccttcaaggccgtgtgggactggctcatcctgctgctggtcatctacacggctgtcttcacaccctactcggctgccttcctgctgaaggagacggaagaaggcccgcctgctaccgagtgtggctacgcctgccagccgctggctgtggtggacctcatcgtggacatcatgttcattgtggacatcctcatcaacttccgcaccacctacgtcaatgccaacgaggaggtggtcagccaccccggccgcatcgccgtccactacttcaagggctggttcctcatcgacatggtggccgccatccccttcgacctgctcatcttcggctctggctctgaggagctgatcgggctgctgaagactgcgcggctgctgcggctggtgcgcgtggcgcggaagctggatcgctactcagagtacggcgcggccgtgctgttcttgctcatgtgcacctttgcgctcatcgcgcactggctagcctgcatctggtacgccatcggcaacatggagcagccacacatggactcacgcatcggctggctgcacaacctgggcgaccagataggcaaaccctacaacagcagcggcctgggcggcccctccatcaaggacaagtatgtgacggcgctctacttcaccttcagcagcctcaccagtgtgggcttcggcaacgtctctcccaacaccaacttagagaagatcttctccatctgcgtcatgctcattggctccctcatgtatgctagcatcttcggcaacgtgtcggccatcatccagcggctgtactcgggcacagcccgctaccacacacagatgctgcgggtgcgggagttcatccgcttccaccagatccccaatcccctgcgccagcgcctcgaggagtacttccagcacgcctggtcctacaccaacggcatcgacatgaacgcggtgctgaagggcttccctgagtgcctgcaggctgacatctgcctgcacctgaaccgctcactgctgcagcactgcaaacccttccgaggggccaccaagggctgccttcgggccctggccatgaagttcaagaccacacatgcaccgccaggggacacactggtgcatgctggggacctgctcaccgccctgtacttcatctcccggggctccatcgagatcctgcggggcgacgtcgtcgtggccatcctggggaagaatgacatctttggggagcctctgaacctgtatgcaaggcctggcaagtcgaacggggatgtgcgggccctcacctactgtgacctacacaagatccatcgggacgacctgctggaggtgctggacatgtaccctgagttctccgaccacttctggtccagcctggagatcaccttcaacctgcgagataccaacatgatcccgggctcccccggcagtacggagttagagggtggcttcagtcggcaacgcaagcgcaagttgtccttccgcaggcgcacggacaaggacacggagcagccaggggaggtgtcggccttggggccgggccgggcgggggcagggccgagtagccggggccggccgggggggccgtggggggagagcccgtccagtggcccctccagccctgagagcagtgaggatgagggcccaggccgcagctccagccccctccgcctggtgcccttctccagccccaggccccccggagagccgccgggtggggagcccctgatggaggactgcgagaagagcagcgacacttgcaaccccctgtcaggcgccttctcaggagtgtccaacattttcagcttctggggggacagtcggggccgccagtaccaggagctccctcgatgccccgcccccacccccagcctcctcaacatccccctctccagcccgggtcggcggccccggggcgacgtggagagcaggctggatgccctccagcgccagctcaacaggctggagacccggctgagtgcagacatggccactgtcctgcagctgctacagaggcagatgacgctggtcccgcccgcctacagtgctgtgaccaccccggggcctggccccacttccacatccccgctgttgcccgtcagccccctccccaccctcaccttggactcgctttctcaggtttcccagttcatggcgtgtgaggagctgcccccgggggccccagagcttccccaagaaggccccacacgacgcctctccctaccgggccagctgggggccctcacctcccagcccctgcacagacacggctcggacccgggcagttagtggggctgcccagtgtggacacgtggctcacccagggatcaaggcgctgctgggccgctccccttggaggccctgctcaggaggccctgaccgtggaaggggagaggaactcgaaagcacagctcctcccccagcccttgggaccatcttctcctgcagtcccctgggccccagtgagaggggcaggggcagggccggcagtaggtggggcctgtggtccccccactgccctgagggcattagctggtctaactgcccggaggcacccggccctgggccttaggcacctcaaggacttttctgctatttactgctcttattgttaaggataataattaaggatcatatgaataattaatgaagatgctgatgactatgaataataaataattatcctgaggaga

SEQ ID NO: 354 - DNA, 3884 bp, Homo sapiens
  source 1..3884: mol_type = genomic DNA
  misc_feature 1..3884: note = cDNA of KCNH2 gene SNP c.1909G>A (p.Glu637Lys)
atgccggtgcggaggggccacgtcgcgccgcagaacaccttcctggacaccatcatccgcaagtttgagggccagagccgtaagttcatcatcgccaacgctcgggtggagaactgcgccgtcatctactgcaacgacggcttctgcgagctgtgcggctactcgcgggccgaggtgatgcagcgaccctgcacctgcgacttcctgcacgggccgcgcacgcagcgccgcgctgccgcgcagatcgcgcaggcactgctgggcgccgaggagcgcaaagtggaaatcgccttctaccggaaagatgggagctgcttcctatgtctggtggatgtggtgcccgtgaagaacgaggatggggctgtcatcatgttcatcctcaatttcgaggtggtgatggagaaggacatggtggggtccccggctcatgacaccaaccaccggggcccccccaccagctggctggccccaggccgcgccaagaccttccgcctgaagctgcccgcgctgctggcgctgacggcccgggagtcgtcggtgcggtcgggcggcgcgggcggcgcgggcgccccgggggccgtggtggtggacgtggacctgacgcccgcggcacccagcagcgagtcgctggccctggacgaagtgacagccatggacaaccacgtggcagggctcgggcccgcggaggagcggcgtgcgctggtgggtcccggctctccgccccgcagcgcgcccggccagctcccatcgccccgggcgcacagcctcaaccccgacgcctcgggctccagctgcagcctggcccggacgcgctcccgagaaagctgcgccagcgtgcgccgcgcctcgtcggccgacgacatcgaggccatgcgcgccggggtgctgcccccgccaccgcgccacgccagcaccggggccatgcacccactgcgcagcggcttgctcaactccacctcggactccgacctcgtgcgctaccgcaccattagcaagattccccaaatcaccctcaactttgtggacctcaagggcgaccccttcttggcttcgcccaccagtgaccgtgagatcatagcacctaagataaaggagcgaacccacaatgtcactgagaaggtcacccaggtcctgtccctgggcgccgacgtgctgcctgagtacaagctgcaggcaccgcgcatccaccgctggaccatcctgcattacagccccttcaaggccgtgtgggactggctcatcctgctgctggtcatctacacggctgtcttcacaccctactcggctgccttcctgctgaaggagacggaagaaggcccgcctgctaccgagtgtggctacgcctgccagccgctggctgtggtggacctcatcgtggacatcatgttcattgtggacatcctcatcaacttccgcaccacctacgtcaatgccaacgaggaggtggtcagccaccccggccgcatcgccgtccactacttcaagggctggttcctcatcgacatggtggccgccatccccttcgacctgctcatcttcggctctggctctgaggagctgatcgggctgctgaagactgcgcggctgctgcggctggtgcgcgtggcgcggaagctggatcgctactcagagtacggcgcggccgtgctgttcttgctcatgtgcacctttgcgctcatcgcgcactggctagcctgcatctggtacgccatcggcaacatggagcagccacacatggactcacgcatcggctggctgcacaacctgggcgaccagataggcaaaccctacaacagcagcggcctgggcggcccctccatcaaggacaagtatgtgacggcgctctacttcaccttcagcagcctcaccagtgtgggcttcggcaacgtctctcccaacaccaactcaaagaagatcttctccatctgcgtcatgctcattggctccctcatgtatgctagcatcttcggcaacgtgtcggccatcatccagcggctgtactcgggcacagcccgctaccacacacagatgctgcgggtgcgggagttcatccgcttccaccagatccccaatcccctgcgccagcgcctcgaggagtacttccagcacgcctggtcctacaccaacggcatcgacatgaacgcggtgctgaagggcttccctgagtgcctgcaggctgacatctgcctgcacctgaaccgctcactgctgcagcactgcaaacccttccgaggggccaccaagggctgccttcgggccctggccatgaagttcaagaccacacatgcaccgccaggggacacactggtgcatgctggggacctgctcaccgccctgtacttcatctcccggggctccatcgagatcctgcggggcgacgtcgtcgtggccatcctggggaagaatgacatctttggggagcctctgaacctgtatgcaaggcctggcaagtcgaacggggatgtgcgggccctcacctactgtgacctacacaagatccatcgggacgacctgctggaggtgctggacatgtaccctgagttctccgaccacttctggtccagcctggagatcaccttcaacctgcgagataccaacatgatcccgggctcccccggcagtacggagttagagggtggcttcagtcggcaacgcaagcgcaagttgtccttccgcaggcgcacggacaaggacacggagcagccaggggaggtgtcggccttggggccgggccgggcgggggcagggccgagtagccggggccggccgggggggccgtggggggagagcccgtccagtggcccctccagccctgagagcagtgaggatgagggcccaggccgcagctccagccccctccgcctggtgcccttctccagccccaggccccccggagagccgccgggtggggagcccctgatggaggactgcgagaagagcagcgacacttgcaaccccctgtcaggcgccttctcaggagtgtccaacattttcagcttctggggggacagtcggggccgccagtaccaggagctccctcgatgccccgcccccacccccagcctcctcaacatccccctctccagcccgggtcggcggccccggggcgacgtggagagcaggctggatgccctccagcgccagctcaacaggctggagacccggctgagtgcagacatggccactgtcctgcagctgctacagaggcagatgacgctggtcccgcccgcctacagtgctgtgaccaccccggggcctggccccacttccacatccccgctgttgcccgtcagccccctccccaccctcaccttggactcgctttctcaggtttcccagttcatggcgtgtgaggagctgcccccgggggccccagagcttccccaagaaggccccacacgacgcctctccctaccgggccagctgggggccctcacctcccagcccctgcacagacacggctcggacccgggcagttagtggggctgcccagtgtggacacgtggctcacccagggatcaaggcgctgctgggccgctccccttggaggccctgctcaggaggccctgaccgtggaaggggagaggaactcgaaagcacagctcctcccccagcccttgggaccatcttctcctgcagtcccctgggccccagtgagaggggcaggggcagggccggcagtaggtggggcctgtggtccccccactgccctgagggcattagctggtctaactgcccggaggcacccggccctgggccttaggcacctcaaggacttttctgctatttactgctcttattgttaaggataataattaaggatcatatgaataattaatgaagatgctgatgactatgaataataaataattatcctgaggaga

SEQ ID NO: 355 - DNA, 3884 bp, Homo sapiens
  source 1..3884: mol_type = genomic DNA
  misc_feature 1..3884: note = cDNA of KCNH2 gene SNP c.1909G>T (p.Glu637Ter)
atgccggtgcggaggggccacgtcgcgccgcagaacaccttcctggacaccatcatccgcaagtttgagggccagagccgtaagttcatcatcgccaacgctcgggtggagaactgcgccgtcatctactgcaacgacggcttctgcgagctgtgcggctactcgcgggccgaggtgatgcagcgaccctgcacctgcgacttcctgcacgggccgcgcacgcagcgccgcgctgccgcgcagatcgcgcaggcactgctgggcgccgaggagcgcaaagtggaaatcgccttctaccggaaagatgggagctgcttcctatgtctggtggatgtggtgcccgtgaagaacgaggatggggctgtcatcatgttcatcctcaatttcgaggtggtgatggagaaggacatggtggggtccccggctcatgacaccaaccaccggggcccccccaccagctggctggccccaggccgcgccaagaccttccgcctgaagctgcccgcgctgctggcgctgacggcccgggagtcgtcggtgcggtcgggcggcgcgggcggcgcgggcgccccgggggccgtggtggtggacgtggacctgacgcccgcggcacccagcagcgagtcgctggccctggacgaagtgacagccatggacaaccacgtggcagggctcgggcccgcggaggagcggcgtgcgctggtgggtcccggctctccgccccgcagcgcgcccggccagctcccatcgccccgggcgcacagcctcaaccccgacgcctcgggctccagctgcagcctggcccggacgcgctcccgagaaagctgcgccagcgtgcgccgcgcctcgtcggccgacgacatcgaggccatgcgcgccggggtgctgcccccgccaccgcgccacgccagcaccggggccatgcacccactgcgcagcggcttgctcaactccacctcggactccgacctcgtgcgctaccgcaccattagcaagattccccaaatcaccctcaactttgtggacctcaagggcgaccccttcttggcttcgcccaccagtgaccgtgagatcatagcacctaagataaaggagcgaacccacaatgtcactgagaaggtcacccaggtcctgtccctgggcgccgacgtgctgcctgagtacaagctgcaggcaccgcgcatccaccgctggaccatcctgcattacagccccttcaaggccgtgtgggactggctcatcctgctgctggtcatctacacggctgtcttcacaccctactcggctgccttcctgctgaaggagacggaagaaggcccgcctgctaccgagtgtggctacgcctgccagccgctggctgtggtggacctcatcgtggacatcatgttcattgtggacatcctcatcaacttccgcaccacctacgtcaatgccaacgaggaggtggtcagccaccccggccgcatcgccgtccactacttcaagggctggttcctcatcgacatggtggccgccatccccttcgacctgctcatcttcggctctggctctgaggagctgatcgggctgctgaagactgcgcggctgctgcggctggtgcgcgtggcgcggaagctggatcgctactcagagtacggcgcggccgtgctgttcttgctcatgtgcacctttgcgctcatcgcgcactggctagcctgcatctggtacgccatcggcaacatggagcagccacacatggactcacgcatcggctggctgcacaacctgggcgaccagataggcaaaccctacaacagcagcggcctgggcggcccctccatcaaggacaagtatgtgacggcgctctacttcaccttcagcagcctcaccagtgtgggcttcggcaacgtctctcccaacaccaactcatagaagatcttctccatctgcgtcatgctcattggctccctcatgtatgctagcatcttcggcaacgtgtcggccatcatccagcggctgtactcgggcacagcccgctaccacacacagatgctgcgggtgcgggagttcatccgcttccaccagatccccaatcccctgcgccagcgcctcgaggagtacttccagcacgcctggtcctacaccaacggcatcgacatgaacgcggtgctgaagggcttccctgagtgcctgcaggctgacatctgcctgcacctgaaccgctcactgctgcagcactgcaaacccttccgaggggccaccaagggctgccttcgggccctggccatgaagttcaagaccacacatgcaccgccaggggacacactggtgcatgctggggacctgctcaccgccctgtacttcatctcccggggctccatcgagatcctgcggggcgacgtcgtcgtggccatcctggggaagaatgacatctttggggagcctctgaacctgtatgcaaggcctggcaagtcgaacggggatgtgcgggccctcacctactgtgacctacacaagatccatcgggacgacctgctggaggtgctggacatgtaccctgagttctccgaccacttctggtccagcctggagatcaccttcaacctgcgagataccaacatgatcccgggctcccccggcagtacggagttagagggtggcttcagtcggcaacgcaagcgcaagttgtccttccgcaggcgcacggacaaggacacggagcagccaggggaggtgtcggccttggggccgggccgggcgggggcagggccgagtagccggggccggccgggggggccgtggggggagagcccgtccagtggcccctccagccctgagagcagtgaggatgagggcccaggccgcagctccagccccctccgcctggtgcccttctccagccccaggccccccggagagccgccgggtggggagcccctgatggaggactgcgagaagagcagcgacacttgcaaccccctgtcaggcgccttctcaggagtgtccaacattttcagcttctggggggacagtcggggccgccagtaccaggagctccctcgatgccccgcccccacccccagcctcctcaacatccccctctccagcccgggtcggcggccccggggcgacgtggagagcaggctggatgccctccagcgccagctcaacaggctggagacccggctgagtgcagacatggccactgtcctgcagctgctacagaggcagatgacgctggtcccgcccgcctacagtgctgtgaccaccccggggcctggccccacttccacatccccgctgttgcccgtcagccccctccccaccctcaccttggactcgctttctcaggtttcccagttcatggcgtgtgaggagctgcccccgggggccccagagcttccccaagaaggccccacacgacgcctctccctaccgggccagctgggggccctcacctcccagcccctgcacagacacggctcggacccgggcagttagtggggctgcccagtgtggacacgtggctcacccagggatcaaggcgctgctgggccgctccccttggaggccctgctcaggaggccctgaccgtggaaggggagaggaactcgaaagcacagctcctcccccagcccttgggaccatcttctcctgcagtcccctgggccccagtgagaggggcaggggcagggccggcagtaggtggggcctgtggtccccccactgccctgagggcattagctggtctaactgcccggaggcacccggccctgggccttaggcacctcaaggacttttctgctatttactgctcttattgttaaggataataattaaggatcatatgaataattaatgaagatgctgatgactatgaataataaataattatcctgaggaga

SEQ ID NO: 356 - DNA, 3884 bp, Homo sapiens
  source 1..3884: mol_type = genomic DNA
  misc_feature 1..3884: note = cDNA of KCNH2 gene SNP c.1910A>G (p.Glu637Gly)
atgccggtgcggaggggccacgtcgcgccgcagaacaccttcctggacaccatcatccgcaagtttgagggccagagccgtaagttcatcatcgccaacgctcgggtggagaactgcgccgtcatctactgcaacgacggcttctgcgagctgtgcggctactcgcgggccgaggtgatgcagcgaccctgcacctgcgacttcctgcacgggccgcgcacgcagcgccgcgctgccgcgcagatcgcgcaggcactgctgggcgccgaggagcgcaaagtggaaatcgccttctaccggaaagatgggagctgcttcctatgtctggtggatgtggtgcccgtgaagaacgaggatggggctgtcatcatgttcatcctcaatttcgaggtggtgatggagaaggacatggtggggtccccggctcatgacaccaaccaccggggcccccccaccagctggctggccccaggccgcgccaagaccttccgcctgaagctgcccgcgctgctggcgctgacggcccgggagtcgtcggtgcggtcgggcggcgcgggcggcgcgggcgccccgggggccgtggtggtggacgtggacctgacgcccgcggcacccagcagcgagtcgctggccctggacgaagtgacagccatggacaaccacgtggcagggctcgggcccgcggaggagcggcgtgcgctggtgggtcccggctctccgccccgcagcgcgcccggccagctcccatcgccccgggcgcacagcctcaaccccgacgcctcgggctccagctgcagcctggcccggacgcgctcccgagaaagctgcgccagcgtgcgccgcgcctcgtcggccgacgacatcgaggccatgcgcgccggggtgctgcccccgccaccgcgccacgccagcaccggggccatgcacccactgcgcagcggcttgctcaactccacctcggactccgacctcgtgcgctaccgcaccattagcaagattccccaaatcaccctcaactttgtggacctcaagggcgaccccttcttggcttcgcccaccagtgaccgtgagatcatagcacctaagataaaggagcgaacccacaatgtcactgagaaggtcacccaggtcctgtccctgggcgccgacgtgctgcctgagtacaagctgcaggcaccgcgcatccaccgctggaccatcctgcattacagccccttcaaggccgtgtgggactggctcatcctgctgctggtcatctacacggctgtcttcacaccctactcggctgccttcctgctgaaggagacggaagaaggcccgcctgctaccgagtgtggctacgcctgccagccgctggctgtggtggacctcatcgtggacatcatgttcattgtggacatcctcatcaacttccgcaccacctacgtcaatgccaacgaggaggtggtcagccaccccggccgcatcgccgtccactacttcaagggctggttcctcatcgacatggtggccgccatccccttcgacctgctcatcttcggctctggctctgaggagctgatcgggctgctgaagactgcgcggctgctgcggctggtgcgcgtggcgcggaagctggatcgctactcagagtacggcgcggccgtgctgttcttgctcatgtgcacctttgcgctcatcgcgcactggctagcctgcatctggtacgccatcggcaacatggagcagccacacatggactcacgcatcggctggctgcacaacctgggcgaccagataggcaaaccctacaacagcagcggcctgggcggcccctccatcaaggacaagtatgtgacggcgctctacttcaccttcagcagcctcaccagtgtgggcttcggcaacgtctctcccaacaccaactcagggaagatcttctccatctgcgtcatgctcattggctccctcatgtatgctagcatcttcggcaacgtgtcggccatcatccagcggctgtactcgggcacagcccgctaccacacacagatgctgcgggtgcgggagttcatccgcttccaccagatccccaatcccctgcgccagcgcctcgaggagtacttccagcacgcctggtcctacaccaacggcatcgacatgaacgcggtgctgaagggcttccctgagtgcctgcaggctgacatctgcctgcacctgaaccgctcactgctgcagcactgcaaacccttccgaggggccaccaagggctgccttcgggccctggccatgaagttcaagaccacacatgcaccgccaggggacacactggtgcatgctggggacctgctcaccgccctgtacttcatctcccggggctccatcgagatcctgcggggcgacgtcgtcgtggccatcctggggaagaatgacatctttggggagcctctgaacctgtatgcaaggcctggcaagtcgaacggggatgtgcgggccctcacctactgtgacctacacaagatccatcgggacgacctgctggaggtgctggacatgtaccctgagttctccgaccacttctggtccagcctggagatcaccttcaacctgcgagataccaacatgatcccgggctcccccggcagtacggagttagagggtggcttcagtcggcaacgcaagcgcaagttgtccttccgcaggcgcacggacaaggacacggagcagccaggggaggtgtcggccttggggccgggccgggcgggggcagggccgagtagccggggccggccgggggggccgtggggggagagcccgtccagtggcccctccagccctgagagcagtgaggatgagggcccaggccgcagctccagccccctccgcctggtgcccttctccagccccaggccccccggagagccgccgggtggggagcccctgatggaggactgcgagaagagcagcgacacttgcaaccccctgtcaggcgccttctcaggagtgtccaacattttcagcttctggggggacagtcggggccgccagtaccaggagctccctcgatgccccgcccccacccccagcctcctcaacatccccctctccagcccgggtcggcggccccggggcgacgtggagagcaggctggatgccctccagcgccagctcaacaggctggagacccggctgagtgcagacatggccactgtcctgcagctgctacagaggcagatgacgctggtcccgcccgcctacagtgctgtgaccaccccggggcctggccccacttccacatccccgctgttgcccgtcagccccctccccaccctcaccttggactcgctttctcaggtttcccagttcatggcgtgtgaggagctgcccccgggggccccagagcttccccaagaaggccccacacgacgcctctccctaccgggccagctgggggccctcacctcccagcccctgcacagacacggctcggacccgggcagttagtggggctgcccagtgtggacacgtggctcacccagggatcaaggcgctgctgggccgctccccttggaggccctgctcaggaggccctgaccgtggaaggggagaggaactcgaaagcacagctcctcccccagcccttgggaccatcttctcctgcagtcccctgggccccagtgagaggggcaggggcagggccggcagtaggtggggcctgtggtccccccactgccctgagggcattagctggtctaactgcccggaggcacccggccctgggccttaggcacctcaaggacttttctgctatttactgctcttattgttaaggataataattaaggatcatatgaataattaatgaagatgctgatgactatgaataataaataattatcctgaggaga

SEQ ID NO: 357 - DNA, 3884 bp, Homo sapiens
  source 1..3884: mol_type = genomic DNA
  misc_feature 1..3884: note = cDNA of KCNH2 gene SNP c.1911G>C (p.Glu637Asp)
atgccggtgcggaggggccacgtcgcgccgcagaacaccttcctggacaccatcatccgcaagtttgagggccagagccgtaagttcatcatcgccaacgctcgggtggagaactgcgccgtcatctactgcaacgacggcttctgcgagctgtgcggctactcgcgggccgaggtgatgcagcgaccctgcacctgcgacttcctgcacgggccgcgcacgcagcgccgcgctgccgcgcagatcgcgcaggcactgctgggcgccgaggagcgcaaagtggaaatcgccttctaccggaaagatgggagctgcttcctatgtctggtggatgtggtgcccgtgaagaacgaggatggggctgtcatcatgttcatcctcaatttcgaggtggtgatggagaaggacatggtggggtccccggctcatgacaccaaccaccggggcccccccaccagctggctggccccaggccgcgccaagaccttccgcctgaagctgcccgcgctgctggcgctgacggcccgggagtcgtcggtgcggtcgggcggcgcgggcggcgcgggcgccccgggggccgtggtggtggacgtggacctgacgcccgcggcacccagcagcgagtcgctggccctggacgaagtgacagccatggacaaccacgtggcagggctcgggcccgcggaggagcggcgtgcgctggtgggtcccggctctccgccccgcagcgcgcccggccagctcccatcgccccgggcgcacagcctcaaccccgacgcctcgggctccagctgcagcctggcccggacgcgctcccgagaaagctgcgccagcgtgcgccgcgcctcgtcggccgacgacatcgaggccatgcgcgccggggtgctgcccccgccaccgcgccacgccagcaccggggccatgcacccactgcgcagcggcttgctcaactccacctcggactccgacctcgtgcgctaccgcaccattagcaagattccccaaatcaccctcaactttgtggacctcaagggcgaccccttcttggcttcgcccaccagtgaccgtgagatcatagcacctaagataaaggagcgaacccacaatgtcactgagaaggtcacccaggtcctgtccctgggcgccgacgtgctgcctgagtacaagctgcaggcaccgcgcatccaccgctggaccatcctgcattacagccccttcaaggccgtgtgggactggctcatcctgctgctggtcatctacacggctgtcttcacaccctactcggctgccttcctgctgaaggagacggaagaaggcccgcctgctaccgagtgtggctacgcctgccagccgctggctgtggtggacctcatcgtggacatcatgttcattgtggacatcctcatcaacttccgcaccacctacgtcaatgccaacgaggaggtggtcagccaccccggccgcatcgccgtccactacttcaagggctggttcctcatcgacatggtggccgccatccccttcgacctgctcatcttcggctctggctctgaggagctgatcgggctgctgaagactgcgcggctgctgcggctggtgcgcgtggcgcggaagctggatcgctactcagagtacggcgcggccgtgctgttcttgctcatgtgcacctttgcgctcatcgcgcactggctagcctgcatctggtacgccatcggcaacatggagcagccacacatggactcacgcatcggctggctgcacaacctgggcgaccagataggcaaaccctacaacagcagcggcctgggcggcccctccatcaaggacaagtatgtgacggcgctctacttcaccttcagcagcctcaccagtgtgggcttcggcaacgtctctcccaacaccaactcagacaagatcttctccatctgcgtcatgctcattggctccctcatgtatgctagcatcttcggcaacgtgtcggccatcatccagcggctgtactcgggcacagcccgctaccacacacagatgctgcgggtgcgggagttcatccgcttccaccagatccccaatcccctgcgccagcgcctcgaggagtacttccagcacgcctggtcctacaccaacggcatcgacatgaacgcggtgctgaagggcttccctgagtgcctgcaggctgacatctgcctgcacctgaaccgctcactgctgcagcactgcaaacccttccgaggggccaccaagggctgccttcgggccctggccatgaagttcaagaccacacatgcaccgccaggggacacactggtgcatgctggggacctgctcaccgccctgtacttcatctcccggggctccatcgagatcctgcggggcgacgtcgtcgtggccatcctggggaagaatgacatctttggggagcctctgaacctgtatgcaaggcctggcaagtcgaacggggatgtgcgggccctcacctactgtgacctacacaagatccatcgggacgacctgctggaggtgctggacatgtaccctgagttctccgaccacttctggtccagcctggagatcaccttcaacctgcgagataccaacatgatcccgggctcccccggcagtacggagttagagggtggcttcagtcggcaacgcaagcgcaagttgtccttccgcaggcgcacggacaaggacacggagcagccaggggaggtgtcggccttggggccgggccgggcgggggcagggccgagtagccggggccggccgggggggccgtggggggagagcccgtccagtggcccctccagccctgagagcagtgaggatgagggcccaggccgcagctccagccccctccgcctggtgcccttctccagccccaggccccccggagagccgccgggtggggagcccctgatggaggactgcgagaagagcagcgacacttgcaaccccctgtcaggcgccttctcaggagtgtccaacattttcagcttctggggggacagtcggggccgccagtaccaggagctccctcgatgccccgcccccacccccagcctcctcaacatccccctctccagcccgggtcggcggccccggggcgacgtggagagcaggctggatgccctccagcgccagctcaacaggctggagacccggctgagtgcagacatggccactgtcctgcagctgctacagaggcagatgacgctggtcccgcccgcctacagtgctgtgaccaccccggggcctggccccacttccacatccccgctgttgcccgtcagccccctccccaccctcaccttggactcgctttctcaggtttcccagttcatggcgtgtgaggagctgcccccgggggccccagagcttccccaagaaggccccacacgacgcctctccctaccgggccagctgggggccctcacctcccagcccctgcacagacacggctcggacccgggcagttagtggggctgcccagtgtggacacgtggctcacccagggatcaaggcgctgctgggccgctccccttggaggccctgctcaggaggccctgaccgtggaaggggagaggaactcgaaagcacagctcctcccccagcccttgggaccatcttctcctgcagtcccctgggccccagtgagaggggcaggggcagggccggcagtaggtggggcctgtggtccccccactgccctgagggcattagctggtctaactgcccggaggcacccggccctgggccttaggcacctcaaggacttttctgctatttactgctcttattgttaaggataataattaaggatcatatgaataattaatgaagatgctgatgactatgaataataaataattatcctgaggaga

SEQ ID NO: 358 - DNA, 3884 bp, Homo sapiens
  source 1..3884: mol_type = genomic DNA
  misc_feature 1..3884: note = cDNA of KCNH2 gene SNP c.1912A>G (p.Lys638Glu)
atgccggtgcggaggggccacgtcgcgccgcagaacaccttcctggacaccatcatccgcaagtttgagggccagagccgtaagttcatcatcgccaacgctcgggtggagaactgcgccgtcatctactgcaacgacggcttctgcgagctgtgcggctactcgcgggccgaggtgatgcagcgaccctgcacctgcgacttcctgcacgggccgcgcacgcagcgccgcgctgccgcgcagatcgcgcaggcactgctgggcgccgaggagcgcaaagtggaaatcgccttctaccggaaagatgggagctgcttcctatgtctggtggatgtggtgcccgtgaagaacgaggatggggctgtcatcatgttcatcctcaatttcgaggtggtgatggagaaggacatggtggggtccccggctcatgacaccaaccaccggggcccccccaccagctggctggccccaggccgcgccaagaccttccgcctgaagctgcccgcgctgctggcgctgacggcccgggagtcgtcggtgcggtcgggcggcgcgggcggcgcgggcgccccgggggccgtggtggtggacgtggacctgacgcccgcggcacccagcagcgagtcgctggccctggacgaagtgacagccatggacaaccacgtggcagggctcgggcccgcggaggagcggcgtgcgctggtgggtcccggctctccgccccgcagcgcgcccggccagctcccatcgccccgggcgcacagcctcaaccccgacgcctcgggctccagctgcagcctggcccggacgcgctcccgagaaagctgcgccagcgtgcgccgcgcctcgtcggccgacgacatcgaggccatgcgcgccggggtgctgcccccgccaccgcgccacgccagcaccggggccatgcacccactgcgcagcggcttgctcaactccacctcggactccgacctcgtgcgctaccgcaccattagcaagattccccaaatcaccctcaactttgtggacctcaagggcgaccccttcttggcttcgcccaccagtgaccgtgagatcatagcacctaagataaaggagcgaacccacaatgtcactgagaaggtcacccaggtcctgtccctgggcgccgacgtgctgcctgagtacaagctgcaggcaccgcgcatccaccgctggaccatcctgcattacagccccttcaaggccgtgtgggactggctcatcctgctgctggtcatctacacggctgtcttcacaccctactcggctgccttcctgctgaaggagacggaagaaggcccgcctgctaccgagtgtggctacgcctgccagccgctggctgtggtggacctcatcgtggacatcatgttcattgtggacatcctcatcaacttccgcaccacctacgtcaatgccaacgaggaggtggtcagccaccccggccgcatcgccgtccactacttcaagggctggttcctcatcgacatggtggccgccatccccttcgacctgctcatcttcggctctggctctgaggagctgatcgggctgctgaagactgcgcggctgctgcggctggtgcgcgtggcgcggaagctggatcgctactcagagtacggcgcggccgtgctgttcttgctcatgtgcacctttgcgctcatcgcgcactggctagcctgcatctggtacgccatcggcaacatggagcagccacacatggactcacgcatcggctggctgcacaacctgggcgaccagataggcaaaccctacaacagcagcggcctgggcggcccctccatcaaggacaagtatgtgacggcgctctacttcaccttcagcagcctcaccagtgtgggcttcggcaacgtctctcccaacaccaactcagaggagatcttctccatctgcgtcatgctcattggctccctcatgtatgctagcatcttcggcaacgtgtcggccatcatccagcggctgtactcgggcacagcccgctaccacacacagatgctgcgggtgcgggagttcatccgcttccaccagatccccaatcccctgcgccagcgcctcgaggagtacttccagcacgcctggtcctacaccaacggcatcgacatgaacgcggtgctgaagggcttccctgagtgcctgcaggctgacatctgcctgcacctgaaccgctcactgctgcagcactgcaaacccttccgaggggccaccaagggctgccttcgggccctggccatgaagttcaagaccacacatgcaccgccaggggacacactggtgcatgctggggacctgctcaccgccctgtacttcatctcccggggctccatcgagatcctgcggggcgacgtcgtcgtggccatcctggggaagaatgacatctttggggagcctctgaacctgtatgcaaggcctggcaagtcgaacggggatgtgcgggccctcacctactgtgacctacacaagatccatcgggacgacctgctggaggtgctggacatgtaccctgagttctccgaccacttctggtccagcctggagatcaccttcaacctgcgagataccaacatgatcccgggctcccccggcagtacggagttagagggtggcttcagtcggcaacgcaagcgcaagttgtccttccgcaggcgcacggacaaggacacggagcagccaggggaggtgtcggccttggggccgggccgggcgggggcagggccgagtagccggggccggccgggggggccgtggggggagagcccgtccagtggcccctccagccctgagagcagtgaggatgagggcccaggccgcagctccagccccctccgcctggtgcccttctccagccccaggccccccggagagccgccgggtggggagcccctgatggaggactgcgagaagagcagcgacacttgcaaccccctgtcaggcgccttctcaggagtgtccaacattttcagcttctggggggacagtcggggccgccagtaccaggagctccctcgatgccccgcccccacccccagcctcctcaacatccccctctccagcccgggtcggcggccccggggcgacgtggagagcaggctggatgccctccagcgccagctcaacaggctggagacccggctgagtgcagacatggccactgtcctgcagctgctacagaggcagatgacgctggtcccgcccgcctacagtgctgtgaccaccccggggcctggccccacttccacatccccgctgttgcccgtcagccccctccccaccctcaccttggactcgctttctcaggtttcccagttcatggcgtgtgaggagctgcccccgggggccccagagcttccccaagaaggccccacacgacgcctctccctaccgggccagctgggggccctcacctcccagcccctgcacagacacggctcggacccgggcagttagtggggctgcccagtgtggacacgtggctcacccagggatcaaggcgctgctgggccgctccccttggaggccctgctcaggaggccctgaccgtggaaggggagaggaactcgaaagcacagctcctcccccagcccttgggaccatcttctcctgcagtcccctgggccccagtgagaggggcaggggcagggccggcagtaggtggggcctgtggtccccccactgccctgagggcattagctggtctaactgcccggaggcacccggccctgggccttaggcacctcaaggacttttctgctatttactgctcttattgttaaggataataattaaggatcatatgaataattaatgaagatgctgatgactatgaataataaataattatcctgaggaga

SEQ ID NO: 359 - DNA, 3884 bp, Homo sapiens
  source 1..3884: mol_type = genomic DNA
  misc_feature 1..3884: note = cDNA of KCNH2 gene SNP c.1913A>G (p.Lys638Arg)
atgccggtgcggaggggccacgtcgcgccgcagaacaccttcctggacaccatcatccgcaagtttgagggccagagccgtaagttcatcatcgccaacgctcgggtggagaactgcgccgtcatctactgcaacgacggcttctgcgagctgtgcggctactcgcgggccgaggtgatgcagcgaccctgcacctgcgacttcctgcacgggccgcgcacgcagcgccgcgctgccgcgcagatcgcgcaggcactgctgggcgccgaggagcgcaaagtggaaatcgccttctaccggaaagatgggagctgcttcctatgtctggtggatgtggtgcccgtgaagaacgaggatggggctgtcatcatgttcatcctcaatttcgaggtggtgatggagaaggacatggtggggtccccggctcatgacaccaaccaccggggcccccccaccagctggctggccccaggccgcgccaagaccttccgcctgaagctgcccgcgctgctggcgctgacggcccgggagtcgtcggtgcggtcgggcggcgcgggcggcgcgggcgccccgggggccgtggtggtggacgtggacctgacgcccgcggcacccagcagcgagtcgctggccctggacgaagtgacagccatggacaaccacgtggcagggctcgggcccgcggaggagcggcgtgcgctggtgggtcccggctctccgccccgcagcgcgcccggccagctcccatcgccccgggcgcacagcctcaaccccgacgcctcgggctccagctgcagcctggcccggacgcgctcccgagaaagctgcgccagcgtgcgccgcgcctcgtcggccgacgacatcgaggccatgcgcgccggggtgctgcccccgccaccgcgccacgccagcaccggggccatgcacccactgcgcagcggcttgctcaactccacctcggactccgacctcgtgcgctaccgcaccattagcaagattccccaaatcaccctcaactttgtggacctcaagggcgaccccttcttggcttcgcccaccagtgaccgtgagatcatagcacctaagataaaggagcgaacccacaatgtcactgagaaggtcacccaggtcctgtccctgggcgccgacgtgctgcctgagtacaagctgcaggcaccgcgcatccaccgctggaccatcctgcattacagccccttcaaggccgtgtgggactggctcatcctgctgctggtcatctacacggctgtcttcacaccctactcggctgccttcctgctgaaggagacggaagaaggcccgcctgctaccgagtgtggctacgcctgccagccgctggctgtggtggacctcatcgtggacatcatgttcattgtggacatcctcatcaacttccgcaccacctacgtcaatgccaacgaggaggtggtcagccaccccggccgcatcgccgtccactacttcaagggctggttcctcatcgacatggtggccgccatccccttcgacctgctcatcttcggctctggctctgaggagctgatcgggctgctgaagactgcgcggctgctgcggctggtgcgcgtggcgcggaagctggatcgctactcagagtacggcgcggccgtgctgttcttgctcatgtgcacctttgcgctcatcgcgcactggctagcctgcatctggtacgccatcggcaacatggagcagccacacatggactcacgcatcggctggctgcacaacctgggcgaccagataggcaaaccctacaacagcagcggcctgggcggcccctccatcaaggacaagtatgtgacggcgctctacttcaccttcagcagcctcaccagtgtgggcttcggcaacgtctctcccaacaccaactcagagaggatcttctccatctgcgtcatgctcattggctccctcatgtatgctagcatcttcggcaacgtgtcggccatcatccagcggctgtactcgggcacagcccgctaccacacacagatgctgcgggtgcgggagttcatccgcttccaccagatccccaatcccctgcgccagcgcctcgaggagtacttccagcacgcctggtcctacaccaacggcatcgacatgaacgcggtgctgaagggcttccctgagtgcctgcaggctgacatctgcctgcacctgaaccgctcactgctgcagcactgcaaacccttccgaggggccaccaagggctgccttcgggccctggccatgaagttcaagaccacacatgcaccgccaggggacacactggtgcatgctggggacctgctcaccgccctgtacttcatctcccggggctccatcgagatcctgcggggcgacgtcgtcgtggccatcctggggaagaatgacatctttggggagcctctgaacctgtatgcaaggcctggcaagtcgaacggggatgtgcgggccctcacctactgtgacctacacaagatccatcgggacgacctgctggaggtgctggacatgtaccctgagttctccgaccacttctggtccagcctggagatcaccttcaacctgcgagataccaacatgatcccgggctcccccggcagtacggagttagagggtggcttcagtcggcaacgcaagcgcaagttgtccttccgcaggcgcacggacaaggacacggagcagccaggggaggtgtcggccttggggccgggccgggcgggggcagggccgagtagccggggccggccgggggggccgtggggggagagcccgtccagtggcccctccagccctgagagcagtgaggatgagggcccaggccgcagctccagccccctccgcctggtgcccttctccagccccaggccccccggagagccgccgggtggggagcccctgatggaggactgcgagaagagcagcgacacttgcaaccccctgtcaggcgccttctcaggagtgtccaacattttcagcttctggggggacagtcggggccgccagtaccaggagctccctcgatgccccgcccccacccccagcctcctcaacatccccctctccagcccgggtcggcggccccggggcgacgtggagagcaggctggatgccctccagcgccagctcaacaggctggagacccggctgagtgcagacatggccactgtcctgcagctgctacagaggcagatgacgctggtcccgcccgcctacagtgctgtgaccaccccggggcctggccccacttccacatccccgctgttgcccgtcagccccctccccaccctcaccttggactcgctttctcaggtttcccagttcatggcgtgtgaggagctgcccccgggggccccagagcttccccaagaaggccccacacgacgcctctccctaccgggccagctgggggccctcacctcccagcccctgcacagacacggctcggacccgggcagttagtggggctgcccagtgtggacacgtggctcacccagggatcaaggcgctgctgggccgctccccttggaggccctgctcaggaggccctgaccgtggaaggggagaggaactcgaaagcacagctcctcccccagcccttgggaccatcttctcctgcagtcccctgggccccagtgagaggggcaggggcagggccggcagtaggtggggcctgtggtccccccactgccctgagggcattagctggtctaactgcccggaggcacccggccctgggccttaggcacctcaaggacttttctgctatttactgctcttattgttaaggataataattaaggatcatatgaataattaatgaagatgctgatgactatgaataataaataattatcctgaggaga

SEQ ID NO: 360 - DNA, 3884 bp, Homo sapiens
  source 1..3884: mol_type = genomic DNA
  misc_feature 1..3884: note = cDNA of KCNH2 gene SNP c.1914G>T (p.Lys638Asn)
atgccggtgcggaggggccacgtcgcgccgcagaacaccttcctggacaccatcatccgcaagtttgagggccagagccgtaagttcatcatcgccaacgctcgggtggagaactgcgccgtcatctactgcaacgacggcttctgcgagctgtgcggctactcgcgggccgaggtgatgcagcgaccctgcacctgcgacttcctgcacgggccgcgcacgcagcgccgcgctgccgcgcagatcgcgcaggcactgctgggcgccgaggagcgcaaagtggaaatcgccttctaccggaaagatgggagctgcttcctatgtctggtggatgtggtgcccgtgaagaacgaggatggggctgtcatcatgttcatcctcaatttcgaggtggtgatggagaaggacatggtggggtccccggctcatgacaccaaccaccggggcccccccaccagctggctggccccaggccgcgccaagaccttccgcctgaagctgcccgcgctgctggcgctgacggcccgggagtcgtcggtgcggtcgggcggcgcgggcggcgcgggcgccccgggggccgtggtggtggacgtggacctgacgcccgcggcacccagcagcgagtcgctggccctggacgaagtgacagccatggacaaccacgtggcagggctcgggcccgcggaggagcggcgtgcgctggtgggtcccggctctccgccccgcagcgcgcccggccagctcccatcgccccgggcgcacagcctcaaccccgacgcctcgggctccagctgcagcctggcccggacgcgctcccgagaaagctgcgccagcgtgcgccgcgcctcgtcggccgacgacatcgaggccatgcgcgccggggtgctgcccccgccaccgcgccacgccagcaccggggccatgcacccactgcgcagcggcttgctcaactccacctcggactccgacctcgtgcgctaccgcaccattagcaagattccccaaatcaccctcaactttgtggacctcaagggcgaccccttcttggcttcgcccaccagtgaccgtgagatcatagcacctaagataaaggagcgaacccacaatgtcactgagaaggtcacccaggtcctgtccctgggcgccgacgtgctgcctgagtacaagctgcaggcaccgcgcatccaccgctggaccatcctgcattacagccccttcaaggccgtgtgggactggctcatcctgctgctggtcatctacacggctgtcttcacaccctactcggctgccttcctgctgaaggagacggaagaaggcccgcctgctaccgagtgtggctacgcctgccagccgctggctgtggtggacctcatcgtggacatcatgttcattgtggacatcctcatcaacttccgcaccacctacgtcaatgccaacgaggaggtggtcagccaccccggccgcatcgccgtccactacttcaagggctggttcctcatcgacatggtggccgccatccccttcgacctgctcatcttcggctctggctctgaggagctgatcgggctgctgaagactgcgcggctgctgcggctggtgcgcgtggcgcggaagctggatcgctactcagagtacggcgcggccgtgctgttcttgctcatgtgcacctttgcgctcatcgcgcactggctagcctgcatctggtacgccatcggcaacatggagcagccacacatggactcacgcatcggctggctgcacaacctgggcgaccagataggcaaaccctacaacagcagcggcctgggcggcccctccatcaaggacaagtatgtgacggcgctctacttcaccttcagcagcctcaccagtgtgggcttcggcaacgtctctcccaacaccaactcagagaatatcttctccatctgcgtcatgctcattggctccctcatgtatgctagcatcttcggcaacgtgtcggccatcatccagcggctgtactcgggcacagcccgctaccacacacagatgctgcgggtgcgggagttcatccgcttccaccagatccccaatcccctgcgccagcgcctcgaggagtacttccagcacgcctggtcctacaccaacggcatcgacatgaacgcggtgctgaagggcttccctgagtgcctgcaggctgacatctgcctgcacctgaaccgctcactgctgcagcactgcaaacccttccgaggggccaccaagggctgccttcgggccctggccatgaagttcaagaccacacatgcaccgccaggggacacactggtgcatgctggggacctgctcaccgccctgtacttcatctcccggggctccatcgagatcctgcggggcgacgtcgtcgtggccatcctggggaagaatgacatctttggggagcctctgaacctgtatgcaaggcctggcaagtcgaacggggatgtgcgggccctcacctactgtgacctacacaagatccatcgggacgacctgctggaggtgctggacatgtaccctgagttctccgaccacttctggtccagcctggagatcaccttcaacctgcgagataccaacatgatcccgggctcccccggcagtacggagttagagggtggcttcagtcggcaacgcaagcgcaagttgtccttccgcaggcgcacggacaaggacacggagcagccaggggaggtgtcggccttggggccgggccgggcgggggcagggccgagtagccggggccggccgggggggccgtggggggagagcccgtccagtggcccctccagccctgagagcagtgaggatgagggcccaggccgcagctccagccccctccgcctggtgcccttctccagccccaggccccccggagagccgccgggtggggagcccctgatggaggactgcgagaagagcagcgacacttgcaaccccctgtcaggcgccttctcaggagtgtccaacattttcagcttctggggggacagtcggggccgccagtaccaggagctccctcgatgccccgcccccacccccagcctcctcaacatccccctctccagcccgggtcggcggccccggggcgacgtggagagcaggctggatgccctccagcgccagctcaacaggctggagacccggctgagtgcagacatggccactgtcctgcagctgctacagaggcagatgacgctggtcccgcccgcctacagtgctgtgaccaccccggggcctggccccacttccacatccccgctgttgcccgtcagccccctccccaccctcaccttggactcgctttctcaggtttcccagttcatggcgtgtgaggagctgcccccgggggccccagagcttccccaagaaggccccacacgacgcctctccctaccgggccagctgggggccctcacctcccagcccctgcacagacacggctcggacccgggcagttagtggggctgcccagtgtggacacgtggctcacccagggatcaaggcgctgctgggccgctccccttggaggccctgctcaggaggccctgaccgtggaaggggagaggaactcgaaagcacagctcctcccccagcccttgggaccatcttctcctgcagtcccctgggccccagtgagaggggcaggggcagggccggcagtaggtggggcctgtggtccccccactgccctgagggcattagctggtctaactgcccggaggcacccggccctgggccttaggcacctcaaggacttttctgctatttactgctcttattgttaaggataataattaaggatcatatgaataattaatgaagatgctgatgactatgaataataaataattatcctgaggaga

SEQ ID NO: 361 - DNA, 3884 bp, Homo sapiens
  source 1..3884: mol_type = genomic DNA
  misc_feature 1..3884: note = cDNA of KCNH2 gene SNP c.1918T>C (p.Phe640Leu)
atgccggtgcggaggggccacgtcgcgccgcagaacaccttcctggacaccatcatccgcaagtttgagggccagagccgtaagttcatcatcgccaacgctcgggtggagaactgcgccgtcatctactgcaacgacggcttctgcgagctgtgcggctactcgcgggccgaggtgatgcagcgaccctgcacctgcgacttcctgcacgggccgcgcacgcagcgccgcgctgccgcgcagatcgcgcaggcactgctgggcgccgaggagcgcaaagtggaaatcgccttctaccggaaagatgggagctgcttcctatgtctggtggatgtggtgcccgtgaagaacgaggatggggctgtcatcatgttcatcctcaatttcgaggtggtgatggagaaggacatggtggggtccccggctcatgacaccaaccaccggggcccccccaccagctggctggccccaggccgcgccaagaccttccgcctgaagctgcccgcgctgctggcgctgacggcccgggagtcgtcggtgcggtcgggcggcgcgggcggcgcgggcgccccgggggccgtggtggtggacgtggacctgacgcccgcggcacccagcagcgagtcgctggccctggacgaagtgacagccatggacaaccacgtggcagggctcgggcccgcggaggagcggcgtgcgctggtgggtcccggctctccgccccgcagcgcgcccggccagctcccatcgccccgggcgcacagcctcaaccccgacgcctcgggctccagctgcagcctggcccggacgcgctcccgagaaagctgcgccagcgtgcgccgcgcctcgtcggccgacgacatcgaggccatgcgcgccggggtgctgcccccgccaccgcgccacgccagcaccggggccatgcacccactgcgcagcggcttgctcaactccacctcggactccgacctcgtgcgctaccgcaccattagcaagattccccaaatcaccctcaactttgtggacctcaagggcgaccccttcttggcttcgcccaccagtgaccgtgagatcatagcacctaagataaaggagcgaacccacaatgtcactgagaaggtcacccaggtcctgtccctgggcgccgacgtgctgcctgagtacaagctgcaggcaccgcgcatccaccgctggaccatcctgcattacagccccttcaaggccgtgtgggactggctcatcctgctgctggtcatctacacggctgtcttcacaccctactcggctgccttcctgctgaaggagacggaagaaggcccgcctgctaccgagtgtggctacgcctgccagccgctggctgtggtggacctcatcgtggacatcatgttcattgtggacatcctcatcaacttccgcaccacctacgtcaatgccaacgaggaggtggtcagccaccccggccgcatcgccgtccactacttcaagggctggttcctcatcgacatggtggccgccatccccttcgacctgctcatcttcggctctggctctgaggagctgatcgggctgctgaagactgcgcggctgctgcggctggtgcgcgtggcgcggaagctggatcgctactcagagtacggcgcggccgtgctgttcttgctcatgtgcacctttgcgctcatcgcgcactggctagcctgcatctggtacgccatcggcaacatggagcagccacacatggactcacgcatcggctggctgcacaacctgggcgaccagataggcaaaccctacaacagcagcggcctgggcggcccctccatcaaggacaagtatgtgacggcgctctacttcaccttcagcagcctcaccagtgtgggcttcggcaacgtctctcccaacaccaactcagagaagatcctctccatctgcgtcatgctcattggctccctcatgtatgctagcatcttcggcaacgtgtcggccatcatccagcggctgtactcgggcacagcccgctaccacacacagatgctgcgggtgcgggagttcatccgcttccaccagatccccaatcccctgcgccagcgcctcgaggagtacttccagcacgcctggtcctacaccaacggcatcgacatgaacgcggtgctgaagggcttccctgagtgcctgcaggctgacatctgcctgcacctgaaccgctcactgctgcagcactgcaaacccttccgaggggccaccaagggctgccttcgggccctggccatgaagttcaagaccacacatgcaccgccaggggacacactggtgcatgctggggacctgctcaccgccctgtacttcatctcccggggctccatcgagatcctgcggggcgacgtcgtcgtggccatcctggggaagaatgacatctttggggagcctctgaacctgtatgcaaggcctggcaagtcgaacggggatgtgcgggccctcacctactgtgacctacacaagatccatcgggacgacctgctggaggtgctggacatgtaccctgagttctccgaccacttctggtccagcctggagatcaccttcaacctgcgagataccaacatgatcccgggctcccccggcagtacggagttagagggtggcttcagtcggcaacgcaagcgcaagttgtccttccgcaggcgcacggacaaggacacggagcagccaggggaggtgtcggccttggggccgggccgggcgggggcagggccgagtagccggggccggccgggggggccgtggggggagagcccgtccagtggcccctccagccctgagagcagtgaggatgagggcccaggccgcagctccagccccctccgcctggtgcccttctccagccccaggccccccggagagccgccgggtggggagcccctgatggaggactgcgagaagagcagcgacacttgcaaccccctgtcaggcgccttctcaggagtgtccaacattttcagcttctggggggacagtcggggccgccagtaccaggagctccctcgatgccccgcccccacccccagcctcctcaacatccccctctccagcccgggtcggcggccccggggcgacgtggagagcaggctggatgccctccagcgccagctcaacaggctggagacccggctgagtgcagacatggccactgtcctgcagctgctacagaggcagatgacgctggtcccgcccgcctacagtgctgtgaccaccccggggcctggccccacttccacatccccgctgttgcccgtcagccccctccccaccctcaccttggactcgctttctcaggtttcccagttcatggcgtgtgaggagctgcccccgggggccccagagcttccccaagaaggccccacacgacgcctctccctaccgggccagctgggggccctcacctcccagcccctgcacagacacggctcggacccgggcagttagtggggctgcccagtgtggacacgtggctcacccagggatcaaggcgctgctgggccgctccccttggaggccctgctcaggaggccctgaccgtggaaggggagaggaactcgaaagcacagctcctcccccagcccttgggaccatcttctcctgcagtcccctgggccccagtgagaggggcaggggcagggccggcagtaggtggggcctgtggtccccccactgccctgagggcattagctggtctaactgcccggaggcacccggccctgggccttaggcacctcaaggacttttctgctatttactgctcttattgttaaggataataattaaggatcatatgaataattaatgaagatgctgatgactatgaataataaataattatcctgaggaga

SEQ ID NO: 362 - DNA, 3884 bp, Homo sapiens
  source 1..3884: mol_type = genomic DNA
  misc_feature 1..3884: note = cDNA of KCNH2 gene SNP c.1918T>G (p.Phe640Val)
atgccggtgcggaggggccacgtcgcgccgcagaacaccttcctggacaccatcatccgcaagtttgagggccagagccgtaagttcatcatcgccaacgctcgggtggagaactgcgccgtcatctactgcaacgacggcttctgcgagctgtgcggctactcgcgggccgaggtgatgcagcgaccctgcacctgcgacttcctgcacgggccgcgcacgcagcgccgcgctgccgcgcagatcgcgcaggcactgctgggcgccgaggagcgcaaagtggaaatcgccttctaccggaaagatgggagctgcttcctatgtctggtggatgtggtgcccgtgaagaacgaggatggggctgtcatcatgttcatcctcaatttcgaggtggtgatggagaaggacatggtggggtccccggctcatgacaccaaccaccggggcccccccaccagctggctggccccaggccgcgccaagaccttccgcctgaagctgcccgcgctgctggcgctgacggcccgggagtcgtcggtgcggtcgggcggcgcgggcggcgcgggcgccccgggggccgtggtggtggacgtggacctgacgcccgcggcacccagcagcgagtcgctggccctggacgaagtgacagccatggacaaccacgtggcagggctcgggcccgcggaggagcggcgtgcgctggtgggtcccggctctccgccccgcagcgcgcccggccagctcccatcgccccgggcgcacagcctcaaccccgacgcctcgggctccagctgcagcctggcccggacgcgctcccgagaaagctgcgccagcgtgcgccgcgcctcgtcggccgacgacatcgaggccatgcgcgccggggtgctgcccccgccaccgcgccacgccagcaccggggccatgcacccactgcgcagcggcttgctcaactccacctcggactccgacctcgtgcgctaccgcaccattagcaagattccccaaatcaccctcaactttgtggacctcaagggcgaccccttcttggcttcgcccaccagtgaccgtgagatcatagcacctaagataaaggagcgaacccacaatgtcactgagaaggtcacccaggtcctgtccctgggcgccgacgtgctgcctgagtacaagctgcaggcaccgcgcatccaccgctggaccatcctgcattacagccccttcaaggccgtgtgggactggctcatcctgctgctggtcatctacacggctgtcttcacaccctactcggctgccttcctgctgaaggagacggaagaaggcccgcctgctaccgagtgtggctacgcctgccagccgctggctgtggtggacctcatcgtggacatcatgttcattgtggacatcctcatcaacttccgcaccacctacgtcaatgccaacgaggaggtggtcagccaccccggccgcatcgccgtccactacttcaagggctggttcctcatcgacatggtggccgccatccccttcgacctgctcatcttcggctctggctctgaggagctgatcgggctgctgaagactgcgcggctgctgcggctggtgcgcgtggcgcggaagctggatcgctactcagagtacggcgcggccgtgctgttcttgctcatgtgcacctttgcgctcatcgcgcactggctagcctgcatctggtacgccatcggcaacatggagcagccacacatggactcacgcatcggctggctgcacaacctgggcgaccagataggcaaaccctacaacagcagcggcctgggcggcccctccatcaaggacaagtatgtgacggcgctctacttcaccttcagcagcctcaccagtgtgggcttcggcaacgtctctcccaacaccaactcagagaagatcgtctccatctgcgtcatgctcattggctccctcatgtatgctagcatcttcggcaacgtgtcggccatcatccagcggctgtactcgggcacagcccgctaccacacacagatgctgcgggtgcgggagttcatccgcttccaccagatccccaatcccctgcgccagcgcctcgaggagtacttccagcacgcctggtcctacaccaacggcatcgacatgaacgcggtgctgaagggcttccctgagtgcctgcaggctgacatctgcctgcacctgaaccgctcactgctgcagcactgcaaacccttccgaggggccaccaagggctgccttcgggccctggccatgaagttcaagaccacacatgcaccgccaggggacacactggtgcatgctggggacctgctcaccgccctgtacttcatctcccggggctccatcgagatcctgcggggcgacgtcgtcgtggccatcctggggaagaatgacatctttggggagcctctgaacctgtatgcaaggcctggcaagtcgaacggggatgtgcgggccctcacctactgtgacctacacaagatccatcgggacgacctgctggaggtgctggacatgtaccctgagttctccgaccacttctggtccagcctggagatcaccttcaacctgcgagataccaacatgatcccgggctcccccggcagtacggagttagagggtggcttcagtcggcaacgcaagcgcaagttgtccttccgcaggcgcacggacaaggacacggagcagccaggggaggtgtcggccttggggccgggccgggcgggggcagggccgagtagccggggccggccgggggggccgtggggggagagcccgtccagtggcccctccagccctgagagcagtgaggatgagggcccaggccgcagctccagccccctccgcctggtgcccttctccagccccaggccccccggagagccgccgggtggggagcccctgatggaggactgcgagaagagcagcgacacttgcaaccccctgtcaggcgccttctcaggagtgtccaacattttcagcttctggggggacagtcggggccgccagtaccaggagctccctcgatgccccgcccccacccccagcctcctcaacatccccctctccagcccgggtcggcggccccggggcgacgtggagagcaggctggatgccctccagcgccagctcaacaggctggagacccggctgagtgcagacatggccactgtcctgcagctgctacagaggcagatgacgctggtcccgcccgcctacagtgctgtgaccaccccggggcctggccccacttccacatccccgctgttgcccgtcagccccctccccaccctcaccttggactcgctttctcaggtttcccagttcatggcgtgtgaggagctgcccccgggggccccagagcttccccaagaaggccccacacgacgcctctccctaccgggccagctgggggccctcacctcccagcccctgcacagacacggctcggacccgggcagttagtggggctgcccagtgtggacacgtggctcacccagggatcaaggcgctgctgggccgctccccttggaggccctgctcaggaggccctgaccgtggaaggggagaggaactcgaaagcacagctcctcccccagcccttgggaccatcttctcctgcagtcccctgggccccagtgagaggggcaggggcagggccggcagtaggtggggcctgtggtccccccactgccctgagggcattagctggtctaactgcccggaggcacccggccctgggccttaggcacctcaaggacttttctgctatttactgctcttattgttaaggataataattaaggatcatatgaataattaatgaagatgctgatgactatgaataataaataattatcctgaggaga

SEQ ID NO: 363 - DNA, 3884 bp, Homo sapiens
  source 1..3884: mol_type = genomic DNA
  misc_feature 1..3884: note = cDNA of KCNH2 gene SNP c.1919T>G (p.Phe640Cys)
atgccggtgcggaggggccacgtcgcgccgcagaacaccttcctggacaccatcatccgcaagtttgagggccagagccgtaagttcatcatcgccaacgctcgggtggagaactgcgccgtcatctactgcaacgacggcttctgcgagctgtgcggctactcgcgggccgaggtgatgcagcgaccctgcacctgcgacttcctgcacgggccgcgcacgcagcgccgcgctgccgcgcagatcgcgcaggcactgctgggcgccgaggagcgcaaagtggaaatcgccttctaccggaaagatgggagctgcttcctatgtctggtggatgtggtgcccgtgaagaacgaggatggggctgtcatcatgttcatcctcaatttcgaggtggtgatggagaaggacatggtggggtccccggctcatgacaccaaccaccggggcccccccaccagctggctggccccaggccgcgccaagaccttccgcctgaagctgcccgcgctgctggcgctgacggcccgggagtcgtcggtgcggtcgggcggcgcgggcggcgcgggcgccccgggggccgtggtggtggacgtggacctgacgcccgcggcacccagcagcgagtcgctggccctggacgaagtgacagccatggacaaccacgtggcagggctcgggcccgcggaggagcggcgtgcgctggtgggtcccggctctccgccccgcagcgcgcccggccagctcccatcgccccgggcgcacagcctcaaccccgacgcctcgggctccagctgcagcctggcccggacgcgctcccgagaaagctgcgccagcgtgcgccgcgcctcgtcggccgacgacatcgaggccatgcgcgccggggtgctgcccccgccaccgcgccacgccagcaccggggccatgcacccactgcgcagcggcttgctcaactccacctcggactccgacctcgtgcgctaccgcaccattagcaagattccccaaatcaccctcaactttgtggacctcaagggcgaccccttcttggcttcgcccaccagtgaccgtgagatcatagcacctaagataaaggagcgaacccacaatgtcactgagaaggtcacccaggtcctgtccctgggcgccgacgtgctgcctgagtacaagctgcaggcaccgcgcatccaccgctggaccatcctgcattacagccccttcaaggccgtgtgggactggctcatcctgctgctggtcatctacacggctgtcttcacaccctactcggctgccttcctgctgaaggagacggaagaaggcccgcctgctaccgagtgtggctacgcctgccagccgctggctgtggtggacctcatcgtggacatcatgttcattgtggacatcctcatcaacttccgcaccacctacgtcaatgccaacgaggaggtggtcagccaccccggccgcatcgccgtccactacttcaagggctggttcctcatcgacatggtggccgccatccccttcgacctgctcatcttcggctctggctctgaggagctgatcgggctgctgaagactgcgcggctgctgcggctggtgcgcgtggcgcggaagctggatcgctactcagagtacggcgcggccgtgctgttcttgctcatgtgcacctttgcgctcatcgcgcactggctagcctgcatctggtacgccatcggcaacatggagcagccacacatggactcacgcatcggctggctgcacaacctgggcgaccagataggcaaaccctacaacagcagcggcctgggcggcccctccatcaaggacaagtatgtgacggcgctctacttcaccttcagcagcctcaccagtgtgggcttcggcaacgtctctcccaacaccaactcagagaagatctgctccatctgcgtcatgctcattggctccctcatgtatgctagcatcttcggcaacgtgtcggccatcatccagcggctgtactcgggcacagcccgctaccacacacagatgctgcgggtgcgggagttcatccgcttccaccagatccccaatcccctgcgccagcgcctcgaggagtacttccagcacgcctggtcctacaccaacggcatcgacatgaacgcggtgctgaagggcttccctgagtgcctgcaggctgacatctgcctgcacctgaaccgctcactgctgcagcactgcaaacccttccgaggggccaccaagggctgccttcgggccctggccatgaagttcaagaccacacatgcaccgccaggggacacactggtgcatgctggggacctgctcaccgccctgtacttcatctcccggggctccatcgagatcctgcggggcgacgtcgtcgtggccatcctggggaagaatgacatctttggggagcctctgaacctgtatgcaaggcctggcaagtcgaacggggatgtgcgggccctcacctactgtgacctacacaagatccatcgggacgacctgctggaggtgctggacatgtaccctgagttctccgaccacttctggtccagcctggagatcaccttcaacctgcgagataccaacatgatcccgggctcccccggcagtacggagttagagggtggcttcagtcggcaacgcaagcgcaagttgtccttccgcaggcgcacggacaaggacacggagcagccaggggaggtgtcggccttggggccgggccgggcgggggcagggccgagtagccggggccggccgggggggccgtggggggagagcccgtccagtggcccctccagccctgagagcagtgaggatgagggcccaggccgcagctccagccccctccgcctggtgcccttctccagccccaggccccccggagagccgccgggtggggagcccctgatggaggactgcgagaagagcagcgacacttgcaaccccctgtcaggcgccttctcaggagtgtccaacattttcagcttctggggggacagtcggggccgccagtaccaggagctccctcgatgccccgcccccacccccagcctcctcaacatccccctctccagcccgggtcggcggccccggggcgacgtggagagcaggctggatgccctccagcgccagctcaacaggctggagacccggctgagtgcagacatggccactgtcctgcagctgctacagaggcagatgacgctggtcccgcccgcctacagtgctgtgaccaccccggggcctggccccacttccacatccccgctgttgcccgtcagccccctccccaccctcaccttggactcgctttctcaggtttcccagttcatggcgtgtgaggagctgcccccgggggccccagagcttccccaagaaggccccacacgacgcctctccctaccgggccagctgggggccctcacctcccagcccctgcacagacacggctcggacccgggcagttagtggggctgcccagtgtggacacgtggctcacccagggatcaaggcgctgctgggccgctccccttggaggccctgctcaggaggccctgaccgtggaaggggagaggaactcgaaagcacagctcctcccccagcccttgggaccatcttctcctgcagtcccctgggccccagtgagaggggcaggggcagggccggcagtaggtggggcctgtggtccccccactgccctgagggcattagctggtctaactgcccggaggcacccggccctgggccttaggcacctcaaggacttttctgctatttactgctcttattgttaaggataataattaaggatcatatgaataattaatgaagatgctgatgactatgaataataaataattatcctgaggaga

SEQ ID NO: 364 - DNA, 3884 bp, Homo sapiens
  source 1..3884: mol_type = genomic DNA
  misc_feature 1..3884: note = cDNA of KCNH2 gene SNP c.191G>A (p.Cys64Tyr)
atgccggtgcggaggggccacgtcgcgccgcagaacaccttcctggacaccatcatccgcaagtttgagggccagagccgtaagttcatcatcgccaacgctcgggtggagaactgcgccgtcatctactgcaacgacggcttctgcgagctgtgcggctactcgcgggccgaggtgatgcagcgaccctacacctgcgacttcctgcacgggccgcgcacgcagcgccgcgctgccgcgcagatcgcgcaggcactgctgggcgccgaggagcgcaaagtggaaatcgccttctaccggaaagatgggagctgcttcctatgtctggtggatgtggtgcccgtgaagaacgaggatggggctgtcatcatgttcatcctcaatttcgaggtggtgatggagaaggacatggtggggtccccggctcatgacaccaaccaccggggcccccccaccagctggctggccccaggccgcgccaagaccttccgcctgaagctgcccgcgctgctggcgctgacggcccgggagtcgtcggtgcggtcgggcggcgcgggcggcgcgggcgccccgggggccgtggtggtggacgtggacctgacgcccgcggcacccagcagcgagtcgctggccctggacgaagtgacagccatggacaaccacgtggcagggctcgggcccgcggaggagcggcgtgcgctggtgggtcccggctctccgccccgcagcgcgcccggccagctcccatcgccccgggcgcacagcctcaaccccgacgcctcgggctccagctgcagcctggcccggacgcgctcccgagaaagctgcgccagcgtgcgccgcgcctcgtcggccgacgacatcgaggccatgcgcgccggggtgctgcccccgccaccgcgccacgccagcaccggggccatgcacccactgcgcagcggcttgctcaactccacctcggactccgacctcgtgcgctaccgcaccattagcaagattccccaaatcaccctcaactttgtggacctcaagggcgaccccttcttggcttcgcccaccagtgaccgtgagatcatagcacctaagataaaggagcgaacccacaatgtcactgagaaggtcacccaggtcctgtccctgggcgccgacgtgctgcctgagtacaagctgcaggcaccgcgcatccaccgctggaccatcctgcattacagccccttcaaggccgtgtgggactggctcatcctgctgctggtcatctacacggctgtcttcacaccctactcggctgccttcctgctgaaggagacggaagaaggcccgcctgctaccgagtgtggctacgcctgccagccgctggctgtggtggacctcatcgtggacatcatgttcattgtggacatcctcatcaacttccgcaccacctacgtcaatgccaacgaggaggtggtcagccaccccggccgcatcgccgtccactacttcaagggctggttcctcatcgacatggtggccgccatccccttcgacctgctcatcttcggctctggctctgaggagctgatcgggctgctgaagactgcgcggctgctgcggctggtgcgcgtggcgcggaagctggatcgctactcagagtacggcgcggccgtgctgttcttgctcatgtgcacctttgcgctcatcgcgcactggctagcctgcatctggtacgccatcggcaacatggagcagccacacatggactcacgcatcggctggctgcacaacctgggcgaccagataggcaaaccctacaacagcagcggcctgggcggcccctccatcaaggacaagtatgtgacggcgctctacttcaccttcagcagcctcaccagtgtgggcttcggcaacgtctctcccaacaccaactcagagaagatcttctccatctgcgtcatgctcattggctccctcatgtatgctagcatcttcggcaacgtgtcggccatcatccagcggctgtactcgggcacagcccgctaccacacacagatgctgcgggtgcgggagttcatccgcttccaccagatccccaatcccctgcgccagcgcctcgaggagtacttccagcacgcctggtcctacaccaacggcatcgacatgaacgcggtgctgaagggcttccctgagtgcctgcaggctgacatctgcctgcacctgaaccgctcactgctgcagcactgcaaacccttccgaggggccaccaagggctgccttcgggccctggccatgaagttcaagaccacacatgcaccgccaggggacacactggtgcatgctggggacctgctcaccgccctgtacttcatctcccggggctccatcgagatcctgcggggcgacgtcgtcgtggccatcctggggaagaatgacatctttggggagcctctgaacctgtatgcaaggcctggcaagtcgaacggggatgtgcgggccctcacctactgtgacctacacaagatccatcgggacgacctgctggaggtgctggacatgtaccctgagttctccgaccacttctggtccagcctggagatcaccttcaacctgcgagataccaacatgatcccgggctcccccggcagtacggagttagagggtggcttcagtcggcaacgcaagcgcaagttgtccttccgcaggcgcacggacaaggacacggagcagccaggggaggtgtcggccttggggccgggccgggcgggggcagggccgagtagccggggccggccgggggggccgtggggggagagcccgtccagtggcccctccagccctgagagcagtgaggatgagggcccaggccgcagctccagccccctccgcctggtgcccttctccagccccaggccccccggagagccgccgggtggggagcccctgatggaggactgcgagaagagcagcgacacttgcaaccccctgtcaggcgccttctcaggagtgtccaacattttcagcttctggggggacagtcggggccgccagtaccaggagctccctcgatgccccgcccccacccccagcctcctcaacatccccctctccagcccgggtcggcggccccggggcgacgtggagagcaggctggatgccctccagcgccagctcaacaggctggagacccggctgagtgcagacatggccactgtcctgcagctgctacagaggcagatgacgctggtcccgcccgcctacagtgctgtgaccaccccggggcctggccccacttccacatccccgctgttgcccgtcagccccctccccaccctcaccttggactcgctttctcaggtttcccagttcatggcgtgtgaggagctgcccccgggggccccagagcttccccaagaaggccccacacgacgcctctccctaccgggccagctgggggccctcacctcccagcccctgcacagacacggctcggacccgggcagttagtggggctgcccagtgtggacacgtggctcacccagggatcaaggcgctgctgggccgctccccttggaggccctgctcaggaggccctgaccgtggaaggggagaggaactcgaaagcacagctcctcccccagcccttgggaccatcttctcctgcagtcccctgggccccagtgagaggggcaggggcagggccggcagtaggtggggcctgtggtccccccactgccctgagggcattagctggtctaactgcccggaggcacccggccctgggccttaggcacctcaaggacttttctgctatttactgctcttattgttaaggataataattaaggatcatatgaataattaatgaagatgctgatgactatgaataataaataattatcctgaggaga

SEQ ID NO: 365 - DNA, 3884 bp, Homo sapiens
  source 1..3884: mol_type = genomic DNA
  misc_feature 1..3884: note = cDNA of KCNH2 gene SNP c.1920C>A (p.Phe640Leu)
atgccggtgcggaggggccacgtcgcgccgcagaacaccttcctggacaccatcatccgcaagtttgagggccagagccgtaagttcatcatcgccaacgctcgggtggagaactgcgccgtcatctactgcaacgacggcttctgcgagctgtgcggctactcgcgggccgaggtgatgcagcgaccctgcacctgcgacttcctgcacgggccgcgcacgcagcgccgcgctgccgcgcagatcgcgcaggcactgctgggcgccgaggagcgcaaagtggaaatcgccttctaccggaaagatgggagctgcttcctatgtctggtggatgtggtgcccgtgaagaacgaggatggggctgtcatcatgttcatcctcaatttcgaggtggtgatggagaaggacatggtggggtccccggctcatgacaccaaccaccggggcccccccaccagctggctggccccaggccgcgccaagaccttccgcctgaagctgcccgcgctgctggcgctgacggcccgggagtcgtcggtgcggtcgggcggcgcgggcggcgcgggcgccccgggggccgtggtggtggacgtggacctgacgcccgcggcacccagcagcgagtcgctggccctggacgaagtgacagccatggacaaccacgtggcagggctcgggcccgcggaggagcggcgtgcgctggtgggtcccggctctccgccccgcagcgcgcccggccagctcccatcgccccgggcgcacagcctcaaccccgacgcctcgggctccagctgcagcctggcccggacgcgctcccgagaaagctgcgccagcgtgcgccgcgcctcgtcggccgacgacatcgaggccatgcgcgccggggtgctgcccccgccaccgcgccacgccagcaccggggccatgcacccactgcgcagcggcttgctcaactccacctcggactccgacctcgtgcgctaccgcaccattagcaagattccccaaatcaccctcaactttgtggacctcaagggcgaccccttcttggcttcgcccaccagtgaccgtgagatcatagcacctaagataaaggagcgaacccacaatgtcactgagaaggtcacccaggtcctgtccctgggcgccgacgtgctgcctgagtacaagctgcaggcaccgcgcatccaccgctggaccatcctgcattacagccccttcaaggccgtgtgggactggctcatcctgctgctggtcatctacacggctgtcttcacaccctactcggctgccttcctgctgaaggagacggaagaaggcccgcctgctaccgagtgtggctacgcctgccagccgctggctgtggtggacctcatcgtggacatcatgttcattgtggacatcctcatcaacttccgcaccacctacgtcaatgccaacgaggaggtggtcagccaccccggccgcatcgccgtccactacttcaagggctggttcctcatcgacatggtggccgccatccccttcgacctgctcatcttcggctctggctctgaggagctgatcgggctgctgaagactgcgcggctgctgcggctggtgcgcgtggcgcggaagctggatcgctactcagagtacggcgcggccgtgctgttcttgctcatgtgcacctttgcgctcatcgcgcactggctagcctgcatctggtacgccatcggcaacatggagcagccacacatggactcacgcatcggctggctgcacaacctgggcgaccagataggcaaaccctacaacagcagcggcctgggcggcccctccatcaaggacaagtatgtgacggcgctctacttcaccttcagcagcctcaccagtgtgggcttcggcaacgtctctcccaacaccaactcagagaagatcttatccatctgcgtcatgctcattggctccctcatgtatgctagcatcttcggcaacgtgtcggccatcatccagcggctgtactcgggcacagcccgctaccacacacagatgctgcgggtgcgggagttcatccgcttccaccagatccccaatcccctgcgccagcgcctcgaggagtacttccagcacgcctggtcctacaccaacggcatcgacatgaacgcggtgctgaagggcttccctgagtgcctgcaggctgacatctgcctgcacctgaaccgctcactgctgcagcactgcaaacccttccgaggggccaccaagggctgccttcgggccctggccatgaagttcaagaccacacatgcaccgccaggggacacactggtgcatgctggggacctgctcaccgccctgtacttcatctcccggggctccatcgagatcctgcggggcgacgtcgtcgtggccatcctggggaagaatgacatctttggggagcctctgaacctgtatgcaaggcctggcaagtcgaacggggatgtgcgggccctcacctactgtgacctacacaagatccatcgggacgacctgctggaggtgctggacatgtaccctgagttctccgaccacttctggtccagcctggagatcaccttcaacctgcgagataccaacatgatcccgggctcccccggcagtacggagttagagggtggcttcagtcggcaacgcaagcgcaagttgtccttccgcaggcgcacggacaaggacacggagcagccaggggaggtgtcggccttggggccgggccgggcgggggcagggccgagtagccggggccggccgggggggccgtggggggagagcccgtccagtggcccctccagccctgagagcagtgaggatgagggcccaggccgcagctccagccccctccgcctggtgcccttctccagccccaggccccccggagagccgccgggtggggagcccctgatggaggactgcgagaagagcagcgacacttgcaaccccctgtcaggcgccttctcaggagtgtccaacattttcagcttctggggggacagtcggggccgccagtaccaggagctccctcgatgccccgcccccacccccagcctcctcaacatccccctctccagcccgggtcggcggccccggggcgacgtggagagcaggctggatgccctccagcgccagctcaacaggctggagacccggctgagtgcagacatggccactgtcctgcagctgctacagaggcagatgacgctggtcccgcccgcctacagtgctgtgaccaccccggggcctggccccacttccacatccccgctgttgcccgtcagccccctccccaccctcaccttggactcgctttctcaggtttcccagttcatggcgtgtgaggagctgcccccgggggccccagagcttccccaagaaggccccacacgacgcctctccctaccgggccagctgggggccctcacctcccagcccctgcacagacacggctcggacccgggcagttagtggggctgcccagtgtggacacgtggctcacccagggatcaaggcgctgctgggccgctccccttggaggccctgctcaggaggccctgaccgtggaaggggagaggaactcgaaagcacagctcctcccccagcccttgggaccatcttctcctgcagtcccctgggccccagtgagaggggcaggggcagggccggcagtaggtggggcctgtggtccccccactgccctgagggcattagctggtctaactgcccggaggcacccggccctgggccttaggcacctcaaggacttttctgctatttactgctcttattgttaaggataataattaaggatcatatgaataattaatgaagatgctgatgactatgaataataaataattatcctgaggaga

SEQ ID NO: 366 - DNA, 3884 bp, Homo sapiens
  source 1..3884: mol_type = genomic DNA
  misc_feature 1..3884: note = cDNA of KCNH2 gene SNP c.1920C>G (p.Phe640Leu)
atgccggtgcggaggggccacgtcgcgccgcagaacaccttcctggacaccatcatccgcaagtttgagggccagagccgtaagttcatcatcgccaacgctcgggtggagaactgcgccgtcatctactgcaacgacggcttctgcgagctgtgcggctactcgcgggccgaggtgatgcagcgaccctgcacctgcgacttcctgcacgggccgcgcacgcagcgccgcgctgccgcgcagatcgcgcaggcactgctgggcgccgaggagcgcaaagtggaaatcgccttctaccggaaagatgggagctgcttcctatgtctggtggatgtggtgcccgtgaagaacgaggatggggctgtcatcatgttcatcctcaatttcgaggtggtgatggagaaggacatggtggggtccccggctcatgacaccaaccaccggggcccccccaccagctggctggccccaggccgcgccaagaccttccgcctgaagctgcccgcgctgctggcgctgacggcccgggagtcgtcggtgcggtcgggcggcgcgggcggcgcgggcgccccgggggccgtggtggtggacgtggacctgacgcccgcggcacccagcagcgagtcgctggccctggacgaagtgacagccatggacaaccacgtggcagggctcgggcccgcggaggagcggcgtgcgctggtgggtcccggctctccgccccgcagcgcgcccggccagctcccatcgccccgggcgcacagcctcaaccccgacgcctcgggctccagctgcagcctggcccggacgcgctcccgagaaagctgcgccagcgtgcgccgcgcctcgtcggccgacgacatcgaggccatgcgcgccggggtgctgcccccgccaccgcgccacgccagcaccggggccatgcacccactgcgcagcggcttgctcaactccacctcggactccgacctcgtgcgctaccgcaccattagcaagattccccaaatcaccctcaactttgtggacctcaagggcgaccccttcttggcttcgcccaccagtgaccgtgagatcatagcacctaagataaaggagcgaacccacaatgtcactgagaaggtcacccaggtcctgtccctgggcgccgacgtgctgcctgagtacaagctgcaggcaccgcgcatccaccgctggaccatcctgcattacagccccttcaaggccgtgtgggactggctcatcctgctgctggtcatctacacggctgtcttcacaccctactcggctgccttcctgctgaaggagacggaagaaggcccgcctgctaccgagtgtggctacgcctgccagccgctggctgtggtggacctcatcgtggacatcatgttcattgtggacatcctcatcaacttccgcaccacctacgtcaatgccaacgaggaggtggtcagccaccccggccgcatcgccgtccactacttcaagggctggttcctcatcgacatggtggccgccatccccttcgacctgctcatcttcggctctggctctgaggagctgatcgggctgctgaagactgcgcggctgctgcggctggtgcgcgtggcgcggaagctggatcgctactcagagtacggcgcggccgtgctgttcttgctcatgtgcacctttgcgctcatcgcgcactggctagcctgcatctggtacgccatcggcaacatggagcagccacacatggactcacgcatcggctggctgcacaacctgggcgaccagataggcaaaccctacaacagcagcggcctgggcggcccctccatcaaggacaagtatgtgacggcgctctacttcaccttcagcagcctcaccagtgtgggcttcggcaacgtctctcccaacaccaactcagagaagatcttgtccatctgcgtcatgctcattggctccctcatgtatgctagcatcttcggcaacgtgtcggccatcatccagcggctgtactcgggcacagcccgctaccacacacagatgctgcgggtgcgggagttcatccgcttccaccagatccccaatcccctgcgccagcgcctcgaggagtacttccagcacgcctggtcctacaccaacggcatcgacatgaacgcggtgctgaagggcttccctgagtgcctgcaggctgacatctgcctgcacctgaaccgctcactgctgcagcactgcaaacccttccgaggggccaccaagggctgccttcgggccctggccatgaagttcaagaccacacatgcaccgccaggggacacactggtgcatgctggggacctgctcaccgccctgtacttcatctcccggggctccatcgagatcctgcggggcgacgtcgtcgtggccatcctggggaagaatgacatctttggggagcctctgaacctgtatgcaaggcctggcaagtcgaacggggatgtgcgggccctcacctactgtgacctacacaagatccatcgggacgacctgctggaggtgctggacatgtaccctgagttctccgaccacttctggtccagcctggagatcaccttcaacctgcgagataccaacatgatcccgggctcccccggcagtacggagttagagggtggcttcagtcggcaacgcaagcgcaagttgtccttccgcaggcgcacggacaaggacacggagcagccaggggaggtgtcggccttggggccgggccgggcgggggcagggccgagtagccggggccggccgggggggccgtggggggagagcccgtccagtggcccctccagccctgagagcagtgaggatgagggcccaggccgcagctccagccccctccgcctggtgcccttctccagccccaggccccccggagagccgccgggtggggagcccctgatggaggactgcgagaagagcagcgacacttgcaaccccctgtcaggcgccttctcaggagtgtccaacattttcagcttctggggggacagtcggggccgccagtaccaggagctccctcgatgccccgcccccacccccagcctcctcaacatccccctctccagcccgggtcggcggccccggggcgacgtggagagcaggctggatgccctccagcgccagctcaacaggctggagacccggctgagtgcagacatggccactgtcctgcagctgctacagaggcagatgacgctggtcccgcccgcctacagtgctgtgaccaccccggggcctggccccacttccacatccccgctgttgcccgtcagccccctccccaccctcaccttggactcgctttctcaggtttcccagttcatggcgtgtgaggagctgcccccgggggccccagagcttccccaagaaggccccacacgacgcctctccctaccgggccagctgggggccctcacctcccagcccctgcacagacacggctcggacccgggcagttagtggggctgcccagtgtggacacgtggctcacccagggatcaaggcgctgctgggccgctccccttggaggccctgctcaggaggccctgaccgtggaaggggagaggaactcgaaagcacagctcctcccccagcccttgggaccatcttctcctgcagtcccctgggccccagtgagaggggcaggggcagggccggcagtaggtggggcctgtggtccccccactgccctgagggcattagctggtctaactgcccggaggcacccggccctgggccttaggcacctcaaggacttttctgctatttactgctcttattgttaaggataataattaaggatcatatgaataattaatgaagatgctgatgactatgaataataaataattatcctgaggaga

SEQ ID NO: 367 - DNA, 3884 bp, Homo sapiens
  source 1..3884: mol_type = genomic DNA
  misc_feature 1..3884: note = cDNA of KCNH2 gene SNP c.1922C>T (p.Ser641Phe)
atgccggtgcggaggggccacgtcgcgccgcagaacaccttcctggacaccatcatccgcaagtttgagggccagagccgtaagttcatcatcgccaacgctcgggtggagaactgcgccgtcatctactgcaacgacggcttctgcgagctgtgcggctactcgcgggccgaggtgatgcagcgaccctgcacctgcgacttcctgcacgggccgcgcacgcagcgccgcgctgccgcgcagatcgcgcaggcactgctgggcgccgaggagcgcaaagtggaaatcgccttctaccggaaagatgggagctgcttcctatgtctggtggatgtggtgcccgtgaagaacgaggatggggctgtcatcatgttcatcctcaatttcgaggtggtgatggagaaggacatggtggggtccccggctcatgacaccaaccaccggggcccccccaccagctggctggccccaggccgcgccaagaccttccgcctgaagctgcccgcgctgctggcgctgacggcccgggagtcgtcggtgcggtcgggcggcgcgggcggcgcgggcgccccgggggccgtggtggtggacgtggacctgacgcccgcggcacccagcagcgagtcgctggccctggacgaagtgacagccatggacaaccacgtggcagggctcgggcccgcggaggagcggcgtgcgctggtgggtcccggctctccgccccgcagcgcgcccggccagctcccatcgccccgggcgcacagcctcaaccccgacgcctcgggctccagctgcagcctggcccggacgcgctcccgagaaagctgcgccagcgtgcgccgcgcctcgtcggccgacgacatcgaggccatgcgcgccggggtgctgcccccgccaccgcgccacgccagcaccggggccatgcacccactgcgcagcggcttgctcaactccacctcggactccgacctcgtgcgctaccgcaccattagcaagattccccaaatcaccctcaactttgtggacctcaagggcgaccccttcttggcttcgcccaccagtgaccgtgagatcatagcacctaagataaaggagcgaacccacaatgtcactgagaaggtcacccaggtcctgtccctgggcgccgacgtgctgcctgagtacaagctgcaggcaccgcgcatccaccgctggaccatcctgcattacagccccttcaaggccgtgtgggactggctcatcctgctgctggtcatctacacggctgtcttcacaccctactcggctgccttcctgctgaaggagacggaagaaggcccgcctgctaccgagtgtggctacgcctgccagccgctggctgtggtggacctcatcgtggacatcatgttcattgtggacatcctcatcaacttccgcaccacctacgtcaatgccaacgaggaggtggtcagccaccccggccgcatcgccgtccactacttcaagggctggttcctcatcgacatggtggccgccatccccttcgacctgctcatcttcggctctggctctgaggagctgatcgggctgctgaagactgcgcggctgctgcggctggtgcgcgtggcgcggaagctggatcgctactcagagtacggcgcggccgtgctgttcttgctcatgtgcacctttgcgctcatcgcgcactggctagcctgcatctggtacgccatcggcaacatggagcagccacacatggactcacgcatcggctggctgcacaacctgggcgaccagataggcaaaccctacaacagcagcggcctgggcggcccctccatcaaggacaagtatgtgacggcgctctacttcaccttcagcagcctcaccagtgtgggcttcggcaacgtctctcccaacaccaactcagagaagatcttcttcatctgcgtcatgctcattggctccctcatgtatgctagcatcttcggcaacgtgtcggccatcatccagcggctgtactcgggcacagcccgctaccacacacagatgctgcgggtgcgggagttcatccgcttccaccagatccccaatcccctgcgccagcgcctcgaggagtacttccagcacgcctggtcctacaccaacggcatcgacatgaacgcggtgctgaagggcttccctgagtgcctgcaggctgacatctgcctgcacctgaaccgctcactgctgcagcactgcaaacccttccgaggggccaccaagggctgccttcgggccctggccatgaagttcaagaccacacatgcaccgccaggggacacactggtgcatgctggggacctgctcaccgccctgtacttcatctcccggggctccatcgagatcctgcggggcgacgtcgtcgtggccatcctggggaagaatgacatctttggggagcctctgaacctgtatgcaaggcctggcaagtcgaacggggatgtgcgggccctcacctactgtgacctacacaagatccatcgggacgacctgctggaggtgctggacatgtaccctgagttctccgaccacttctggtccagcctggagatcaccttcaacctgcgagataccaacatgatcccgggctcccccggcagtacggagttagagggtggcttcagtcggcaacgcaagcgcaagttgtccttccgcaggcgcacggacaaggacacggagcagccaggggaggtgtcggccttggggccgggccgggcgggggcagggccgagtagccggggccggccgggggggccgtggggggagagcccgtccagtggcccctccagccctgagagcagtgaggatgagggcccaggccgcagctccagccccctccgcctggtgcccttctccagccccaggccccccggagagccgccgggtggggagcccctgatggaggactgcgagaagagcagcgacacttgcaaccccctgtcaggcgccttctcaggagtgtccaacattttcagcttctggggggacagtcggggccgccagtaccaggagctccctcgatgccccgcccccacccccagcctcctcaacatccccctctccagcccgggtcggcggccccggggcgacgtggagagcaggctggatgccctccagcgccagctcaacaggctggagacccggctgagtgcagacatggccactgtcctgcagctgctacagaggcagatgacgctggtcccgcccgcctacagtgctgtgaccaccccggggcctggccccacttccacatccccgctgttgcccgtcagccccctccccaccctcaccttggactcgctttctcaggtttcccagttcatggcgtgtgaggagctgcccccgggggccccagagcttccccaagaaggccccacacgacgcctctccctaccgggccagctgggggccctcacctcccagcccctgcacagacacggctcggacccgggcagttagtggggctgcccagtgtggacacgtggctcacccagggatcaaggcgctgctgggccgctccccttggaggccctgctcaggaggccctgaccgtggaaggggagaggaactcgaaagcacagctcctcccccagcccttgggaccatcttctcctgcagtcccctgggccccagtgagaggggcaggggcagggccggcagtaggtggggcctgtggtccccccactgccctgagggcattagctggtctaactgcccggaggcacccggccctgggccttaggcacctcaaggacttttctgctatttactgctcttattgttaaggataataattaaggatcatatgaataattaatgaagatgctgatgactatgaataataaataattatcctgaggaga

SEQ ID NO: 368 - DNA, 3884 bp, Homo sapiens
  source 1..3884: mol_type = genomic DNA
  misc_feature 1..3884: note = cDNA of KCNH2 gene SNP c.1926C>G (p.Ile642Met)
atgccggtgcggaggggccacgtcgcgccgcagaacaccttcctggacaccatcatccgcaagtttgagggccagagccgtaagttcatcatcgccaacgctcgggtggagaactgcgccgtcatctactgcaacgacggcttctgcgagctgtgcggctactcgcgggccgaggtgatgcagcgaccctgcacctgcgacttcctgcacgggccgcgcacgcagcgccgcgctgccgcgcagatcgcgcaggcactgctgggcgccgaggagcgcaaagtggaaatcgccttctaccggaaagatgggagctgcttcctatgtctggtggatgtggtgcccgtgaagaacgaggatggggctgtcatcatgttcatcctcaatttcgaggtggtgatggagaaggacatggtggggtccccggctcatgacaccaaccaccggggcccccccaccagctggctggccccaggccgcgccaagaccttccgcctgaagctgcccgcgctgctggcgctgacggcccgggagtcgtcggtgcggtcgggcggcgcgggcggcgcgggcgccccgggggccgtggtggtggacgtggacctgacgcccgcggcacccagcagcgagtcgctggccctggacgaagtgacagccatggacaaccacgtggcagggctcgggcccgcggaggagcggcgtgcgctggtgggtcccggctctccgccccgcagcgcgcccggccagctcccatcgccccgggcgcacagcctcaaccccgacgcctcgggctccagctgcagcctggcccggacgcgctcccgagaaagctgcgccagcgtgcgccgcgcctcgtcggccgacgacatcgaggccatgcgcgccggggtgctgcccccgccaccgcgccacgccagcaccggggccatgcacccactgcgcagcggcttgctcaactccacctcggactccgacctcgtgcgctaccgcaccattagcaagattccccaaatcaccctcaactttgtggacctcaagggcgaccccttcttggcttcgcccaccagtgaccgtgagatcatagcacctaagataaaggagcgaacccacaatgtcactgagaaggtcacccaggtcctgtccctgggcgccgacgtgctgcctgagtacaagctgcaggcaccgcgcatccaccgctggaccatcctgcattacagccccttcaaggccgtgtgggactggctcatcctgctgctggtcatctacacggctgtcttcacaccctactcggctgccttcctgctgaaggagacggaagaaggcccgcctgctaccgagtgtggctacgcctgccagccgctggctgtggtggacctcatcgtggacatcatgttcattgtggacatcctcatcaacttccgcaccacctacgtcaatgccaacgaggaggtggtcagccaccccggccgcatcgccgtccactacttcaagggctggttcctcatcgacatggtggccgccatccccttcgacctgctcatcttcggctctggctctgaggagctgatcgggctgctgaagactgcgcggctgctgcggctggtgcgcgtggcgcggaagctggatcgctactcagagtacggcgcggccgtgctgttcttgctcatgtgcacctttgcgctcatcgcgcactggctagcctgcatctggtacgccatcggcaacatggagcagccacacatggactcacgcatcggctggctgcacaacctgggcgaccagataggcaaaccctacaacagcagcggcctgggcggcccctccatcaaggacaagtatgtgacggcgctctacttcaccttcagcagcctcaccagtgtgggcttcggcaacgtctctcccaacaccaactcagagaagatcttctccatgtgcgtcatgctcattggctccctcatgtatgctagcatcttcggcaacgtgtcggccatcatccagcggctgtactcgggcacagcccgctaccacacacagatgctgcgggtgcgggagttcatccgcttccaccagatccccaatcccctgcgccagcgcctcgaggagtacttccagcacgcctggtcctacaccaacggcatcgacatgaacgcggtgctgaagggcttccctgagtgcctgcaggctgacatctgcctgcacctgaaccgctcactgctgcagcactgcaaacccttccgaggggccaccaagggctgccttcgggccctggccatgaagttcaagaccacacatgcaccgccaggggacacactggtgcatgctggggacctgctcaccgccctgtacttcatctcccggggctccatcgagatcctgcggggcgacgtcgtcgtggccatcctggggaagaatgacatctttggggagcctctgaacctgtatgcaaggcctggcaagtcgaacggggatgtgcgggccctcacctactgtgacctacacaagatccatcgggacgacctgctggaggtgctggacatgtaccctgagttctccgaccacttctggtccagcctggagatcaccttcaacctgcgagataccaacatgatcccgggctcccccggcagtacggagttagagggtggcttcagtcggcaacgcaagcgcaagttgtccttccgcaggcgcacggacaaggacacggagcagccaggggaggtgtcggccttggggccgggccgggcgggggcagggccgagtagccggggccggccgggggggccgtggggggagagcccgtccagtggcccctccagccctgagagcagtgaggatgagggcccaggccgcagctccagccccctccgcctggtgcccttctccagccccaggccccccggagagccgccgggtggggagcccctgatggaggactgcgagaagagcagcgacacttgcaaccccctgtcaggcgccttctcaggagtgtccaacattttcagcttctggggggacagtcggggccgccagtaccaggagctccctcgatgccccgcccccacccccagcctcctcaacatccccctctccagcccgggtcggcggccccggggcgacgtggagagcaggctggatgccctccagcgccagctcaacaggctggagacccggctgagtgcagacatggccactgtcctgcagctgctacagaggcagatgacgctggtcccgcccgcctacagtgctgtgaccaccccggggcctggccccacttccacatccccgctgttgcccgtcagccccctccccaccctcaccttggactcgctttctcaggtttcccagttcatggcgtgtgaggagctgcccccgggggccccagagcttccccaagaaggccccacacgacgcctctccctaccgggccagctgggggccctcacctcccagcccctgcacagacacggctcggacccgggcagttagtggggctgcccagtgtggacacgtggctcacccagggatcaaggcgctgctgggccgctccccttggaggccctgctcaggaggccctgaccgtggaaggggagaggaactcgaaagcacagctcctcccccagcccttgggaccatcttctcctgcagtcccctgggccccagtgagaggggcaggggcagggccggcagtaggtggggcctgtggtccccccactgccctgagggcattagctggtctaactgcccggaggcacccggccctgggccttaggcacctcaaggacttttctgctatttactgctcttattgttaaggataataattaaggatcatatgaataattaatgaagatgctgatgactatgaataataaataattatcctgaggaga

SEQ ID NO: 369 - DNA, 3884 bp, Homo sapiens
  source 1..3884: mol_type = genomic DNA
  misc_feature 1..3884: note = cDNA of KCNH2 gene SNP c.1929C>A (p.Cys643Ter)
atgccggtgcggaggggccacgtcgcgccgcagaacaccttcctggacaccatcatccgcaagtttgagggccagagccgtaagttcatcatcgccaacgctcgggtggagaactgcgccgtcatctactgcaacgacggcttctgcgagctgtgcggctactcgcgggccgaggtgatgcagcgaccctgcacctgcgacttcctgcacgggccgcgcacgcagcgccgcgctgccgcgcagatcgcgcaggcactgctgggcgccgaggagcgcaaagtggaaatcgccttctaccggaaagatgggagctgcttcctatgtctggtggatgtggtgcccgtgaagaacgaggatggggctgtcatcatgttcatcctcaatttcgaggtggtgatggagaaggacatggtggggtccccggctcatgacaccaaccaccggggcccccccaccagctggctggccccaggccgcgccaagaccttccgcctgaagctgcccgcgctgctggcgctgacggcccgggagtcgtcggtgcggtcgggcggcgcgggcggcgcgggcgccccgggggccgtggtggtggacgtggacctgacgcccgcggcacccagcagcgagtcgctggccctggacgaagtgacagccatggacaaccacgtggcagggctcgggcccgcggaggagcggcgtgcgctggtgggtcccggctctccgccccgcagcgcgcccggccagctcccatcgccccgggcgcacagcctcaaccccgacgcctcgggctccagctgcagcctggcccggacgcgctcccgagaaagctgcgccagcgtgcgccgcgcctcgtcggccgacgacatcgaggccatgcgcgccggggtgctgcccccgccaccgcgccacgccagcaccggggccatgcacccactgcgcagcggcttgctcaactccacctcggactccgacctcgtgcgctaccgcaccattagcaagattccccaaatcaccctcaactttgtggacctcaagggcgaccccttcttggcttcgcccaccagtgaccgtgagatcatagcacctaagataaaggagcgaacccacaatgtcactgagaaggtcacccaggtcctgtccctgggcgccgacgtgctgcctgagtacaagctgcaggcaccgcgcatccaccgctggaccatcctgcattacagccccttcaaggccgtgtgggactggctcatcctgctgctggtcatctacacggctgtcttcacaccctactcggctgccttcctgctgaaggagacggaagaaggcccgcctgctaccgagtgtggctacgcctgccagccgctggctgtggtggacctcatcgtggacatcatgttcattgtggacatcctcatcaacttccgcaccacctacgtcaatgccaacgaggaggtggtcagccaccccggccgcatcgccgtccactacttcaagggctggttcctcatcgacatggtggccgccatccccttcgacctgctcatcttcggctctggctctgaggagctgatcgggctgctgaagactgcgcggctgctgcggctggtgcgcgtggcgcggaagctggatcgctactcagagtacggcgcggccgtgctgttcttgctcatgtgcacctttgcgctcatcgcgcactggctagcctgcatctggtacgccatcggcaacatggagcagccacacatggactcacgcatcggctggctgcacaacctgggcgaccagataggcaaaccctacaacagcagcggcctgggcggcccctccatcaaggacaagtatgtgacggcgctctacttcaccttcagcagcctcaccagtgtgggcttcggcaacgtctctcccaacaccaactcagagaagatcttctccatctgagtcatgctcattggctccctcatgtatgctagcatcttcggcaacgtgtcggccatcatccagcggctgtactcgggcacagcccgctaccacacacagatgctgcgggtgcgggagttcatccgcttccaccagatccccaatcccctgcgccagcgcctcgaggagtacttccagcacgcctggtcctacaccaacggcatcgacatgaacgcggtgctgaagggcttccctgagtgcctgcaggctgacatctgcctgcacctgaaccgctcactgctgcagcactgcaaacccttccgaggggccaccaagggctgccttcgggccctggccatgaagttcaagaccacacatgcaccgccaggggacacactggtgcatgctggggacctgctcaccgccctgtacttcatctcccggggctccatcgagatcctgcggggcgacgtcgtcgtggccatcctggggaagaatgacatctttggggagcctctgaacctgtatgcaaggcctggcaagtcgaacggggatgtgcgggccctcacctactgtgacctacacaagatccatcgggacgacctgctggaggtgctggacatgtaccctgagttctccgaccacttctggtccagcctggagatcaccttcaacctgcgagataccaacatgatcccgggctcccccggcagtacggagttagagggtggcttcagtcggcaacgcaagcgcaagttgtccttccgcaggcgcacggacaaggacacggagcagccaggggaggtgtcggccttggggccgggccgggcgggggcagggccgagtagccggggccggccgggggggccgtggggggagagcccgtccagtggcccctccagccctgagagcagtgaggatgagggcccaggccgcagctccagccccctccgcctggtgcccttctccagccccaggccccccggagagccgccgggtggggagcccctgatggaggactgcgagaagagcagcgacacttgcaaccccctgtcaggcgccttctcaggagtgtccaacattttcagcttctggggggacagtcggggccgccagtaccaggagctccctcgatgccccgcccccacccccagcctcctcaacatccccctctccagcccgggtcggcggccccggggcgacgtggagagcaggctggatgccctccagcgccagctcaacaggctggagacccggctgagtgcagacatggccactgtcctgcagctgctacagaggcagatgacgctggtcccgcccgcctacagtgctgtgaccaccccggggcctggccccacttccacatccccgctgttgcccgtcagccccctccccaccctcaccttggactcgctttctcaggtttcccagttcatggcgtgtgaggagctgcccccgggggccccagagcttccccaagaaggccccacacgacgcctctccctaccgggccagctgggggccctcacctcccagcccctgcacagacacggctcggacccgggcagttagtggggctgcccagtgtggacacgtggctcacccagggatcaaggcgctgctgggccgctccccttggaggccctgctcaggaggccctgaccgtggaaggggagaggaactcgaaagcacagctcctcccccagcccttgggaccatcttctcctgcagtcccctgggccccagtgagaggggcaggggcagggccggcagtaggtggggcctgtggtccccccactgccctgagggcattagctggtctaactgcccggaggcacccggccctgggccttaggcacctcaaggacttttctgctatttactgctcttattgttaaggataataattaaggatcatatgaataattaatgaagatgctgatgactatgaataataaataattatcctgaggaga

SEQ ID NO: 370 - DNA, 3884 bp, Homo sapiens
  source 1..3884: mol_type = genomic DNA
  misc_feature 1..3884: note = cDNA of KCNH2 gene SNP c.192C>G (p.Cys64Trp)
atgccggtgcggaggggccacgtcgcgccgcagaacaccttcctggacaccatcatccgcaagtttgagggccagagccgtaagttcatcatcgccaacgctcgggtggagaactgcgccgtcatctactgcaacgacggcttctgcgagctgtgcggctactcgcgggccgaggtgatgcagcgaccctggacctgcgacttcctgcacgggccgcgcacgcagcgccgcgctgccgcgcagatcgcgcaggcactgctgggcgccgaggagcgcaaagtggaaatcgccttctaccggaaagatgggagctgcttcctatgtctggtggatgtggtgcccgtgaagaacgaggatggggctgtcatcatgttcatcctcaatttcgaggtggtgatggagaaggacatggtggggtccccggctcatgacaccaaccaccggggcccccccaccagctggctggccccaggccgcgccaagaccttccgcctgaagctgcccgcgctgctggcgctgacggcccgggagtcgtcggtgcggtcgggcggcgcgggcggcgcgggcgccccgggggccgtggtggtggacgtggacctgacgcccgcggcacccagcagcgagtcgctggccctggacgaagtgacagccatggacaaccacgtggcagggctcgggcccgcggaggagcggcgtgcgctggtgggtcccggctctccgccccgcagcgcgcccggccagctcccatcgccccgggcgcacagcctcaaccccgacgcctcgggctccagctgcagcctggcccggacgcgctcccgagaaagctgcgccagcgtgcgccgcgcctcgtcggccgacgacatcgaggccatgcgcgccggggtgctgcccccgccaccgcgccacgccagcaccggggccatgcacccactgcgcagcggcttgctcaactccacctcggactccgacctcgtgcgctaccgcaccattagcaagattccccaaatcaccctcaactttgtggacctcaagggcgaccccttcttggcttcgcccaccagtgaccgtgagatcatagcacctaagataaaggagcgaacccacaatgtcactgagaaggtcacccaggtcctgtccctgggcgccgacgtgctgcctgagtacaagctgcaggcaccgcgcatccaccgctggaccatcctgcattacagccccttcaaggccgtgtgggactggctcatcctgctgctggtcatctacacggctgtcttcacaccctactcggctgccttcctgctgaaggagacggaagaaggcccgcctgctaccgagtgtggctacgcctgccagccgctggctgtggtggacctcatcgtggacatcatgttcattgtggacatcctcatcaacttccgcaccacctacgtcaatgccaacgaggaggtggtcagccaccccggccgcatcgccgtccactacttcaagggctggttcctcatcgacatggtggccgccatccccttcgacctgctcatcttcggctctggctctgaggagctgatcgggctgctgaagactgcgcggctgctgcggctggtgcgcgtggcgcggaagctggatcgctactcagagtacggcgcggccgtgctgttcttgctcatgtgcacctttgcgctcatcgcgcactggctagcctgcatctggtacgccatcggcaacatggagcagccacacatggactcacgcatcggctggctgcacaacctgggcgaccagataggcaaaccctacaacagcagcggcctgggcggcccctccatcaaggacaagtatgtgacggcgctctacttcaccttcagcagcctcaccagtgtgggcttcggcaacgtctctcccaacaccaactcagagaagatcttctccatctgcgtcatgctcattggctccctcatgtatgctagcatcttcggcaacgtgtcggccatcatccagcggctgtactcgggcacagcccgctaccacacacagatgctgcgggtgcgggagttcatccgcttccaccagatccccaatcccctgcgccagcgcctcgaggagtacttccagcacgcctggtcctacaccaacggcatcgacatgaacgcggtgctgaagggcttccctgagtgcctgcaggctgacatctgcctgcacctgaaccgctcactgctgcagcactgcaaacccttccgaggggccaccaagggctgccttcgggccctggccatgaagttcaagaccacacatgcaccgccaggggacacactggtgcatgctggggacctgctcaccgccctgtacttcatctcccggggctccatcgagatcctgcggggcgacgtcgtcgtggccatcctggggaagaatgacatctttggggagcctctgaacctgtatgcaaggcctggcaagtcgaacggggatgtgcgggccctcacctactgtgacctacacaagatccatcgggacgacctgctggaggtgctggacatgtaccctgagttctccgaccacttctggtccagcctggagatcaccttcaacctgcgagataccaacatgatcccgggctcccccggcagtacggagttagagggtggcttcagtcggcaacgcaagcgcaagttgtccttccgcaggcgcacggacaaggacacggagcagccaggggaggtgtcggccttggggccgggccgggcgggggcagggccgagtagccggggccggccgggggggccgtggggggagagcccgtccagtggcccctccagccctgagagcagtgaggatgagggcccaggccgcagctccagccccctccgcctggtgcccttctccagccccaggccccccggagagccgccgggtggggagcccctgatggaggactgcgagaagagcagcgacacttgcaaccccctgtcaggcgccttctcaggagtgtccaacattttcagcttctggggggacagtcggggccgccagtaccaggagctccctcgatgccccgcccccacccccagcctcctcaacatccccctctccagcccgggtcggcggccccggggcgacgtggagagcaggctggatgccctccagcgccagctcaacaggctggagacccggctgagtgcagacatggccactgtcctgcagctgctacagaggcagatgacgctggtcccgcccgcctacagtgctgtgaccaccccggggcctggccccacttccacatccccgctgttgcccgtcagccccctccccaccctcaccttggactcgctttctcaggtttcccagttcatggcgtgtgaggagctgcccccgggggccccagagcttccccaagaaggccccacacgacgcctctccctaccgggccagctgggggccctcacctcccagcccctgcacagacacggctcggacccgggcagttagtggggctgcccagtgtggacacgtggctcacccagggatcaaggcgctgctgggccgctccccttggaggccctgctcaggaggccctgaccgtggaaggggagaggaactcgaaagcacagctcctcccccagcccttgggaccatcttctcctgcagtcccctgggccccagtgagaggggcaggggcagggccggcagtaggtggggcctgtggtccccccactgccctgagggcattagctggtctaactgcccggaggcacccggccctgggccttaggcacctcaaggacttttctgctatttactgctcttattgttaaggataataattaaggatcatatgaataattaatgaagatgctgatgactatgaataataaataattatcctgaggaga

SEQ ID NO: 371 - DNA, 3884 bp, Homo sapiens
  source 1..3884: mol_type = genomic DNA
  misc_feature 1..3884: note = cDNA of KCNH2 gene SNP c.1930G>A (p.Val644Ile)
atgccggtgcggaggggccacgtcgcgccgcagaacaccttcctggacaccatcatccgcaagtttgagggccagagccgtaagttcatcatcgccaacgctcgggtggagaactgcgccgtcatctactgcaacgacggcttctgcgagctgtgcggctactcgcgggccgaggtgatgcagcgaccctgcacctgcgacttcctgcacgggccgcgcacgcagcgccgcgctgccgcgcagatcgcgcaggcactgctgggcgccgaggagcgcaaagtggaaatcgccttctaccggaaagatgggagctgcttcctatgtctggtggatgtggtgcccgtgaagaacgaggatggggctgtcatcatgttcatcctcaatttcgaggtggtgatggagaaggacatggtggggtccccggctcatgacaccaaccaccggggcccccccaccagctggctggccccaggccgcgccaagaccttccgcctgaagctgcccgcgctgctggcgctgacggcccgggagtcgtcggtgcggtcgggcggcgcgggcggcgcgggcgccccgggggccgtggtggtggacgtggacctgacgcccgcggcacccagcagcgagtcgctggccctggacgaagtgacagccatggacaaccacgtggcagggctcgggcccgcggaggagcggcgtgcgctggtgggtcccggctctccgccccgcagcgcgcccggccagctcccatcgccccgggcgcacagcctcaaccccgacgcctcgggctccagctgcagcctggcccggacgcgctcccgagaaagctgcgccagcgtgcgccgcgcctcgtcggccgacgacatcgaggccatgcgcgccggggtgctgcccccgccaccgcgccacgccagcaccggggccatgcacccactgcgcagcggcttgctcaactccacctcggactccgacctcgtgcgctaccgcaccattagcaagattccccaaatcaccctcaactttgtggacctcaagggcgaccccttcttggcttcgcccaccagtgaccgtgagatcatagcacctaagataaaggagcgaacccacaatgtcactgagaaggtcacccaggtcctgtccctgggcgccgacgtgctgcctgagtacaagctgcaggcaccgcgcatccaccgctggaccatcctgcattacagccccttcaaggccgtgtgggactggctcatcctgctgctggtcatctacacggctgtcttcacaccctactcggctgccttcctgctgaaggagacggaagaaggcccgcctgctaccgagtgtggctacgcctgccagccgctggctgtggtggacctcatcgtggacatcatgttcattgtggacatcctcatcaacttccgcaccacctacgtcaatgccaacgaggaggtggtcagccaccccggccgcatcgccgtccactacttcaagggctggttcctcatcgacatggtggccgccatccccttcgacctgctcatcttcggctctggctctgaggagctgatcgggctgctgaagactgcgcggctgctgcggctggtgcgcgtggcgcggaagctggatcgctactcagagtacggcgcggccgtgctgttcttgctcatgtgcacctttgcgctcatcgcgcactggctagcctgcatctggtacgccatcggcaacatggagcagccacacatggactcacgcatcggctggctgcacaacctgggcgaccagataggcaaaccctacaacagcagcggcctgggcggcccctccatcaaggacaagtatgtgacggcgctctacttcaccttcagcagcctcaccagtgtgggcttcggcaacgtctctcccaacaccaactcagagaagatcttctccatctgcatcatgctcattggctccctcatgtatgctagcatcttcggcaacgtgtcggccatcatccagcggctgtactcgggcacagcccgctaccacacacagatgctgcgggtgcgggagttcatccgcttccaccagatccccaatcccctgcgccagcgcctcgaggagtacttccagcacgcctggtcctacaccaacggcatcgacatgaacgcggtgctgaagggcttccctgagtgcctgcaggctgacatctgcctgcacctgaaccgctcactgctgcagcactgcaaacccttccgaggggccaccaagggctgccttcgggccctggccatgaagttcaagaccacacatgcaccgccaggggacacactggtgcatgctggggacctgctcaccgccctgtacttcatctcccggggctccatcgagatcctgcggggcgacgtcgtcgtggccatcctggggaagaatgacatctttggggagcctctgaacctgtatgcaaggcctggcaagtcgaacggggatgtgcgggccctcacctactgtgacctacacaagatccatcgggacgacctgctggaggtgctggacatgtaccctgagttctccgaccacttctggtccagcctggagatcaccttcaacctgcgagataccaacatgatcccgggctcccccggcagtacggagttagagggtggcttcagtcggcaacgcaagcgcaagttgtccttccgcaggcgcacggacaaggacacggagcagccaggggaggtgtcggccttggggccgggccgggcgggggcagggccgagtagccggggccggccgggggggccgtggggggagagcccgtccagtggcccctccagccctgagagcagtgaggatgagggcccaggccgcagctccagccccctccgcctggtgcccttctccagccccaggccccccggagagccgccgggtggggagcccctgatggaggactgcgagaagagcagcgacacttgcaaccccctgtcaggcgccttctcaggagtgtccaacattttcagcttctggggggacagtcggggccgccagtaccaggagctccctcgatgccccgcccccacccccagcctcctcaacatccccctctccagcccgggtcggcggccccggggcgacgtggagagcaggctggatgccctccagcgccagctcaacaggctggagacccggctgagtgcagacatggccactgtcctgcagctgctacagaggcagatgacgctggtcccgcccgcctacagtgctgtgaccaccccggggcctggccccacttccacatccccgctgttgcccgtcagccccctccccaccctcaccttggactcgctttctcaggtttcccagttcatggcgtgtgaggagctgcccccgggggccccagagcttccccaagaaggccccacacgacgcctctccctaccgggccagctgggggccctcacctcccagcccctgcacagacacggctcggacccgggcagttagtggggctgcccagtgtggacacgtggctcacccagggatcaaggcgctgctgggccgctccccttggaggccctgctcaggaggccctgaccgtggaaggggagaggaactcgaaagcacagctcctcccccagcccttgggaccatcttctcctgcagtcccctgggccccagtgagaggggcaggggcagggccggcagtaggtggggcctgtggtccccccactgccctgagggcattagctggtctaactgcccggaggcacccggccctgggccttaggcacctcaaggacttttctgctatttactgctcttattgttaaggataataattaaggatcatatgaataattaatgaagatgctgatgactatgaataataaataattatcctgaggaga

SEQ ID NO: 372 - DNA, 3884 bp, Homo sapiens
  source 1..3884: mol_type = genomic DNA
  misc_feature 1..3884: note = cDNA of KCNH2 gene SNP c.1930G>C (p.Val644Leu)
atgccggtgcggaggggccacgtcgcgccgcagaacaccttcctggacaccatcatccgcaagtttgagggccagagccgtaagttcatcatcgccaacgctcgggtggagaactgcgccgtcatctactgcaacgacggcttctgcgagctgtgcggctactcgcgggccgaggtgatgcagcgaccctgcacctgcgacttcctgcacgggccgcgcacgcagcgccgcgctgccgcgcagatcgcgcaggcactgctgggcgccgaggagcgcaaagtggaaatcgccttctaccggaaagatgggagctgcttcctatgtctggtggatgtggtgcccgtgaagaacgaggatggggctgtcatcatgttcatcctcaatttcgaggtggtgatggagaaggacatggtggggtccccggctcatgacaccaaccaccggggcccccccaccagctggctggccccaggccgcgccaagaccttccgcctgaagctgcccgcgctgctggcgctgacggcccgggagtcgtcggtgcggtcgggcggcgcgggcggcgcgggcgccccgggggccgtggtggtggacgtggacctgacgcccgcggcacccagcagcgagtcgctggccctggacgaagtgacagccatggacaaccacgtggcagggctcgggcccgcggaggagcggcgtgcgctggtgggtcccggctctccgccccgcagcgcgcccggccagctcccatcgccccgggcgcacagcctcaaccccgacgcctcgggctccagctgcagcctggcccggacgcgctcccgagaaagctgcgccagcgtgcgccgcgcctcgtcggccgacgacatcgaggccatgcgcgccggggtgctgcccccgccaccgcgccacgccagcaccggggccatgcacccactgcgcagcggcttgctcaactccacctcggactccgacctcgtgcgctaccgcaccattagcaagattccccaaatcaccctcaactttgtggacctcaagggcgaccccttcttggcttcgcccaccagtgaccgtgagatcatagcacctaagataaaggagcgaacccacaatgtcactgagaaggtcacccaggtcctgtccctgggcgccgacgtgctgcctgagtacaagctgcaggcaccgcgcatccaccgctggaccatcctgcattacagccccttcaaggccgtgtgggactggctcatcctgctgctggtcatctacacggctgtcttcacaccctactcggctgccttcctgctgaaggagacggaagaaggcccgcctgctaccgagtgtggctacgcctgccagccgctggctgtggtggacctcatcgtggacatcatgttcattgtggacatcctcatcaacttccgcaccacctacgtcaatgccaacgaggaggtggtcagccaccccggccgcatcgccgtccactacttcaagggctggttcctcatcgacatggtggccgccatccccttcgacctgctcatcttcggctctggctctgaggagctgatcgggctgctgaagactgcgcggctgctgcggctggtgcgcgtggcgcggaagctggatcgctactcagagtacggcgcggccgtgctgttcttgctcatgtgcacctttgcgctcatcgcgcactggctagcctgcatctggtacgccatcggcaacatggagcagccacacatggactcacgcatcggctggctgcacaacctgggcgaccagataggcaaaccctacaacagcagcggcctgggcggcccctccatcaaggacaagtatgtgacggcgctctacttcaccttcagcagcctcaccagtgtgggcttcggcaacgtctctcccaacaccaactcagagaagatcttctccatctgcctcatgctcattggctccctcatgtatgctagcatcttcggcaacgtgtcggccatcatccagcggctgtactcgggcacagcccgctaccacacacagatgctgcgggtgcgggagttcatccgcttccaccagatccccaatcccctgcgccagcgcctcgaggagtacttccagcacgcctggtcctacaccaacggcatcgacatgaacgcggtgctgaagggcttccctgagtgcctgcaggctgacatctgcctgcacctgaaccgctcactgctgcagcactgcaaacccttccgaggggccaccaagggctgccttcgggccctggccatgaagttcaagaccacacatgcaccgccaggggacacactggtgcatgctggggacctgctcaccgccctgtacttcatctcccggggctccatcgagatcctgcggggcgacgtcgtcgtggccatcctggggaagaatgacatctttggggagcctctgaacctgtatgcaaggcctggcaagtcgaacggggatgtgcgggccctcacctactgtgacctacacaagatccatcgggacgacctgctggaggtgctggacatgtaccctgagttctccgaccacttctggtccagcctggagatcaccttcaacctgcgagataccaacatgatcccgggctcccccggcagtacggagttagagggtggcttcagtcggcaacgcaagcgcaagttgtccttccgcaggcgcacggacaaggacacggagcagccaggggaggtgtcggccttggggccgggccgggcgggggcagggccgagtagccggggccggccgggggggccgtggggggagagcccgtccagtggcccctccagccctgagagcagtgaggatgagggcccaggccgcagctccagccccctccgcctggtgcccttctccagccccaggccccccggagagccgccgggtggggagcccctgatggaggactgcgagaagagcagcgacacttgcaaccccctgtcaggcgccttctcaggagtgtccaacattttcagcttctggggggacagtcggggccgccagtaccaggagctccctcgatgccccgcccccacccccagcctcctcaacatccccctctccagcccgggtcggcggccccggggcgacgtggagagcaggctggatgccctccagcgccagctcaacaggctggagacccggctgagtgcagacatggccactgtcctgcagctgctacagaggcagatgacgctggtcccgcccgcctacagtgctgtgaccaccccggggcctggccccacttccacatccccgctgttgcccgtcagccccctccccaccctcaccttggactcgctttctcaggtttcccagttcatggcgtgtgaggagctgcccccgggggccccagagcttccccaagaaggccccacacgacgcctctccctaccgggccagctgggggccctcacctcccagcccctgcacagacacggctcggacccgggcagttagtggggctgcccagtgtggacacgtggctcacccagggatcaaggcgctgctgggccgctccccttggaggccctgctcaggaggccctgaccgtggaaggggagaggaactcgaaagcacagctcctcccccagcccttgggaccatcttctcctgcagtcccctgggccccagtgagaggggcaggggcagggccggcagtaggtggggcctgtggtccccccactgccctgagggcattagctggtctaactgcccggaggcacccggccctgggccttaggcacctcaaggacttttctgctatttactgctcttattgttaaggataataattaaggatcatatgaataattaatgaagatgctgatgactatgaataataaataattatcctgaggaga

SEQ ID NO: 373 - DNA, 3884 bp, Homo sapiens
  source 1..3884: mol_type = genomic DNA
  misc_feature 1..3884: note = cDNA of KCNH2 gene SNP c.1930G>T (p.Val644Phe)
atgccggtgcggaggggccacgtcgcgccgcagaacaccttcctggacaccatcatccgcaagtttgagggccagagccgtaagttcatcatcgccaacgctcgggtggagaactgcgccgtcatctactgcaacgacggcttctgcgagctgtgcggctactcgcgggccgaggtgatgcagcgaccctgcacctgcgacttcctgcacgggccgcgcacgcagcgccgcgctgccgcgcagatcgcgcaggcactgctgggcgccgaggagcgcaaagtggaaatcgccttctaccggaaagatgggagctgcttcctatgtctggtggatgtggtgcccgtgaagaacgaggatggggctgtcatcatgttcatcctcaatttcgaggtggtgatggagaaggacatggtggggtccccggctcatgacaccaaccaccggggcccccccaccagctggctggccccaggccgcgccaagaccttccgcctgaagctgcccgcgctgctggcgctgacggcccgggagtcgtcggtgcggtcgggcggcgcgggcggcgcgggcgccccgggggccgtggtggtggacgtggacctgacgcccgcggcacccagcagcgagtcgctggccctggacgaagtgacagccatggacaaccacgtggcagggctcgggcccgcggaggagcggcgtgcgctggtgggtcccggctctccgccccgcagcgcgcccggccagctcccatcgccccgggcgcacagcctcaaccccgacgcctcgggctccagctgcagcctggcccggacgcgctcccgagaaagctgcgccagcgtgcgccgcgcctcgtcggccgacgacatcgaggccatgcgcgccggggtgctgcccccgccaccgcgccacgccagcaccggggccatgcacccactgcgcagcggcttgctcaactccacctcggactccgacctcgtgcgctaccgcaccattagcaagattccccaaatcaccctcaactttgtggacctcaagggcgaccccttcttggcttcgcccaccagtgaccgtgagatcatagcacctaagataaaggagcgaacccacaatgtcactgagaaggtcacccaggtcctgtccctgggcgccgacgtgctgcctgagtacaagctgcaggcaccgcgcatccaccgctggaccatcctgcattacagccccttcaaggccgtgtgggactggctcatcctgctgctggtcatctacacggctgtcttcacaccctactcggctgccttcctgctgaaggagacggaagaaggcccgcctgctaccgagtgtggctacgcctgccagccgctggctgtggtggacctcatcgtggacatcatgttcattgtggacatcctcatcaacttccgcaccacctacgtcaatgccaacgaggaggtggtcagccaccccggccgcatcgccgtccactacttcaagggctggttcctcatcgacatggtggccgccatccccttcgacctgctcatcttcggctctggctctgaggagctgatcgggctgctgaagactgcgcggctgctgcggctggtgcgcgtggcgcggaagctggatcgctactcagagtacggcgcggccgtgctgttcttgctcatgtgcacctttgcgctcatcgcgcactggctagcctgcatctggtacgccatcggcaacatggagcagccacacatggactcacgcatcggctggctgcacaacctgggcgaccagataggcaaaccctacaacagcagcggcctgggcggcccctccatcaaggacaagtatgtgacggcgctctacttcaccttcagcagcctcaccagtgtgggcttcggcaacgtctctcccaacaccaactcagagaagatcttctccatctgcttcatgctcattggctccctcatgtatgctagcatcttcggcaacgtgtcggccatcatccagcggctgtactcgggcacagcccgctaccacacacagatgctgcgggtgcgggagttcatccgcttccaccagatccccaatcccctgcgccagcgcctcgaggagtacttccagcacgcctggtcctacaccaacggcatcgacatgaacgcggtgctgaagggcttccctgagtgcctgcaggctgacatctgcctgcacctgaaccgctcactgctgcagcactgcaaacccttccgaggggccaccaagggctgccttcgggccctggccatgaagttcaagaccacacatgcaccgccaggggacacactggtgcatgctggggacctgctcaccgccctgtacttcatctcccggggctccatcgagatcctgcggggcgacgtcgtcgtggccatcctggggaagaatgacatctttggggagcctctgaacctgtatgcaaggcctggcaagtcgaacggggatgtgcgggccctcacctactgtgacctacacaagatccatcgggacgacctgctggaggtgctggacatgtaccctgagttctccgaccacttctggtccagcctggagatcaccttcaacctgcgagataccaacatgatcccgggctcccccggcagtacggagttagagggtggcttcagtcggcaacgcaagcgcaagttgtccttccgcaggcgcacggacaaggacacggagcagccaggggaggtgtcggccttggggccgggccgggcgggggcagggccgagtagccggggccggccgggggggccgtggggggagagcccgtccagtggcccctccagccctgagagcagtgaggatgagggcccaggccgcagctccagccccctccgcctggtgcccttctccagccccaggccccccggagagccgccgggtggggagcccctgatggaggactgcgagaagagcagcgacacttgcaaccccctgtcaggcgccttctcaggagtgtccaacattttcagcttctggggggacagtcggggccgccagtaccaggagctccctcgatgccccgcccccacccccagcctcctcaacatccccctctccagcccgggtcggcggccccggggcgacgtggagagcaggctggatgccctccagcgccagctcaacaggctggagacccggctgagtgcagacatggccactgtcctgcagctgctacagaggcagatgacgctggtcccgcccgcctacagtgctgtgaccaccccggggcctggccccacttccacatccccgctgttgcccgtcagccccctccccaccctcaccttggactcgctttctcaggtttcccagttcatggcgtgtgaggagctgcccccgggggccccagagcttccccaagaaggccccacacgacgcctctccctaccgggccagctgggggccctcacctcccagcccctgcacagacacggctcggacccgggcagttagtggggctgcccagtgtggacacgtggctcacccagggatcaaggcgctgctgggccgctccccttggaggccctgctcaggaggccctgaccgtggaaggggagaggaactcgaaagcacagctcctcccccagcccttgggaccatcttctcctgcagtcccctgggccccagtgagaggggcaggggcagggccggcagtaggtggggcctgtggtccccccactgccctgagggcattagctggtctaactgcccggaggcacccggccctgggccttaggcacctcaaggacttttctgctatttactgctcttattgttaaggataataattaaggatcatatgaataattaatgaagatgctgatgactatgaataataaataattatcctgaggaga

SEQ ID NO: 374 - DNA, 3884 bp, Homo sapiens
  source 1..3884: mol_type = genomic DNA
  misc_feature 1..3884: note = cDNA of KCNH2 gene SNP c.1933A>C (p.Met645Leu)
atgccggtgcggaggggccacgtcgcgccgcagaacaccttcctggacaccatcatccgcaagtttgagggccagagccgtaagttcatcatcgccaacgctcgggtggagaactgcgccgtcatctactgcaacgacggcttctgcgagctgtgcggctactcgcgggccgaggtgatgcagcgaccctgcacctgcgacttcctgcacgggccgcgcacgcagcgccgcgctgccgcgcagatcgcgcaggcactgctgggcgccgaggagcgcaaagtggaaatcgccttctaccggaaagatgggagctgcttcctatgtctggtggatgtggtgcccgtgaagaacgaggatggggctgtcatcatgttcatcctcaatttcgaggtggtgatggagaaggacatggtggggtccccggctcatgacaccaaccaccggggcccccccaccagctggctggccccaggccgcgccaagaccttccgcctgaagctgcccgcgctgctggcgctgacggcccgggagtcgtcggtgcggtcgggcggcgcgggcggcgcgggcgccccgggggccgtggtggtggacgtggacctgacgcccgcggcacccagcagcgagtcgctggccctggacgaagtgacagccatggacaaccacgtggcagggctcgggcccgcggaggagcggcgtgcgctggtgggtcccggctctccgccccgcagcgcgcccggccagctcccatcgccccgggcgcacagcctcaaccccgacgcctcgggctccagctgcagcctggcccggacgcgctcccgagaaagctgcgccagcgtgcgccgcgcctcgtcggccgacgacatcgaggccatgcgcgccggggtgctgcccccgccaccgcgccacgccagcaccggggccatgcacccactgcgcagcggcttgctcaactccacctcggactccgacctcgtgcgctaccgcaccattagcaagattccccaaatcaccctcaactttgtggacctcaagggcgaccccttcttggcttcgcccaccagtgaccgtgagatcatagcacctaagataaaggagcgaacccacaatgtcactgagaaggtcacccaggtcctgtccctgggcgccgacgtgctgcctgagtacaagctgcaggcaccgcgcatccaccgctggaccatcctgcattacagccccttcaaggccgtgtgggactggctcatcctgctgctggtcatctacacggctgtcttcacaccctactcggctgccttcctgctgaaggagacggaagaaggcccgcctgctaccgagtgtggctacgcctgccagccgctggctgtggtggacctcatcgtggacatcatgttcattgtggacatcctcatcaacttccgcaccacctacgtcaatgccaacgaggaggtggtcagccaccccggccgcatcgccgtccactacttcaagggctggttcctcatcgacatggtggccgccatccccttcgacctgctcatcttcggctctggctctgaggagctgatcgggctgctgaagactgcgcggctgctgcggctggtgcgcgtggcgcggaagctggatcgctactcagagtacggcgcggccgtgctgttcttgctcatgtgcacctttgcgctcatcgcgcactggctagcctgcatctggtacgccatcggcaacatggagcagccacacatggactcacgcatcggctggctgcacaacctgggcgaccagataggcaaaccctacaacagcagcggcctgggcggcccctccatcaaggacaagtatgtgacggcgctctacttcaccttcagcagcctcaccagtgtgggcttcggcaacgtctctcccaacaccaactcagagaagatcttctccatctgcgtcctgctcattggctccctcatgtatgctagcatcttcggcaacgtgtcggccatcatccagcggctgtactcgggcacagcccgctaccacacacagatgctgcgggtgcgggagttcatccgcttccaccagatccccaatcccctgcgccagcgcctcgaggagtacttccagcacgcctggtcctacaccaacggcatcgacatgaacgcggtgctgaagggcttccctgagtgcctgcaggctgacatctgcctgcacctgaaccgctcactgctgcagcactgcaaacccttccgaggggccaccaagggctgccttcgggccctggccatgaagttcaagaccacacatgcaccgccaggggacacactggtgcatgctggggacctgctcaccgccctgtacttcatctcccggggctccatcgagatcctgcggggcgacgtcgtcgtggccatcctggggaagaatgacatctttggggagcctctgaacctgtatgcaaggcctggcaagtcgaacggggatgtgcgggccctcacctactgtgacctacacaagatccatcgggacgacctgctggaggtgctggacatgtaccctgagttctccgaccacttctggtccagcctggagatcaccttcaacctgcgagataccaacatgatcccgggctcccccggcagtacggagttagagggtggcttcagtcggcaacgcaagcgcaagttgtccttccgcaggcgcacggacaaggacacggagcagccaggggaggtgtcggccttggggccgggccgggcgggggcagggccgagtagccggggccggccgggggggccgtggggggagagcccgtccagtggcccctccagccctgagagcagtgaggatgagggcccaggccgcagctccagccccctccgcctggtgcccttctccagccccaggccccccggagagccgccgggtggggagcccctgatggaggactgcgagaagagcagcgacacttgcaaccccctgtcaggcgccttctcaggagtgtccaacattttcagcttctggggggacagtcggggccgccagtaccaggagctccctcgatgccccgcccccacccccagcctcctcaacatccccctctccagcccgggtcggcggccccggggcgacgtggagagcaggctggatgccctccagcgccagctcaacaggctggagacccggctgagtgcagacatggccactgtcctgcagctgctacagaggcagatgacgctggtcccgcccgcctacagtgctgtgaccaccccggggcctggccccacttccacatccccgctgttgcccgtcagccccctccccaccctcaccttggactcgctttctcaggtttcccagttcatggcgtgtgaggagctgcccccgggggccccagagcttccccaagaaggccccacacgacgcctctccctaccgggccagctgggggccctcacctcccagcccctgcacagacacggctcggacccgggcagttagtggggctgcccagtgtggacacgtggctcacccagggatcaaggcgctgctgggccgctccccttggaggccctgctcaggaggccctgaccgtggaaggggagaggaactcgaaagcacagctcctcccccagcccttgggaccatcttctcctgcagtcccctgggccccagtgagaggggcaggggcagggccggcagtaggtggggcctgtggtccccccactgccctgagggcattagctggtctaactgcccggaggcacccggccctgggccttaggcacctcaaggacttttctgctatttactgctcttattgttaaggataataattaaggatcatatgaataattaatgaagatgctgatgactatgaataataaataattatcctgaggaga

SEQ ID NO: 375 - DNA, 3884 bp, Homo sapiens
  source 1..3884: mol_type = genomic DNA
  misc_feature 1..3884: note = cDNA of KCNH2 gene SNP c.1933A>G (p.Met645Val)
atgccggtgcggaggggccacgtcgcgccgcagaacaccttcctggacaccatcatccgcaagtttgagggccagagccgtaagttcatcatcgccaacgctcgggtggagaactgcgccgtcatctactgcaacgacggcttctgcgagctgtgcggctactcgcgggccgaggtgatgcagcgaccctgcacctgcgacttcctgcacgggccgcgcacgcagcgccgcgctgccgcgcagatcgcgcaggcactgctgggcgccgaggagcgcaaagtggaaatcgccttctaccggaaagatgggagctgcttcctatgtctggtggatgtggtgcccgtgaagaacgaggatggggctgtcatcatgttcatcctcaatttcgaggtggtgatggagaaggacatggtggggtccccggctcatgacaccaaccaccggggcccccccaccagctggctggccccaggccgcgccaagaccttccgcctgaagctgcccgcgctgctggcgctgacggcccgggagtcgtcggtgcggtcgggcggcgcgggcggcgcgggcgccccgggggccgtggtggtggacgtggacctgacgcccgcggcacccagcagcgagtcgctggccctggacgaagtgacagccatggacaaccacgtggcagggctcgggcccgcggaggagcggcgtgcgctggtgggtcccggctctccgccccgcagcgcgcccggccagctcccatcgccccgggcgcacagcctcaaccccgacgcctcgggctccagctgcagcctggcccggacgcgctcccgagaaagctgcgccagcgtgcgccgcgcctcgtcggccgacgacatcgaggccatgcgcgccggggtgctgcccccgccaccgcgccacgccagcaccggggccatgcacccactgcgcagcggcttgctcaactccacctcggactccgacctcgtgcgctaccgcaccattagcaagattccccaaatcaccctcaactttgtggacctcaagggcgaccccttcttggcttcgcccaccagtgaccgtgagatcatagcacctaagataaaggagcgaacccacaatgtcactgagaaggtcacccaggtcctgtccctgggcgccgacgtgctgcctgagtacaagctgcaggcaccgcgcatccaccgctggaccatcctgcattacagccccttcaaggccgtgtgggactggctcatcctgctgctggtcatctacacggctgtcttcacaccctactcggctgccttcctgctgaaggagacggaagaaggcccgcctgctaccgagtgtggctacgcctgccagccgctggctgtggtggacctcatcgtggacatcatgttcattgtggacatcctcatcaacttccgcaccacctacgtcaatgccaacgaggaggtggtcagccaccccggccgcatcgccgtccactacttcaagggctggttcctcatcgacatggtggccgccatccccttcgacctgctcatcttcggctctggctctgaggagctgatcgggctgctgaagactgcgcggctgctgcggctggtgcgcgtggcgcggaagctggatcgctactcagagtacggcgcggccgtgctgttcttgctcatgtgcacctttgcgctcatcgcgcactggctagcctgcatctggtacgccatcggcaacatggagcagccacacatggactcacgcatcggctggctgcacaacctgggcgaccagataggcaaaccctacaacagcagcggcctgggcggcccctccatcaaggacaagtatgtgacggcgctctacttcaccttcagcagcctcaccagtgtgggcttcggcaacgtctctcccaacaccaactcagagaagatcttctccatctgcgtcgtgctcattggctccctcatgtatgctagcatcttcggcaacgtgtcggccatcatccagcggctgtactcgggcacagcccgctaccacacacagatgctgcgggtgcgggagttcatccgcttccaccagatccccaatcccctgcgccagcgcctcgaggagtacttccagcacgcctggtcctacaccaacggcatcgacatgaacgcggtgctgaagggcttccctgagtgcctgcaggctgacatctgcctgcacctgaaccgctcactgctgcagcactgcaaacccttccgaggggccaccaagggctgccttcgggccctggccatgaagttcaagaccacacatgcaccgccaggggacacactggtgcatgctggggacctgctcaccgccctgtacttcatctcccggggctccatcgagatcctgcggggcgacgtcgtcgtggccatcctggggaagaatgacatctttggggagcctctgaacctgtatgcaaggcctggcaagtcgaacggggatgtgcgggccctcacctactgtgacctacacaagatccatcgggacgacctgctggaggtgctggacatgtaccctgagttctccgaccacttctggtccagcctggagatcaccttcaacctgcgagataccaacatgatcccgggctcccccggcagtacggagttagagggtggcttcagtcggcaacgcaagcgcaagttgtccttccgcaggcgcacggacaaggacacggagcagccaggggaggtgtcggccttggggccgggccgggcgggggcagggccgagtagccggggccggccgggggggccgtggggggagagcccgtccagtggcccctccagccctgagagcagtgaggatgagggcccaggccgcagctccagccccctccgcctggtgcccttctccagccccaggccccccggagagccgccgggtggggagcccctgatggaggactgcgagaagagcagcgacacttgcaaccccctgtcaggcgccttctcaggagtgtccaacattttcagcttctggggggacagtcggggccgccagtaccaggagctccctcgatgccccgcccccacccccagcctcctcaacatccccctctccagcccgggtcggcggccccggggcgacgtggagagcaggctggatgccctccagcgccagctcaacaggctggagacccggctgagtgcagacatggccactgtcctgcagctgctacagaggcagatgacgctggtcccgcccgcctacagtgctgtgaccaccccggggcctggccccacttccacatccccgctgttgcccgtcagccccctccccaccctcaccttggactcgctttctcaggtttcccagttcatggcgtgtgaggagctgcccccgggggccccagagcttccccaagaaggccccacacgacgcctctccctaccgggccagctgggggccctcacctcccagcccctgcacagacacggctcggacccgggcagttagtggggctgcccagtgtggacacgtggctcacccagggatcaaggcgctgctgggccgctccccttggaggccctgctcaggaggccctgaccgtggaaggggagaggaactcgaaagcacagctcctcccccagcccttgggaccatcttctcctgcagtcccctgggccccagtgagaggggcaggggcagggccggcagtaggtggggcctgtggtccccccactgccctgagggcattagctggtctaactgcccggaggcacccggccctgggccttaggcacctcaaggacttttctgctatttactgctcttattgttaaggataataattaaggatcatatgaataattaatgaagatgctgatgactatgaataataaataattatcctgaggaga

SEQ ID NO: 376 - DNA, 3884 bp, Homo sapiens
  source 1..3884: mol_type = genomic DNA
  misc_feature 1..3884: note = cDNA of KCNH2 gene SNP c.1933A>T (p.Met645Leu)
atgccggtgcggaggggccacgtcgcgccgcagaacaccttcctggacaccatcatccgcaagtttgagggccagagccgtaagttcatcatcgccaacgctcgggtggagaactgcgccgtcatctactgcaacgacggcttctgcgagctgtgcggctactcgcgggccgaggtgatgcagcgaccctgcacctgcgacttcctgcacgggccgcgcacgcagcgccgcgctgccgcgcagatcgcgcaggcactgctgggcgccgaggagcgcaaagtggaaatcgccttctaccggaaagatgggagctgcttcctatgtctggtggatgtggtgcccgtgaagaacgaggatggggctgtcatcatgttcatcctcaatttcgaggtggtgatggagaaggacatggtggggtccccggctcatgacaccaaccaccggggcccccccaccagctggctggccccaggccgcgccaagaccttccgcctgaagctgcccgcgctgctggcgctgacggcccgggagtcgtcggtgcggtcgggcggcgcgggcggcgcgggcgccccgggggccgtggtggtggacgtggacctgacgcccgcggcacccagcagcgagtcgctggccctggacgaagtgacagccatggacaaccacgtggcagggctcgggcccgcggaggagcggcgtgcgctggtgggtcccggctctccgccccgcagcgcgcccggccagctcccatcgccccgggcgcacagcctcaaccccgacgcctcgggctccagctgcagcctggcccggacgcgctcccgagaaagctgcgccagcgtgcgccgcgcctcgtcggccgacgacatcgaggccatgcgcgccggggtgctgcccccgccaccgcgccacgccagcaccggggccatgcacccactgcgcagcggcttgctcaactccacctcggactccgacctcgtgcgctaccgcaccattagcaagattccccaaatcaccctcaactttgtggacctcaagggcgaccccttcttggcttcgcccaccagtgaccgtgagatcatagcacctaagataaaggagcgaacccacaatgtcactgagaaggtcacccaggtcctgtccctgggcgccgacgtgctgcctgagtacaagctgcaggcaccgcgcatccaccgctggaccatcctgcattacagccccttcaaggccgtgtgggactggctcatcctgctgctggtcatctacacggctgtcttcacaccctactcggctgccttcctgctgaaggagacggaagaaggcccgcctgctaccgagtgtggctacgcctgccagccgctggctgtggtggacctcatcgtggacatcatgttcattgtggacatcctcatcaacttccgcaccacctacgtcaatgccaacgaggaggtggtcagccaccccggccgcatcgccgtccactacttcaagggctggttcctcatcgacatggtggccgccatccccttcgacctgctcatcttcggctctggctctgaggagctgatcgggctgctgaagactgcgcggctgctgcggctggtgcgcgtggcgcggaagctggatcgctactcagagtacggcgcggccgtgctgttcttgctcatgtgcacctttgcgctcatcgcgcactggctagcctgcatctggtacgccatcggcaacatggagcagccacacatggactcacgcatcggctggctgcacaacctgggcgaccagataggcaaaccctacaacagcagcggcctgggcggcccctccatcaaggacaagtatgtgacggcgctctacttcaccttcagcagcctcaccagtgtgggcttcggcaacgtctctcccaacaccaactcagagaagatcttctccatctgcgtcttgctcattggctccctcatgtatgctagcatcttcggcaacgtgtcggccatcatccagcggctgtactcgggcacagcccgctaccacacacagatgctgcgggtgcgggagttcatccgcttccaccagatccccaatcccctgcgccagcgcctcgaggagtacttccagcacgcctggtcctacaccaacggcatcgacatgaacgcggtgctgaagggcttccctgagtgcctgcaggctgacatctgcctgcacctgaaccgctcactgctgcagcactgcaaacccttccgaggggccaccaagggctgccttcgggccctggccatgaagttcaagaccacacatgcaccgccaggggacacactggtgcatgctggggacctgctcaccgccctgtacttcatctcccggggctccatcgagatcctgcggggcgacgtcgtcgtggccatcctggggaagaatgacatctttggggagcctctgaacctgtatgcaaggcctggcaagtcgaacggggatgtgcgggccctcacctactgtgacctacacaagatccatcgggacgacctgctggaggtgctggacatgtaccctgagttctccgaccacttctggtccagcctggagatcaccttcaacctgcgagataccaacatgatcccgggctcccccggcagtacggagttagagggtggcttcagtcggcaacgcaagcgcaagttgtccttccgcaggcgcacggacaaggacacggagcagccaggggaggtgtcggccttggggccgggccgggcgggggcagggccgagtagccggggccggccgggggggccgtggggggagagcccgtccagtggcccctccagccctgagagcagtgaggatgagggcccaggccgcagctccagccccctccgcctggtgcccttctccagccccaggccccccggagagccgccgggtggggagcccctgatggaggactgcgagaagagcagcgacacttgcaaccccctgtcaggcgccttctcaggagtgtccaacattttcagcttctggggggacagtcggggccgccagtaccaggagctccctcgatgccccgcccccacccccagcctcctcaacatccccctctccagcccgggtcggcggccccggggcgacgtggagagcaggctggatgccctccagcgccagctcaacaggctggagacccggctgagtgcagacatggccactgtcctgcagctgctacagaggcagatgacgctggtcccgcccgcctacagtgctgtgaccaccccggggcctggccccacttccacatccccgctgttgcccgtcagccccctccccaccctcaccttggactcgctttctcaggtttcccagttcatggcgtgtgaggagctgcccccgggggccccagagcttccccaagaaggccccacacgacgcctctccctaccgggccagctgggggccctcacctcccagcccctgcacagacacggctcggacccgggcagttagtggggctgcccagtgtggacacgtggctcacccagggatcaaggcgctgctgggccgctccccttggaggccctgctcaggaggccctgaccgtggaaggggagaggaactcgaaagcacagctcctcccccagcccttgggaccatcttctcctgcagtcccctgggccccagtgagaggggcaggggcagggccggcagtaggtggggcctgtggtccccccactgccctgagggcattagctggtctaactgcccggaggcacccggccctgggccttaggcacctcaaggacttttctgctatttactgctcttattgttaaggataataattaaggatcatatgaataattaatgaagatgctgatgactatgaataataaataattatcctgaggaga

SEQ ID NO: 377 - DNA, 3884 bp, Homo sapiens
  source 1..3884: mol_type = genomic DNA
  misc_feature 1..3884: note = cDNA of KCNH2 gene SNP c.1935G>A (p.Met645Ile)
atgccggtgcggaggggccacgtcgcgccgcagaacaccttcctggacaccatcatccgcaagtttgagggccagagccgtaagttcatcatcgccaacgctcgggtggagaactgcgccgtcatctactgcaacgacggcttctgcgagctgtgcggctactcgcgggccgaggtgatgcagcgaccctgcacctgcgacttcctgcacgggccgcgcacgcagcgccgcgctgccgcgcagatcgcgcaggcactgctgggcgccgaggagcgcaaagtggaaatcgccttctaccggaaagatgggagctgcttcctatgtctggtggatgtggtgcccgtgaagaacgaggatggggctgtcatcatgttcatcctcaatttcgaggtggtgatggagaaggacatggtggggtccccggctcatgacaccaaccaccggggcccccccaccagctggctggccccaggccgcgccaagaccttccgcctgaagctgcccgcgctgctggcgctgacggcccgggagtcgtcggtgcggtcgggcggcgcgggcggcgcgggcgccccgggggccgtggtggtggacgtggacctgacgcccgcggcacccagcagcgagtcgctggccctggacgaagtgacagccatggacaaccacgtggcagggctcgggcccgcggaggagcggcgtgcgctggtgggtcccggctctccgccccgcagcgcgcccggccagctcccatcgccccgggcgcacagcctcaaccccgacgcctcgggctccagctgcagcctggcccggacgcgctcccgagaaagctgcgccagcgtgcgccgcgcctcgtcggccgacgacatcgaggccatgcgcgccggggtgctgcccccgccaccgcgccacgccagcaccggggccatgcacccactgcgcagcggcttgctcaactccacctcggactccgacctcgtgcgctaccgcaccattagcaagattccccaaatcaccctcaactttgtggacctcaagggcgaccccttcttggcttcgcccaccagtgaccgtgagatcatagcacctaagataaaggagcgaacccacaatgtcactgagaaggtcacccaggtcctgtccctgggcgccgacgtgctgcctgagtacaagctgcaggcaccgcgcatccaccgctggaccatcctgcattacagccccttcaaggccgtgtgggactggctcatcctgctgctggtcatctacacggctgtcttcacaccctactcggctgccttcctgctgaaggagacggaagaaggcccgcctgctaccgagtgtggctacgcctgccagccgctggctgtggtggacctcatcgtggacatcatgttcattgtggacatcctcatcaacttccgcaccacctacgtcaatgccaacgaggaggtggtcagccaccccggccgcatcgccgtccactacttcaagggctggttcctcatcgacatggtggccgccatccccttcgacctgctcatcttcggctctggctctgaggagctgatcgggctgctgaagactgcgcggctgctgcggctggtgcgcgtggcgcggaagctggatcgctactcagagtacggcgcggccgtgctgttcttgctcatgtgcacctttgcgctcatcgcgcactggctagcctgcatctggtacgccatcggcaacatggagcagccacacatggactcacgcatcggctggctgcacaacctgggcgaccagataggcaaaccctacaacagcagcggcctgggcggcccctccatcaaggacaagtatgtgacggcgctctacttcaccttcagcagcctcaccagtgtgggcttcggcaacgtctctcccaacaccaactcagagaagatcttctccatctgcgtcatactcattggctccctcatgtatgctagcatcttcggcaacgtgtcggccatcatccagcggctgtactcgggcacagcccgctaccacacacagatgctgcgggtgcgggagttcatccgcttccaccagatccccaatcccctgcgccagcgcctcgaggagtacttccagcacgcctggtcctacaccaacggcatcgacatgaacgcggtgctgaagggcttccctgagtgcctgcaggctgacatctgcctgcacctgaaccgctcactgctgcagcactgcaaacccttccgaggggccaccaagggctgccttcgggccctggccatgaagttcaagaccacacatgcaccgccaggggacacactggtgcatgctggggacctgctcaccgccctgtacttcatctcccggggctccatcgagatcctgcggggcgacgtcgtcgtggccatcctggggaagaatgacatctttggggagcctctgaacctgtatgcaaggcctggcaagtcgaacggggatgtgcgggccctcacctactgtgacctacacaagatccatcgggacgacctgctggaggtgctggacatgtaccctgagttctccgaccacttctggtccagcctggagatcaccttcaacctgcgagataccaacatgatcccgggctcccccggcagtacggagttagagggtggcttcagtcggcaacgcaagcgcaagttgtccttccgcaggcgcacggacaaggacacggagcagccaggggaggtgtcggccttggggccgggccgggcgggggcagggccgagtagccggggccggccgggggggccgtggggggagagcccgtccagtggcccctccagccctgagagcagtgaggatgagggcccaggccgcagctccagccccctccgcctggtgcccttctccagccccaggccccccggagagccgccgggtggggagcccctgatggaggactgcgagaagagcagcgacacttgcaaccccctgtcaggcgccttctcaggagtgtccaacattttcagcttctggggggacagtcggggccgccagtaccaggagctccctcgatgccccgcccccacccccagcctcctcaacatccccctctccagcccgggtcggcggccccggggcgacgtggagagcaggctggatgccctccagcgccagctcaacaggctggagacccggctgagtgcagacatggccactgtcctgcagctgctacagaggcagatgacgctggtcccgcccgcctacagtgctgtgaccaccccggggcctggccccacttccacatccccgctgttgcccgtcagccccctccccaccctcaccttggactcgctttctcaggtttcccagttcatggcgtgtgaggagctgcccccgggggccccagagcttccccaagaaggccccacacgacgcctctccctaccgggccagctgggggccctcacctcccagcccctgcacagacacggctcggacccgggcagttagtggggctgcccagtgtggacacgtggctcacccagggatcaaggcgctgctgggccgctccccttggaggccctgctcaggaggccctgaccgtggaaggggagaggaactcgaaagcacagctcctcccccagcccttgggaccatcttctcctgcagtcccctgggccccagtgagaggggcaggggcagggccggcagtaggtggggcctgtggtccccccactgccctgagggcattagctggtctaactgcccggaggcacccggccctgggccttaggcacctcaaggacttttctgctatttactgctcttattgttaaggataataattaaggatcatatgaataattaatgaagatgctgatgactatgaataataaataattatcctgaggaga

SEQ ID NO: 378 - DNA, 3884 bp, Homo sapiens
  source 1..3884: mol_type = genomic DNA
  misc_feature 1..3884: note = cDNA of KCNH2 gene SNP c.193A>C (p.Thr65Pro)
atgccggtgcggaggggccacgtcgcgccgcagaacaccttcctggacaccatcatccgcaagtttgagggccagagccgtaagttcatcatcgccaacgctcgggtggagaactgcgccgtcatctactgcaacgacggcttctgcgagctgtgcggctactcgcgggccgaggtgatgcagcgaccctgcccctgcgacttcctgcacgggccgcgcacgcagcgccgcgctgccgcgcagatcgcgcaggcactgctgggcgccgaggagcgcaaagtggaaatcgccttctaccggaaagatgggagctgcttcctatgtctggtggatgtggtgcccgtgaagaacgaggatggggctgtcatcatgttcatcctcaatttcgaggtggtgatggagaaggacatggtggggtccccggctcatgacaccaaccaccggggcccccccaccagctggctggccccaggccgcgccaagaccttccgcctgaagctgcccgcgctgctggcgctgacggcccgggagtcgtcggtgcggtcgggcggcgcgggcggcgcgggcgccccgggggccgtggtggtggacgtggacctgacgcccgcggcacccagcagcgagtcgctggccctggacgaagtgacagccatggacaaccacgtggcagggctcgggcccgcggaggagcggcgtgcgctggtgggtcccggctctccgccccgcagcgcgcccggccagctcccatcgccccgggcgcacagcctcaaccccgacgcctcgggctccagctgcagcctggcccggacgcgctcccgagaaagctgcgccagcgtgcgccgcgcctcgtcggccgacgacatcgaggccatgcgcgccggggtgctgcccccgccaccgcgccacgccagcaccggggccatgcacccactgcgcagcggcttgctcaactccacctcggactccgacctcgtgcgctaccgcaccattagcaagattccccaaatcaccctcaactttgtggacctcaagggcgaccccttcttggcttcgcccaccagtgaccgtgagatcatagcacctaagataaaggagcgaacccacaatgtcactgagaaggtcacccaggtcctgtccctgggcgccgacgtgctgcctgagtacaagctgcaggcaccgcgcatccaccgctggaccatcctgcattacagccccttcaaggccgtgtgggactggctcatcctgctgctggtcatctacacggctgtcttcacaccctactcggctgccttcctgctgaaggagacggaagaaggcccgcctgctaccgagtgtggctacgcctgccagccgctggctgtggtggacctcatcgtggacatcatgttcattgtggacatcctcatcaacttccgcaccacctacgtcaatgccaacgaggaggtggtcagccaccccggccgcatcgccgtccactacttcaagggctggttcctcatcgacatggtggccgccatccccttcgacctgctcatcttcggctctggctctgaggagctgatcgggctgctgaagactgcgcggctgctgcggctggtgcgcgtggcgcggaagctggatcgctactcagagtacggcgcggccgtgctgttcttgctcatgtgcacctttgcgctcatcgcgcactggctagcctgcatctggtacgccatcggcaacatggagcagccacacatggactcacgcatcggctggctgcacaacctgggcgaccagataggcaaaccctacaacagcagcggcctgggcggcccctccatcaaggacaagtatgtgacggcgctctacttcaccttcagcagcctcaccagtgtgggcttcggcaacgtctctcccaacaccaactcagagaagatcttctccatctgcgtcatgctcattggctccctcatgtatgctagcatcttcggcaacgtgtcggccatcatccagcggctgtactcgggcacagcccgctaccacacacagatgctgcgggtgcgggagttcatccgcttccaccagatccccaatcccctgcgccagcgcctcgaggagtacttccagcacgcctggtcctacaccaacggcatcgacatgaacgcggtgctgaagggcttccctgagtgcctgcaggctgacatctgcctgcacctgaaccgctcactgctgcagcactgcaaacccttccgaggggccaccaagggctgccttcgggccctggccatgaagttcaagaccacacatgcaccgccaggggacacactggtgcatgctggggacctgctcaccgccctgtacttcatctcccggggctccatcgagatcctgcggggcgacgtcgtcgtggccatcctggggaagaatgacatctttggggagcctctgaacctgtatgcaaggcctggcaagtcgaacggggatgtgcgggccctcacctactgtgacctacacaagatccatcgggacgacctgctggaggtgctggacatgtaccctgagttctccgaccacttctggtccagcctggagatcaccttcaacctgcgagataccaacatgatcccgggctcccccggcagtacggagttagagggtggcttcagtcggcaacgcaagcgcaagttgtccttccgcaggcgcacggacaaggacacggagcagccaggggaggtgtcggccttggggccgggccgggcgggggcagggccgagtagccggggccggccgggggggccgtggggggagagcccgtccagtggcccctccagccctgagagcagtgaggatgagggcccaggccgcagctccagccccctccgcctggtgcccttctccagccccaggccccccggagagccgccgggtggggagcccctgatggaggactgcgagaagagcagcgacacttgcaaccccctgtcaggcgccttctcaggagtgtccaacattttcagcttctggggggacagtcggggccgccagtaccaggagctccctcgatgccccgcccccacccccagcctcctcaacatccccctctccagcccgggtcggcggccccggggcgacgtggagagcaggctggatgccctccagcgccagctcaacaggctggagacccggctgagtgcagacatggccactgtcctgcagctgctacagaggcagatgacgctggtcccgcccgcctacagtgctgtgaccaccccggggcctggccccacttccacatccccgctgttgcccgtcagccccctccccaccctcaccttggactcgctttctcaggtttcccagttcatggcgtgtgaggagctgcccccgggggccccagagcttccccaagaaggccccacacgacgcctctccctaccgggccagctgggggccctcacctcccagcccctgcacagacacggctcggacccgggcagttagtggggctgcccagtgtggacacgtggctcacccagggatcaaggcgctgctgggccgctccccttggaggccctgctcaggaggccctgaccgtggaaggggagaggaactcgaaagcacagctcctcccccagcccttgggaccatcttctcctgcagtcccctgggccccagtgagaggggcaggggcagggccggcagtaggtggggcctgtggtccccccactgccctgagggcattagctggtctaactgcccggaggcacccggccctgggccttaggcacctcaaggacttttctgctatttactgctcttattgttaaggataataattaaggatcatatgaataattaatgaagatgctgatgactatgaataataaataattatcctgaggaga

SEQ ID NO: 379 - DNA, 3884 bp, Homo sapiens
  source 1..3884: mol_type = genomic DNA
  misc_feature 1..3884: note = cDNA of KCNH2 gene SNP c.1942G>A (p.Gly648Ser)
atgccggtgcggaggggccacgtcgcgccgcagaacaccttcctggacaccatcatccgcaagtttgagggccagagccgtaagttcatcatcgccaacgctcgggtggagaactgcgccgtcatctactgcaacgacggcttctgcgagctgtgcggctactcgcgggccgaggtgatgcagcgaccctgcacctgcgacttcctgcacgggccgcgcacgcagcgccgcgctgccgcgcagatcgcgcaggcactgctgggcgccgaggagcgcaaagtggaaatcgccttctaccggaaagatgggagctgcttcctatgtctggtggatgtggtgcccgtgaagaacgaggatggggctgtcatcatgttcatcctcaatttcgaggtggtgatggagaaggacatggtggggtccccggctcatgacaccaaccaccggggcccccccaccagctggctggccccaggccgcgccaagaccttccgcctgaagctgcccgcgctgctggcgctgacggcccgggagtcgtcggtgcggtcgggcggcgcgggcggcgcgggcgccccgggggccgtggtggtggacgtggacctgacgcccgcggcacccagcagcgagtcgctggccctggacgaagtgacagccatggacaaccacgtggcagggctcgggcccgcggaggagcggcgtgcgctggtgggtcccggctctccgccccgcagcgcgcccggccagctcccatcgccccgggcgcacagcctcaaccccgacgcctcgggctccagctgcagcctggcccggacgcgctcccgagaaagctgcgccagcgtgcgccgcgcctcgtcggccgacgacatcgaggccatgcgcgccggggtgctgcccccgccaccgcgccacgccagcaccggggccatgcacccactgcgcagcggcttgctcaactccacctcggactccgacctcgtgcgctaccgcaccattagcaagattccccaaatcaccctcaactttgtggacctcaagggcgaccccttcttggcttcgcccaccagtgaccgtgagatcatagcacctaagataaaggagcgaacccacaatgtcactgagaaggtcacccaggtcctgtccctgggcgccgacgtgctgcctgagtacaagctgcaggcaccgcgcatccaccgctggaccatcctgcattacagccccttcaaggccgtgtgggactggctcatcctgctgctggtcatctacacggctgtcttcacaccctactcggctgccttcctgctgaaggagacggaagaaggcccgcctgctaccgagtgtggctacgcctgccagccgctggctgtggtggacctcatcgtggacatcatgttcattgtggacatcctcatcaacttccgcaccacctacgtcaatgccaacgaggaggtggtcagccaccccggccgcatcgccgtccactacttcaagggctggttcctcatcgacatggtggccgccatccccttcgacctgctcatcttcggctctggctctgaggagctgatcgggctgctgaagactgcgcggctgctgcggctggtgcgcgtggcgcggaagctggatcgctactcagagtacggcgcggccgtgctgttcttgctcatgtgcacctttgcgctcatcgcgcactggctagcctgcatctggtacgccatcggcaacatggagcagccacacatggactcacgcatcggctggctgcacaacctgggcgaccagataggcaaaccctacaacagcagcggcctgggcggcccctccatcaaggacaagtatgtgacggcgctctacttcaccttcagcagcctcaccagtgtgggcttcggcaacgtctctcccaacaccaactcagagaagatcttctccatctgcgtcatgctcattagctccctcatgtatgctagcatcttcggcaacgtgtcggccatcatccagcggctgtactcgggcacagcccgctaccacacacagatgctgcgggtgcgggagttcatccgcttccaccagatccccaatcccctgcgccagcgcctcgaggagtacttccagcacgcctggtcctacaccaacggcatcgacatgaacgcggtgctgaagggcttccctgagtgcctgcaggctgacatctgcctgcacctgaaccgctcactgctgcagcactgcaaacccttccgaggggccaccaagggctgccttcgggccctggccatgaagttcaagaccacacatgcaccgccaggggacacactggtgcatgctggggacctgctcaccgccctgtacttcatctcccggggctccatcgagatcctgcggggcgacgtcgtcgtggccatcctggggaagaatgacatctttggggagcctctgaacctgtatgcaaggcctggcaagtcgaacggggatgtgcgggccctcacctactgtgacctacacaagatccatcgggacgacctgctggaggtgctggacatgtaccctgagttctccgaccacttctggtccagcctggagatcaccttcaacctgcgagataccaacatgatcccgggctcccccggcagtacggagttagagggtggcttcagtcggcaacgcaagcgcaagttgtccttccgcaggcgcacggacaaggacacggagcagccaggggaggtgtcggccttggggccgggccgggcgggggcagggccgagtagccggggccggccgggggggccgtggggggagagcccgtccagtggcccctccagccctgagagcagtgaggatgagggcccaggccgcagctccagccccctccgcctggtgcccttctccagccccaggccccccggagagccgccgggtggggagcccctgatggaggactgcgagaagagcagcgacacttgcaaccccctgtcaggcgccttctcaggagtgtccaacattttcagcttctggggggacagtcggggccgccagtaccaggagctccctcgatgccccgcccccacccccagcctcctcaacatccccctctccagcccgggtcggcggccccggggcgacgtggagagcaggctggatgccctccagcgccagctcaacaggctggagacccggctgagtgcagacatggccactgtcctgcagctgctacagaggcagatgacgctggtcccgcccgcctacagtgctgtgaccaccccggggcctggccccacttccacatccccgctgttgcccgtcagccccctccccaccctcaccttggactcgctttctcaggtttcccagttcatggcgtgtgaggagctgcccccgggggccccagagcttccccaagaaggccccacacgacgcctctccctaccgggccagctgggggccctcacctcccagcccctgcacagacacggctcggacccgggcagttagtggggctgcccagtgtggacacgtggctcacccagggatcaaggcgctgctgggccgctccccttggaggccctgctcaggaggccctgaccgtggaaggggagaggaactcgaaagcacagctcctcccccagcccttgggaccatcttctcctgcagtcccctgggccccagtgagaggggcaggggcagggccggcagtaggtggggcctgtggtccccccactgccctgagggcattagctggtctaactgcccggaggcacccggccctgggccttaggcacctcaaggacttttctgctatttactgctcttattgttaaggataataattaaggatcatatgaataattaatgaagatgctgatgactatgaataataaataattatcctgaggaga

SEQ ID NO: 380 - DNA, 3884 bp, Homo sapiens
  source 1..3884: mol_type = genomic DNA
  misc_feature 1..3884: note = cDNA of KCNH2 gene SNP c.1943G>A (p.Gly648Asp)
atgccggtgcggaggggccacgtcgcgccgcagaacaccttcctggacaccatcatccgcaagtttgagggccagagccgtaagttcatcatcgccaacgctcgggtggagaactgcgccgtcatctactgcaacgacggcttctgcgagctgtgcggctactcgcgggccgaggtgatgcagcgaccctgcacctgcgacttcctgcacgggccgcgcacgcagcgccgcgctgccgcgcagatcgcgcaggcactgctgggcgccgaggagcgcaaagtggaaatcgccttctaccggaaagatgggagctgcttcctatgtctggtggatgtggtgcccgtgaagaacgaggatggggctgtcatcatgttcatcctcaatttcgaggtggtgatggagaaggacatggtggggtccccggctcatgacaccaaccaccggggcccccccaccagctggctggccccaggccgcgccaagaccttccgcctgaagctgcccgcgctgctggcgctgacggcccgggagtcgtcggtgcggtcgggcggcgcgggcggcgcgggcgccccgggggccgtggtggtggacgtggacctgacgcccgcggcacccagcagcgagtcgctggccctggacgaagtgacagccatggacaaccacgtggcagggctcgggcccgcggaggagcggcgtgcgctggtgggtcccggctctccgccccgcagcgcgcccggccagctcccatcgccccgggcgcacagcctcaaccccgacgcctcgggctccagctgcagcctggcccggacgcgctcccgagaaagctgcgccagcgtgcgccgcgcctcgtcggccgacgacatcgaggccatgcgcgccggggtgctgcccccgccaccgcgccacgccagcaccggggccatgcacccactgcgcagcggcttgctcaactccacctcggactccgacctcgtgcgctaccgcaccattagcaagattccccaaatcaccctcaactttgtggacctcaagggcgaccccttcttggcttcgcccaccagtgaccgtgagatcatagcacctaagataaaggagcgaacccacaatgtcactgagaaggtcacccaggtcctgtccctgggcgccgacgtgctgcctgagtacaagctgcaggcaccgcgcatccaccgctggaccatcctgcattacagccccttcaaggccgtgtgggactggctcatcctgctgctggtcatctacacggctgtcttcacaccctactcggctgccttcctgctgaaggagacggaagaaggcccgcctgctaccgagtgtggctacgcctgccagccgctggctgtggtggacctcatcgtggacatcatgttcattgtggacatcctcatcaacttccgcaccacctacgtcaatgccaacgaggaggtggtcagccaccccggccgcatcgccgtccactacttcaagggctggttcctcatcgacatggtggccgccatccccttcgacctgctcatcttcggctctggctctgaggagctgatcgggctgctgaagactgcgcggctgctgcggctggtgcgcgtggcgcggaagctggatcgctactcagagtacggcgcggccgtgctgttcttgctcatgtgcacctttgcgctcatcgcgcactggctagcctgcatctggtacgccatcggcaacatggagcagccacacatggactcacgcatcggctggctgcacaacctgggcgaccagataggcaaaccctacaacagcagcggcctgggcggcccctccatcaaggacaagtatgtgacggcgctctacttcaccttcagcagcctcaccagtgtgggcttcggcaacgtctctcccaacaccaactcagagaagatcttctccatctgcgtcatgctcattgactccctcatgtatgctagcatcttcggcaacgtgtcggccatcatccagcggctgtactcgggcacagcccgctaccacacacagatgctgcgggtgcgggagttcatccgcttccaccagatccccaatcccctgcgccagcgcctcgaggagtacttccagcacgcctggtcctacaccaacggcatcgacatgaacgcggtgctgaagggcttccctgagtgcctgcaggctgacatctgcctgcacctgaaccgctcactgctgcagcactgcaaacccttccgaggggccaccaagggctgccttcgggccctggccatgaagttcaagaccacacatgcaccgccaggggacacactggtgcatgctggggacctgctcaccgccctgtacttcatctcccggggctccatcgagatcctgcggggcgacgtcgtcgtggccatcctggggaagaatgacatctttggggagcctctgaacctgtatgcaaggcctggcaagtcgaacggggatgtgcgggccctcacctactgtgacctacacaagatccatcgggacgacctgctggaggtgctggacatgtaccctgagttctccgaccacttctggtccagcctggagatcaccttcaacctgcgagataccaacatgatcccgggctcccccggcagtacggagttagagggtggcttcagtcggcaacgcaagcgcaagttgtccttccgcaggcgcacggacaaggacacggagcagccaggggaggtgtcggccttggggccgggccgggcgggggcagggccgagtagccggggccggccgggggggccgtggggggagagcccgtccagtggcccctccagccctgagagcagtgaggatgagggcccaggccgcagctccagccccctccgcctggtgcccttctccagccccaggccccccggagagccgccgggtggggagcccctgatggaggactgcgagaagagcagcgacacttgcaaccccctgtcaggcgccttctcaggagtgtccaacattttcagcttctggggggacagtcggggccgccagtaccaggagctccctcgatgccccgcccccacccccagcctcctcaacatccccctctccagcccgggtcggcggccccggggcgacgtggagagcaggctggatgccctccagcgccagctcaacaggctggagacccggctgagtgcagacatggccactgtcctgcagctgctacagaggcagatgacgctggtcccgcccgcctacagtgctgtgaccaccccggggcctggccccacttccacatccccgctgttgcccgtcagccccctccccaccctcaccttggactcgctttctcaggtttcccagttcatggcgtgtgaggagctgcccccgggggccccagagcttccccaagaaggccccacacgacgcctctccctaccgggccagctgggggccctcacctcccagcccctgcacagacacggctcggacccgggcagttagtggggctgcccagtgtggacacgtggctcacccagggatcaaggcgctgctgggccgctccccttggaggccctgctcaggaggccctgaccgtggaaggggagaggaactcgaaagcacagctcctcccccagcccttgggaccatcttctcctgcagtcccctgggccccagtgagaggggcaggggcagggccggcagtaggtggggcctgtggtccccccactgccctgagggcattagctggtctaactgcccggaggcacccggccctgggccttaggcacctcaaggacttttctgctatttactgctcttattgttaaggataataattaaggatcatatgaataattaatgaagatgctgatgactatgaataataaataattatcctgaggaga

SEQ ID NO: 381 - DNA, 3884 bp, Homo sapiens
  source 1..3884: mol_type = genomic DNA
  misc_feature 1..3884: note = cDNA of KCNH2 gene SNP c.1945T>C (p.Ser649Pro)
atgccggtgcggaggggccacgtcgcgccgcagaacaccttcctggacaccatcatccgcaagtttgagggccagagccgtaagttcatcatcgccaacgctcgggtggagaactgcgccgtcatctactgcaacgacggcttctgcgagctgtgcggctactcgcgggccgaggtgatgcagcgaccctgcacctgcgacttcctgcacgggccgcgcacgcagcgccgcgctgccgcgcagatcgcgcaggcactgctgggcgccgaggagcgcaaagtggaaatcgccttctaccggaaagatgggagctgcttcctatgtctggtggatgtggtgcccgtgaagaacgaggatggggctgtcatcatgttcatcctcaatttcgaggtggtgatggagaaggacatggtggggtccccggctcatgacaccaaccaccggggcccccccaccagctggctggccccaggccgcgccaagaccttccgcctgaagctgcccgcgctgctggcgctgacggcccgggagtcgtcggtgcggtcgggcggcgcgggcggcgcgggcgccccgggggccgtggtggtggacgtggacctgacgcccgcggcacccagcagcgagtcgctggccctggacgaagtgacagccatggacaaccacgtggcagggctcgggcccgcggaggagcggcgtgcgctggtgggtcccggctctccgccccgcagcgcgcccggccagctcccatcgccccgggcgcacagcctcaaccccgacgcctcgggctccagctgcagcctggcccggacgcgctcccgagaaagctgcgccagcgtgcgccgcgcctcgtcggccgacgacatcgaggccatgcgcgccggggtgctgcccccgccaccgcgccacgccagcaccggggccatgcacccactgcgcagcggcttgctcaactccacctcggactccgacctcgtgcgctaccgcaccattagcaagattccccaaatcaccctcaactttgtggacctcaagggcgaccccttcttggcttcgcccaccagtgaccgtgagatcatagcacctaagataaaggagcgaacccacaatgtcactgagaaggtcacccaggtcctgtccctgggcgccgacgtgctgcctgagtacaagctgcaggcaccgcgcatccaccgctggaccatcctgcattacagccccttcaaggccgtgtgggactggctcatcctgctgctggtcatctacacggctgtcttcacaccctactcggctgccttcctgctgaaggagacggaagaaggcccgcctgctaccgagtgtggctacgcctgccagccgctggctgtggtggacctcatcgtggacatcatgttcattgtggacatcctcatcaacttccgcaccacctacgtcaatgccaacgaggaggtggtcagccaccccggccgcatcgccgtccactacttcaagggctggttcctcatcgacatggtggccgccatccccttcgacctgctcatcttcggctctggctctgaggagctgatcgggctgctgaagactgcgcggctgctgcggctggtgcgcgtggcgcggaagctggatcgctactcagagtacggcgcggccgtgctgttcttgctcatgtgcacctttgcgctcatcgcgcactggctagcctgcatctggtacgccatcggcaacatggagcagccacacatggactcacgcatcggctggctgcacaacctgggcgaccagataggcaaaccctacaacagcagcggcctgggcggcccctccatcaaggacaagtatgtgacggcgctctacttcaccttcagcagcctcaccagtgtgggcttcggcaacgtctctcccaacaccaactcagagaagatcttctccatctgcgtcatgctcattggccccctcatgtatgctagcatcttcggcaacgtgtcggccatcatccagcggctgtactcgggcacagcccgctaccacacacagatgctgcgggtgcgggagttcatccgcttccaccagatccccaatcccctgcgccagcgcctcgaggagtacttccagcacgcctggtcctacaccaacggcatcgacatgaacgcggtgctgaagggcttccctgagtgcctgcaggctgacatctgcctgcacctgaaccgctcactgctgcagcactgcaaacccttccgaggggccaccaagggctgccttcgggccctggccatgaagttcaagaccacacatgcaccgccaggggacacactggtgcatgctggggacctgctcaccgccctgtacttcatctcccggggctccatcgagatcctgcggggcgacgtcgtcgtggccatcctggggaagaatgacatctttggggagcctctgaacctgtatgcaaggcctggcaagtcgaacggggatgtgcgggccctcacctactgtgacctacacaagatccatcgggacgacctgctggaggtgctggacatgtaccctgagttctccgaccacttctggtccagcctggagatcaccttcaacctgcgagataccaacatgatcccgggctcccccggcagtacggagttagagggtggcttcagtcggcaacgcaagcgcaagttgtccttccgcaggcgcacggacaaggacacggagcagccaggggaggtgtcggccttggggccgggccgggcgggggcagggccgagtagccggggccggccgggggggccgtggggggagagcccgtccagtggcccctccagccctgagagcagtgaggatgagggcccaggccgcagctccagccccctccgcctggtgcccttctccagccccaggccccccggagagccgccgggtggggagcccctgatggaggactgcgagaagagcagcgacacttgcaaccccctgtcaggcgccttctcaggagtgtccaacattttcagcttctggggggacagtcggggccgccagtaccaggagctccctcgatgccccgcccccacccccagcctcctcaacatccccctctccagcccgggtcggcggccccggggcgacgtggagagcaggctggatgccctccagcgccagctcaacaggctggagacccggctgagtgcagacatggccactgtcctgcagctgctacagaggcagatgacgctggtcccgcccgcctacagtgctgtgaccaccccggggcctggccccacttccacatccccgctgttgcccgtcagccccctccccaccctcaccttggactcgctttctcaggtttcccagttcatggcgtgtgaggagctgcccccgggggccccagagcttccccaagaaggccccacacgacgcctctccctaccgggccagctgggggccctcacctcccagcccctgcacagacacggctcggacccgggcagttagtggggctgcccagtgtggacacgtggctcacccagggatcaaggcgctgctgggccgctccccttggaggccctgctcaggaggccctgaccgtggaaggggagaggaactcgaaagcacagctcctcccccagcccttgggaccatcttctcctgcagtcccctgggccccagtgagaggggcaggggcagggccggcagtaggtggggcctgtggtccccccactgccctgagggcattagctggtctaactgcccggaggcacccggccctgggccttaggcacctcaaggacttttctgctatttactgctcttattgttaaggataataattaaggatcatatgaataattaatgaagatgctgatgactatgaataataaataattatcctgaggaga

SEQ ID NO: 382 - DNA, 3884 bp, Homo sapiens
  source 1..3884: mol_type = genomic DNA
  misc_feature 1..3884: note = cDNA of KCNH2 gene SNP c.1946C>T (p.Ser649Phe)
atgccggtgcggaggggccacgtcgcgccgcagaacaccttcctggacaccatcatccgcaagtttgagggccagagccgtaagttcatcatcgccaacgctcgggtggagaactgcgccgtcatctactgcaacgacggcttctgcgagctgtgcggctactcgcgggccgaggtgatgcagcgaccctgcacctgcgacttcctgcacgggccgcgcacgcagcgccgcgctgccgcgcagatcgcgcaggcactgctgggcgccgaggagcgcaaagtggaaatcgccttctaccggaaagatgggagctgcttcctatgtctggtggatgtggtgcccgtgaagaacgaggatggggctgtcatcatgttcatcctcaatttcgaggtggtgatggagaaggacatggtggggtccccggctcatgacaccaaccaccggggcccccccaccagctggctggccccaggccgcgccaagaccttccgcctgaagctgcccgcgctgctggcgctgacggcccgggagtcgtcggtgcggtcgggcggcgcgggcggcgcgggcgccccgggggccgtggtggtggacgtggacctgacgcccgcggcacccagcagcgagtcgctggccctggacgaagtgacagccatggacaaccacgtggcagggctcgggcccgcggaggagcggcgtgcgctggtgggtcccggctctccgccccgcagcgcgcccggccagctcccatcgccccgggcgcacagcctcaaccccgacgcctcgggctccagctgcagcctggcccggacgcgctcccgagaaagctgcgccagcgtgcgccgcgcctcgtcggccgacgacatcgaggccatgcgcgccggggtgctgcccccgccaccgcgccacgccagcaccggggccatgcacccactgcgcagcggcttgctcaactccacctcggactccgacctcgtgcgctaccgcaccattagcaagattccccaaatcaccctcaactttgtggacctcaagggcgaccccttcttggcttcgcccaccagtgaccgtgagatcatagcacctaagataaaggagcgaacccacaatgtcactgagaaggtcacccaggtcctgtccctgggcgccgacgtgctgcctgagtacaagctgcaggcaccgcgcatccaccgctggaccatcctgcattacagccccttcaaggccgtgtgggactggctcatcctgctgctggtcatctacacggctgtcttcacaccctactcggctgccttcctgctgaaggagacggaagaaggcccgcctgctaccgagtgtggctacgcctgccagccgctggctgtggtggacctcatcgtggacatcatgttcattgtggacatcctcatcaacttccgcaccacctacgtcaatgccaacgaggaggtggtcagccaccccggccgcatcgccgtccactacttcaagggctggttcctcatcgacatggtggccgccatccccttcgacctgctcatcttcggctctggctctgaggagctgatcgggctgctgaagactgcgcggctgctgcggctggtgcgcgtggcgcggaagctggatcgctactcagagtacggcgcggccgtgctgttcttgctcatgtgcacctttgcgctcatcgcgcactggctagcctgcatctggtacgccatcggcaacatggagcagccacacatggactcacgcatcggctggctgcacaacctgggcgaccagataggcaaaccctacaacagcagcggcctgggcggcccctccatcaaggacaagtatgtgacggcgctctacttcaccttcagcagcctcaccagtgtgggcttcggcaacgtctctcccaacaccaactcagagaagatcttctccatctgcgtcatgctcattggcttcctcatgtatgctagcatcttcggcaacgtgtcggccatcatccagcggctgtactcgggcacagcccgctaccacacacagatgctgcgggtgcgggagttcatccgcttccaccagatccccaatcccctgcgccagcgcctcgaggagtacttccagcacgcctggtcctacaccaacggcatcgacatgaacgcggtgctgaagggcttccctgagtgcctgcaggctgacatctgcctgcacctgaaccgctcactgctgcagcactgcaaacccttccgaggggccaccaagggctgccttcgggccctggccatgaagttcaagaccacacatgcaccgccaggggacacactggtgcatgctggggacctgctcaccgccctgtacttcatctcccggggctccatcgagatcctgcggggcgacgtcgtcgtggccatcctggggaagaatgacatctttggggagcctctgaacctgtatgcaaggcctggcaagtcgaacggggatgtgcgggccctcacctactgtgacctacacaagatccatcgggacgacctgctggaggtgctggacatgtaccctgagttctccgaccacttctggtccagcctggagatcaccttcaacctgcgagataccaacatgatcccgggctcccccggcagtacggagttagagggtggcttcagtcggcaacgcaagcgcaagttgtccttccgcaggcgcacggacaaggacacggagcagccaggggaggtgtcggccttggggccgggccgggcgggggcagggccgagtagccggggccggccgggggggccgtggggggagagcccgtccagtggcccctccagccctgagagcagtgaggatgagggcccaggccgcagctccagccccctccgcctggtgcccttctccagccccaggccccccggagagccgccgggtggggagcccctgatggaggactgcgagaagagcagcgacacttgcaaccccctgtcaggcgccttctcaggagtgtccaacattttcagcttctggggggacagtcggggccgccagtaccaggagctccctcgatgccccgcccccacccccagcctcctcaacatccccctctccagcccgggtcggcggccccggggcgacgtggagagcaggctggatgccctccagcgccagctcaacaggctggagacccggctgagtgcagacatggccactgtcctgcagctgctacagaggcagatgacgctggtcccgcccgcctacagtgctgtgaccaccccggggcctggccccacttccacatccccgctgttgcccgtcagccccctccccaccctcaccttggactcgctttctcaggtttcccagttcatggcgtgtgaggagctgcccccgggggccccagagcttccccaagaaggccccacacgacgcctctccctaccgggccagctgggggccctcacctcccagcccctgcacagacacggctcggacccgggcagttagtggggctgcccagtgtggacacgtggctcacccagggatcaaggcgctgctgggccgctccccttggaggccctgctcaggaggccctgaccgtggaaggggagaggaactcgaaagcacagctcctcccccagcccttgggaccatcttctcctgcagtcccctgggccccagtgagaggggcaggggcagggccggcagtaggtggggcctgtggtccccccactgccctgagggcattagctggtctaactgcccggaggcacccggccctgggccttaggcacctcaaggacttttctgctatttactgctcttattgttaaggataataattaaggatcatatgaataattaatgaagatgctgatgactatgaataataaataattatcctgaggaga

SEQ ID NO: 383 - DNA, 3884 bp, Homo sapiens
  source 1..3884: mol_type = genomic DNA
  misc_feature 1..3884: note = cDNA of KCNH2 gene SNP c.194C>G (p.Thr65Ser)
atgccggtgcggaggggccacgtcgcgccgcagaacaccttcctggacaccatcatccgcaagtttgagggccagagccgtaagttcatcatcgccaacgctcgggtggagaactgcgccgtcatctactgcaacgacggcttctgcgagctgtgcggctactcgcgggccgaggtgatgcagcgaccctgcagctgcgacttcctgcacgggccgcgcacgcagcgccgcgctgccgcgcagatcgcgcaggcactgctgggcgccgaggagcgcaaagtggaaatcgccttctaccggaaagatgggagctgcttcctatgtctggtggatgtggtgcccgtgaagaacgaggatggggctgtcatcatgttcatcctcaatttcgaggtggtgatggagaaggacatggtggggtccccggctcatgacaccaaccaccggggcccccccaccagctggctggccccaggccgcgccaagaccttccgcctgaagctgcccgcgctgctggcgctgacggcccgggagtcgtcggtgcggtcgggcggcgcgggcggcgcgggcgccccgggggccgtggtggtggacgtggacctgacgcccgcggcacccagcagcgagtcgctggccctggacgaagtgacagccatggacaaccacgtggcagggctcgggcccgcggaggagcggcgtgcgctggtgggtcccggctctccgccccgcagcgcgcccggccagctcccatcgccccgggcgcacagcctcaaccccgacgcctcgggctccagctgcagcctggcccggacgcgctcccgagaaagctgcgccagcgtgcgccgcgcctcgtcggccgacgacatcgaggccatgcgcgccggggtgctgcccccgccaccgcgccacgccagcaccggggccatgcacccactgcgcagcggcttgctcaactccacctcggactccgacctcgtgcgctaccgcaccattagcaagattccccaaatcaccctcaactttgtggacctcaagggcgaccccttcttggcttcgcccaccagtgaccgtgagatcatagcacctaagataaaggagcgaacccacaatgtcactgagaaggtcacccaggtcctgtccctgggcgccgacgtgctgcctgagtacaagctgcaggcaccgcgcatccaccgctggaccatcctgcattacagccccttcaaggccgtgtgggactggctcatcctgctgctggtcatctacacggctgtcttcacaccctactcggctgccttcctgctgaaggagacggaagaaggcccgcctgctaccgagtgtggctacgcctgccagccgctggctgtggtggacctcatcgtggacatcatgttcattgtggacatcctcatcaacttccgcaccacctacgtcaatgccaacgaggaggtggtcagccaccccggccgcatcgccgtccactacttcaagggctggttcctcatcgacatggtggccgccatccccttcgacctgctcatcttcggctctggctctgaggagctgatcgggctgctgaagactgcgcggctgctgcggctggtgcgcgtggcgcggaagctggatcgctactcagagtacggcgcggccgtgctgttcttgctcatgtgcacctttgcgctcatcgcgcactggctagcctgcatctggtacgccatcggcaacatggagcagccacacatggactcacgcatcggctggctgcacaacctgggcgaccagataggcaaaccctacaacagcagcggcctgggcggcccctccatcaaggacaagtatgtgacggcgctctacttcaccttcagcagcctcaccagtgtgggcttcggcaacgtctctcccaacaccaactcagagaagatcttctccatctgcgtcatgctcattggctccctcatgtatgctagcatcttcggcaacgtgtcggccatcatccagcggctgtactcgggcacagcccgctaccacacacagatgctgcgggtgcgggagttcatccgcttccaccagatccccaatcccctgcgccagcgcctcgaggagtacttccagcacgcctggtcctacaccaacggcatcgacatgaacgcggtgctgaagggcttccctgagtgcctgcaggctgacatctgcctgcacctgaaccgctcactgctgcagcactgcaaacccttccgaggggccaccaagggctgccttcgggccctggccatgaagttcaagaccacacatgcaccgccaggggacacactggtgcatgctggggacctgctcaccgccctgtacttcatctcccggggctccatcgagatcctgcggggcgacgtcgtcgtggccatcctggggaagaatgacatctttggggagcctctgaacctgtatgcaaggcctggcaagtcgaacggggatgtgcgggccctcacctactgtgacctacacaagatccatcgggacgacctgctggaggtgctggacatgtaccctgagttctccgaccacttctggtccagcctggagatcaccttcaacctgcgagataccaacatgatcccgggctcccccggcagtacggagttagagggtggcttcagtcggcaacgcaagcgcaagttgtccttccgcaggcgcacggacaaggacacggagcagccaggggaggtgtcggccttggggccgggccgggcgggggcagggccgagtagccggggccggccgggggggccgtggggggagagcccgtccagtggcccctccagccctgagagcagtgaggatgagggcccaggccgcagctccagccccctccgcctggtgcccttctccagccccaggccccccggagagccgccgggtggggagcccctgatggaggactgcgagaagagcagcgacacttgcaaccccctgtcaggcgccttctcaggagtgtccaacattttcagcttctggggggacagtcggggccgccagtaccaggagctccctcgatgccccgcccccacccccagcctcctcaacatccccctctccagcccgggtcggcggccccggggcgacgtggagagcaggctggatgccctccagcgccagctcaacaggctggagacccggctgagtgcagacatggccactgtcctgcagctgctacagaggcagatgacgctggtcccgcccgcctacagtgctgtgaccaccccggggcctggccccacttccacatccccgctgttgcccgtcagccccctccccaccctcaccttggactcgctttctcaggtttcccagttcatggcgtgtgaggagctgcccccgggggccccagagcttccccaagaaggccccacacgacgcctctccctaccgggccagctgggggccctcacctcccagcccctgcacagacacggctcggacccgggcagttagtggggctgcccagtgtggacacgtggctcacccagggatcaaggcgctgctgggccgctccccttggaggccctgctcaggaggccctgaccgtggaaggggagaggaactcgaaagcacagctcctcccccagcccttgggaccatcttctcctgcagtcccctgggccccagtgagaggggcaggggcagggccggcagtaggtggggcctgtggtccccccactgccctgagggcattagctggtctaactgcccggaggcacccggccctgggccttaggcacctcaaggacttttctgctatttactgctcttattgttaaggataataattaaggatcatatgaataattaatgaagatgctgatgactatgaataataaataattatcctgaggaga

SEQ ID NO: 384 - DNA, 3884 bp, Homo sapiens
  source 1..3884: mol_type = genomic DNA
  misc_feature 1..3884: note = cDNA of KCNH2 gene SNP c.1952T>G (p.Met651Arg)
atgccggtgcggaggggccacgtcgcgccgcagaacaccttcctggacaccatcatccgcaagtttgagggccagagccgtaagttcatcatcgccaacgctcgggtggagaactgcgccgtcatctactgcaacgacggcttctgcgagctgtgcggctactcgcgggccgaggtgatgcagcgaccctgcacctgcgacttcctgcacgggccgcgcacgcagcgccgcgctgccgcgcagatcgcgcaggcactgctgggcgccgaggagcgcaaagtggaaatcgccttctaccggaaagatgggagctgcttcctatgtctggtggatgtggtgcccgtgaagaacgaggatggggctgtcatcatgttcatcctcaatttcgaggtggtgatggagaaggacatggtggggtccccggctcatgacaccaaccaccggggcccccccaccagctggctggccccaggccgcgccaagaccttccgcctgaagctgcccgcgctgctggcgctgacggcccgggagtcgtcggtgcggtcgggcggcgcgggcggcgcgggcgccccgggggccgtggtggtggacgtggacctgacgcccgcggcacccagcagcgagtcgctggccctggacgaagtgacagccatggacaaccacgtggcagggctcgggcccgcggaggagcggcgtgcgctggtgggtcccggctctccgccccgcagcgcgcccggccagctcccatcgccccgggcgcacagcctcaaccccgacgcctcgggctccagctgcagcctggcccggacgcgctcccgagaaagctgcgccagcgtgcgccgcgcctcgtcggccgacgacatcgaggccatgcgcgccggggtgctgcccccgccaccgcgccacgccagcaccggggccatgcacccactgcgcagcggcttgctcaactccacctcggactccgacctcgtgcgctaccgcaccattagcaagattccccaaatcaccctcaactttgtggacctcaagggcgaccccttcttggcttcgcccaccagtgaccgtgagatcatagcacctaagataaaggagcgaacccacaatgtcactgagaaggtcacccaggtcctgtccctgggcgccgacgtgctgcctgagtacaagctgcaggcaccgcgcatccaccgctggaccatcctgcattacagccccttcaaggccgtgtgggactggctcatcctgctgctggtcatctacacggctgtcttcacaccctactcggctgccttcctgctgaaggagacggaagaaggcccgcctgctaccgagtgtggctacgcctgccagccgctggctgtggtggacctcatcgtggacatcatgttcattgtggacatcctcatcaacttccgcaccacctacgtcaatgccaacgaggaggtggtcagccaccccggccgcatcgccgtccactacttcaagggctggttcctcatcgacatggtggccgccatccccttcgacctgctcatcttcggctctggctctgaggagctgatcgggctgctgaagactgcgcggctgctgcggctggtgcgcgtggcgcggaagctggatcgctactcagagtacggcgcggccgtgctgttcttgctcatgtgcacctttgcgctcatcgcgcactggctagcctgcatctggtacgccatcggcaacatggagcagccacacatggactcacgcatcggctggctgcacaacctgggcgaccagataggcaaaccctacaacagcagcggcctgggcggcccctccatcaaggacaagtatgtgacggcgctctacttcaccttcagcagcctcaccagtgtgggcttcggcaacgtctctcccaacaccaactcagagaagatcttctccatctgcgtcatgctcattggctccctcaggtatgctagcatcttcggcaacgtgtcggccatcatccagcggctgtactcgggcacagcccgctaccacacacagatgctgcgggtgcgggagttcatccgcttccaccagatccccaatcccctgcgccagcgcctcgaggagtacttccagcacgcctggtcctacaccaacggcatcgacatgaacgcggtgctgaagggcttccctgagtgcctgcaggctgacatctgcctgcacctgaaccgctcactgctgcagcactgcaaacccttccgaggggccaccaagggctgccttcgggccctggccatgaagttcaagaccacacatgcaccgccaggggacacactggtgcatgctggggacctgctcaccgccctgtacttcatctcccggggctccatcgagatcctgcggggcgacgtcgtcgtggccatcctggggaagaatgacatctttggggagcctctgaacctgtatgcaaggcctggcaagtcgaacggggatgtgcgggccctcacctactgtgacctacacaagatccatcgggacgacctgctggaggtgctggacatgtaccctgagttctccgaccacttctggtccagcctggagatcaccttcaacctgcgagataccaacatgatcccgggctcccccggcagtacggagttagagggtggcttcagtcggcaacgcaagcgcaagttgtccttccgcaggcgcacggacaaggacacggagcagccaggggaggtgtcggccttggggccgggccgggcgggggcagggccgagtagccggggccggccgggggggccgtggggggagagcccgtccagtggcccctccagccctgagagcagtgaggatgagggcccaggccgcagctccagccccctccgcctggtgcccttctccagccccaggccccccggagagccgccgggtggggagcccctgatggaggactgcgagaagagcagcgacacttgcaaccccctgtcaggcgccttctcaggagtgtccaacattttcagcttctggggggacagtcggggccgccagtaccaggagctccctcgatgccccgcccccacccccagcctcctcaacatccccctctccagcccgggtcggcggccccggggcgacgtggagagcaggctggatgccctccagcgccagctcaacaggctggagacccggctgagtgcagacatggccactgtcctgcagctgctacagaggcagatgacgctggtcccgcccgcctacagtgctgtgaccaccccggggcctggccccacttccacatccccgctgttgcccgtcagccccctccccaccctcaccttggactcgctttctcaggtttcccagttcatggcgtgtgaggagctgcccccgggggccccagagcttccccaagaaggccccacacgacgcctctccctaccgggccagctgggggccctcacctcccagcccctgcacagacacggctcggacccgggcagttagtggggctgcccagtgtggacacgtggctcacccagggatcaaggcgctgctgggccgctccccttggaggccctgctcaggaggccctgaccgtggaaggggagaggaactcgaaagcacagctcctcccccagcccttgggaccatcttctcctgcagtcccctgggccccagtgagaggggcaggggcagggccggcagtaggtggggcctgtggtccccccactgccctgagggcattagctggtctaactgcccggaggcacccggccctgggccttaggcacctcaaggacttttctgctatttactgctcttattgttaaggataataattaaggatcatatgaataattaatgaagatgctgatgactatgaataataaataattatcctgaggaga

SEQ ID NO: 385 - DNA, 3884 bp, Homo sapiens
  source 1..3884: mol_type = genomic DNA
  misc_feature 1..3884: note = cDNA of KCNH2 gene SNP c.1956T>A (p.Tyr652Ter)
atgccggtgcggaggggccacgtcgcgccgcagaacaccttcctggacaccatcatccgcaagtttgagggccagagccgtaagttcatcatcgccaacgctcgggtggagaactgcgccgtcatctactgcaacgacggcttctgcgagctgtgcggctactcgcgggccgaggtgatgcagcgaccctgcacctgcgacttcctgcacgggccgcgcacgcagcgccgcgctgccgcgcagatcgcgcaggcactgctgggcgccgaggagcgcaaagtggaaatcgccttctaccggaaagatgggagctgcttcctatgtctggtggatgtggtgcccgtgaagaacgaggatggggctgtcatcatgttcatcctcaatttcgaggtggtgatggagaaggacatggtggggtccccggctcatgacaccaaccaccggggcccccccaccagctggctggccccaggccgcgccaagaccttccgcctgaagctgcccgcgctgctggcgctgacggcccgggagtcgtcggtgcggtcgggcggcgcgggcggcgcgggcgccccgggggccgtggtggtggacgtggacctgacgcccgcggcacccagcagcgagtcgctggccctggacgaagtgacagccatggacaaccacgtggcagggctcgggcccgcggaggagcggcgtgcgctggtgggtcccggctctccgccccgcagcgcgcccggccagctcccatcgccccgggcgcacagcctcaaccccgacgcctcgggctccagctgcagcctggcccggacgcgctcccgagaaagctgcgccagcgtgcgccgcgcctcgtcggccgacgacatcgaggccatgcgcgccggggtgctgcccccgccaccgcgccacgccagcaccggggccatgcacccactgcgcagcggcttgctcaactccacctcggactccgacctcgtgcgctaccgcaccattagcaagattccccaaatcaccctcaactttgtggacctcaagggcgaccccttcttggcttcgcccaccagtgaccgtgagatcatagcacctaagataaaggagcgaacccacaatgtcactgagaaggtcacccaggtcctgtccctgggcgccgacgtgctgcctgagtacaagctgcaggcaccgcgcatccaccgctggaccatcctgcattacagccccttcaaggccgtgtgggactggctcatcctgctgctggtcatctacacggctgtcttcacaccctactcggctgccttcctgctgaaggagacggaagaaggcccgcctgctaccgagtgtggctacgcctgccagccgctggctgtggtggacctcatcgtggacatcatgttcattgtggacatcctcatcaacttccgcaccacctacgtcaatgccaacgaggaggtggtcagccaccccggccgcatcgccgtccactacttcaagggctggttcctcatcgacatggtggccgccatccccttcgacctgctcatcttcggctctggctctgaggagctgatcgggctgctgaagactgcgcggctgctgcggctggtgcgcgtggcgcggaagctggatcgctactcagagtacggcgcggccgtgctgttcttgctcatgtgcacctttgcgctcatcgcgcactggctagcctgcatctggtacgccatcggcaacatggagcagccacacatggactcacgcatcggctggctgcacaacctgggcgaccagataggcaaaccctacaacagcagcggcctgggcggcccctccatcaaggacaagtatgtgacggcgctctacttcaccttcagcagcctcaccagtgtgggcttcggcaacgtctctcccaacaccaactcagagaagatcttctccatctgcgtcatgctcattggctccctcatgtaagctagcatcttcggcaacgtgtcggccatcatccagcggctgtactcgggcacagcccgctaccacacacagatgctgcgggtgcgggagttcatccgcttccaccagatccccaatcccctgcgccagcgcctcgaggagtacttccagcacgcctggtcctacaccaacggcatcgacatgaacgcggtgctgaagggcttccctgagtgcctgcaggctgacatctgcctgcacctgaaccgctcactgctgcagcactgcaaacccttccgaggggccaccaagggctgccttcgggccctggccatgaagttcaagaccacacatgcaccgccaggggacacactggtgcatgctggggacctgctcaccgccctgtacttcatctcccggggctccatcgagatcctgcggggcgacgtcgtcgtggccatcctggggaagaatgacatctttggggagcctctgaacctgtatgcaaggcctggcaagtcgaacggggatgtgcgggccctcacctactgtgacctacacaagatccatcgggacgacctgctggaggtgctggacatgtaccctgagttctccgaccacttctggtccagcctggagatcaccttcaacctgcgagataccaacatgatcccgggctcccccggcagtacggagttagagggtggcttcagtcggcaacgcaagcgcaagttgtccttccgcaggcgcacggacaaggacacggagcagccaggggaggtgtcggccttggggccgggccgggcgggggcagggccgagtagccggggccggccgggggggccgtggggggagagcccgtccagtggcccctccagccctgagagcagtgaggatgagggcccaggccgcagctccagccccctccgcctggtgcccttctccagccccaggccccccggagagccgccgggtggggagcccctgatggaggactgcgagaagagcagcgacacttgcaaccccctgtcaggcgccttctcaggagtgtccaacattttcagcttctggggggacagtcggggccgccagtaccaggagctccctcgatgccccgcccccacccccagcctcctcaacatccccctctccagcccgggtcggcggccccggggcgacgtggagagcaggctggatgccctccagcgccagctcaacaggctggagacccggctgagtgcagacatggccactgtcctgcagctgctacagaggcagatgacgctggtcccgcccgcctacagtgctgtgaccaccccggggcctggccccacttccacatccccgctgttgcccgtcagccccctccccaccctcaccttggactcgctttctcaggtttcccagttcatggcgtgtgaggagctgcccccgggggccccagagcttccccaagaaggccccacacgacgcctctccctaccgggccagctgggggccctcacctcccagcccctgcacagacacggctcggacccgggcagttagtggggctgcccagtgtggacacgtggctcacccagggatcaaggcgctgctgggccgctccccttggaggccctgctcaggaggccctgaccgtggaaggggagaggaactcgaaagcacagctcctcccccagcccttgggaccatcttctcctgcagtcccctgggccccagtgagaggggcaggggcagggccggcagtaggtggggcctgtggtccccccactgccctgagggcattagctggtctaactgcccggaggcacccggccctgggccttaggcacctcaaggacttttctgctatttactgctcttattgttaaggataataattaaggatcatatgaataattaatgaagatgctgatgactatgaataataaataattatcctgaggaga

SEQ ID NO: 386 - DNA, 3884 bp, Homo sapiens
  source 1..3884: mol_type = genomic DNA
  misc_feature 1..3884: note = cDNA of KCNH2 gene SNP c.1963A>G (p.Ile655Val)
atgccggtgcggaggggccacgtcgcgccgcagaacaccttcctggacaccatcatccgcaagtttgagggccagagccgtaagttcatcatcgccaacgctcgggtggagaactgcgccgtcatctactgcaacgacggcttctgcgagctgtgcggctactcgcgggccgaggtgatgcagcgaccctgcacctgcgacttcctgcacgggccgcgcacgcagcgccgcgctgccgcgcagatcgcgcaggcactgctgggcgccgaggagcgcaaagtggaaatcgccttctaccggaaagatgggagctgcttcctatgtctggtggatgtggtgcccgtgaagaacgaggatggggctgtcatcatgttcatcctcaatttcgaggtggtgatggagaaggacatggtggggtccccggctcatgacaccaaccaccggggcccccccaccagctggctggccccaggccgcgccaagaccttccgcctgaagctgcccgcgctgctggcgctgacggcccgggagtcgtcggtgcggtcgggcggcgcgggcggcgcgggcgccccgggggccgtggtggtggacgtggacctgacgcccgcggcacccagcagcgagtcgctggccctggacgaagtgacagccatggacaaccacgtggcagggctcgggcccgcggaggagcggcgtgcgctggtgggtcccggctctccgccccgcagcgcgcccggccagctcccatcgccccgggcgcacagcctcaaccccgacgcctcgggctccagctgcagcctggcccggacgcgctcccgagaaagctgcgccagcgtgcgccgcgcctcgtcggccgacgacatcgaggccatgcgcgccggggtgctgcccccgccaccgcgccacgccagcaccggggccatgcacccactgcgcagcggcttgctcaactccacctcggactccgacctcgtgcgctaccgcaccattagcaagattccccaaatcaccctcaactttgtggacctcaagggcgaccccttcttggcttcgcccaccagtgaccgtgagatcatagcacctaagataaaggagcgaacccacaatgtcactgagaaggtcacccaggtcctgtccctgggcgccgacgtgctgcctgagtacaagctgcaggcaccgcgcatccaccgctggaccatcctgcattacagccccttcaaggccgtgtgggactggctcatcctgctgctggtcatctacacggctgtcttcacaccctactcggctgccttcctgctgaaggagacggaagaaggcccgcctgctaccgagtgtggctacgcctgccagccgctggctgtggtggacctcatcgtggacatcatgttcattgtggacatcctcatcaacttccgcaccacctacgtcaatgccaacgaggaggtggtcagccaccccggccgcatcgccgtccactacttcaagggctggttcctcatcgacatggtggccgccatccccttcgacctgctcatcttcggctctggctctgaggagctgatcgggctgctgaagactgcgcggctgctgcggctggtgcgcgtggcgcggaagctggatcgctactcagagtacggcgcggccgtgctgttcttgctcatgtgcacctttgcgctcatcgcgcactggctagcctgcatctggtacgccatcggcaacatggagcagccacacatggactcacgcatcggctggctgcacaacctgggcgaccagataggcaaaccctacaacagcagcggcctgggcggcccctccatcaaggacaagtatgtgacggcgctctacttcaccttcagcagcctcaccagtgtgggcttcggcaacgtctctcccaacaccaactcagagaagatcttctccatctgcgtcatgctcattggctccctcatgtatgctagcgtcttcggcaacgtgtcggccatcatccagcggctgtactcgggcacagcccgctaccacacacagatgctgcgggtgcgggagttcatccgcttccaccagatccccaatcccctgcgccagcgcctcgaggagtacttccagcacgcctggtcctacaccaacggcatcgacatgaacgcggtgctgaagggcttccctgagtgcctgcaggctgacatctgcctgcacctgaaccgctcactgctgcagcactgcaaacccttccgaggggccaccaagggctgccttcgggccctggccatgaagttcaagaccacacatgcaccgccaggggacacactggtgcatgctggggacctgctcaccgccctgtacttcatctcccggggctccatcgagatcctgcggggcgacgtcgtcgtggccatcctggggaagaatgacatctttggggagcctctgaacctgtatgcaaggcctggcaagtcgaacggggatgtgcgggccctcacctactgtgacctacacaagatccatcgggacgacctgctggaggtgctggacatgtaccctgagttctccgaccacttctggtccagcctggagatcaccttcaacctgcgagataccaacatgatcccgggctcccccggcagtacggagttagagggtggcttcagtcggcaacgcaagcgcaagttgtccttccgcaggcgcacggacaaggacacggagcagccaggggaggtgtcggccttggggccgggccgggcgggggcagggccgagtagccggggccggccgggggggccgtggggggagagcccgtccagtggcccctccagccctgagagcagtgaggatgagggcccaggccgcagctccagccccctccgcctggtgcccttctccagccccaggccccccggagagccgccgggtggggagcccctgatggaggactgcgagaagagcagcgacacttgcaaccccctgtcaggcgccttctcaggagtgtccaacattttcagcttctggggggacagtcggggccgccagtaccaggagctccctcgatgccccgcccccacccccagcctcctcaacatccccctctccagcccgggtcggcggccccggggcgacgtggagagcaggctggatgccctccagcgccagctcaacaggctggagacccggctgagtgcagacatggccactgtcctgcagctgctacagaggcagatgacgctggtcccgcccgcctacagtgctgtgaccaccccggggcctggccccacttccacatccccgctgttgcccgtcagccccctccccaccctcaccttggactcgctttctcaggtttcccagttcatggcgtgtgaggagctgcccccgggggccccagagcttccccaagaaggccccacacgacgcctctccctaccgggccagctgggggccctcacctcccagcccctgcacagacacggctcggacccgggcagttagtggggctgcccagtgtggacacgtggctcacccagggatcaaggcgctgctgggccgctccccttggaggccctgctcaggaggccctgaccgtggaaggggagaggaactcgaaagcacagctcctcccccagcccttgggaccatcttctcctgcagtcccctgggccccagtgagaggggcaggggcagggccggcagtaggtggggcctgtggtccccccactgccctgagggcattagctggtctaactgcccggaggcacccggccctgggccttaggcacctcaaggacttttctgctatttactgctcttattgttaaggataataattaaggatcatatgaataattaatgaagatgctgatgactatgaataataaataattatcctgaggaga

SEQ ID NO: 387 - DNA, 3884 bp, Homo sapiens
  source 1..3884: mol_type = genomic DNA
  misc_feature 1..3884: note = cDNA of KCNH2 gene SNP c.1967T>G (p.Phe656Cys)
atgccggtgcggaggggccacgtcgcgccgcagaacaccttcctggacaccatcatccgcaagtttgagggccagagccgtaagttcatcatcgccaacgctcgggtggagaactgcgccgtcatctactgcaacgacggcttctgcgagctgtgcggctactcgcgggccgaggtgatgcagcgaccctgcacctgcgacttcctgcacgggccgcgcacgcagcgccgcgctgccgcgcagatcgcgcaggcactgctgggcgccgaggagcgcaaagtggaaatcgccttctaccggaaagatgggagctgcttcctatgtctggtggatgtggtgcccgtgaagaacgaggatggggctgtcatcatgttcatcctcaatttcgaggtggtgatggagaaggacatggtggggtccccggctcatgacaccaaccaccggggcccccccaccagctggctggccccaggccgcgccaagaccttccgcctgaagctgcccgcgctgctggcgctgacggcccgggagtcgtcggtgcggtcgggcggcgcgggcggcgcgggcgccccgggggccgtggtggtggacgtggacctgacgcccgcggcacccagcagcgagtcgctggccctggacgaagtgacagccatggacaaccacgtggcagggctcgggcccgcggaggagcggcgtgcgctggtgggtcccggctctccgccccgcagcgcgcccggccagctcccatcgccccgggcgcacagcctcaaccccgacgcctcgggctccagctgcagcctggcccggacgcgctcccgagaaagctgcgccagcgtgcgccgcgcctcgtcggccgacgacatcgaggccatgcgcgccggggtgctgcccccgccaccgcgccacgccagcaccggggccatgcacccactgcgcagcggcttgctcaactccacctcggactccgacctcgtgcgctaccgcaccattagcaagattccccaaatcaccctcaactttgtggacctcaagggcgaccccttcttggcttcgcccaccagtgaccgtgagatcatagcacctaagataaaggagcgaacccacaatgtcactgagaaggtcacccaggtcctgtccctgggcgccgacgtgctgcctgagtacaagctgcaggcaccgcgcatccaccgctggaccatcctgcattacagccccttcaaggccgtgtgggactggctcatcctgctgctggtcatctacacggctgtcttcacaccctactcggctgccttcctgctgaaggagacggaagaaggcccgcctgctaccgagtgtggctacgcctgccagccgctggctgtggtggacctcatcgtggacatcatgttcattgtggacatcctcatcaacttccgcaccacctacgtcaatgccaacgaggaggtggtcagccaccccggccgcatcgccgtccactacttcaagggctggttcctcatcgacatggtggccgccatccccttcgacctgctcatcttcggctctggctctgaggagctgatcgggctgctgaagactgcgcggctgctgcggctggtgcgcgtggcgcggaagctggatcgctactcagagtacggcgcggccgtgctgttcttgctcatgtgcacctttgcgctcatcgcgcactggctagcctgcatctggtacgccatcggcaacatggagcagccacacatggactcacgcatcggctggctgcacaacctgggcgaccagataggcaaaccctacaacagcagcggcctgggcggcccctccatcaaggacaagtatgtgacggcgctctacttcaccttcagcagcctcaccagtgtgggcttcggcaacgtctctcccaacaccaactcagagaagatcttctccatctgcgtcatgctcattggctccctcatgtatgctagcatctgcggcaacgtgtcggccatcatccagcggctgtactcgggcacagcccgctaccacacacagatgctgcgggtgcgggagttcatccgcttccaccagatccccaatcccctgcgccagcgcctcgaggagtacttccagcacgcctggtcctacaccaacggcatcgacatgaacgcggtgctgaagggcttccctgagtgcctgcaggctgacatctgcctgcacctgaaccgctcactgctgcagcactgcaaacccttccgaggggccaccaagggctgccttcgggccctggccatgaagttcaagaccacacatgcaccgccaggggacacactggtgcatgctggggacctgctcaccgccctgtacttcatctcccggggctccatcgagatcctgcggggcgacgtcgtcgtggccatcctggggaagaatgacatctttggggagcctctgaacctgtatgcaaggcctggcaagtcgaacggggatgtgcgggccctcacctactgtgacctacacaagatccatcgggacgacctgctggaggtgctggacatgtaccctgagttctccgaccacttctggtccagcctggagatcaccttcaacctgcgagataccaacatgatcccgggctcccccggcagtacggagttagagggtggcttcagtcggcaacgcaagcgcaagttgtccttccgcaggcgcacggacaaggacacggagcagccaggggaggtgtcggccttggggccgggccgggcgggggcagggccgagtagccggggccggccgggggggccgtggggggagagcccgtccagtggcccctccagccctgagagcagtgaggatgagggcccaggccgcagctccagccccctccgcctggtgcccttctccagccccaggccccccggagagccgccgggtggggagcccctgatggaggactgcgagaagagcagcgacacttgcaaccccctgtcaggcgccttctcaggagtgtccaacattttcagcttctggggggacagtcggggccgccagtaccaggagctccctcgatgccccgcccccacccccagcctcctcaacatccccctctccagcccgggtcggcggccccggggcgacgtggagagcaggctggatgccctccagcgccagctcaacaggctggagacccggctgagtgcagacatggccactgtcctgcagctgctacagaggcagatgacgctggtcccgcccgcctacagtgctgtgaccaccccggggcctggccccacttccacatccccgctgttgcccgtcagccccctccccaccctcaccttggactcgctttctcaggtttcccagttcatggcgtgtgaggagctgcccccgggggccccagagcttccccaagaaggccccacacgacgcctctccctaccgggccagctgggggccctcacctcccagcccctgcacagacacggctcggacccgggcagttagtggggctgcccagtgtggacacgtggctcacccagggatcaaggcgctgctgggccgctccccttggaggccctgctcaggaggccctgaccgtggaaggggagaggaactcgaaagcacagctcctcccccagcccttgggaccatcttctcctgcagtcccctgggccccagtgagaggggcaggggcagggccggcagtaggtggggcctgtggtccccccactgccctgagggcattagctggtctaactgcccggaggcacccggccctgggccttaggcacctcaaggacttttctgctatttactgctcttattgttaaggataataattaaggatcatatgaataattaatgaagatgctgatgactatgaataataaataattatcctgaggaga

SEQ ID NO: 388 - DNA, 3884 bp, Homo sapiens
  source 1..3884: mol_type = genomic DNA
  misc_feature 1..3884: note = cDNA of KCNH2 gene SNP c.1969G>A (p.Gly657Ser)
atgccggtgcggaggggccacgtcgcgccgcagaacaccttcctggacaccatcatccgcaagtttgagggccagagccgtaagttcatcatcgccaacgctcgggtggagaactgcgccgtcatctactgcaacgacggcttctgcgagctgtgcggctactcgcgggccgaggtgatgcagcgaccctgcacctgcgacttcctgcacgggccgcgcacgcagcgccgcgctgccgcgcagatcgcgcaggcactgctgggcgccgaggagcgcaaagtggaaatcgccttctaccggaaagatgggagctgcttcctatgtctggtggatgtggtgcccgtgaagaacgaggatggggctgtcatcatgttcatcctcaatttcgaggtggtgatggagaaggacatggtggggtccccggctcatgacaccaaccaccggggcccccccaccagctggctggccccaggccgcgccaagaccttccgcctgaagctgcccgcgctgctggcgctgacggcccgggagtcgtcggtgcggtcgggcggcgcgggcggcgcgggcgccccgggggccgtggtggtggacgtggacctgacgcccgcggcacccagcagcgagtcgctggccctggacgaagtgacagccatggacaaccacgtggcagggctcgggcccgcggaggagcggcgtgcgctggtgggtcccggctctccgccccgcagcgcgcccggccagctcccatcgccccgggcgcacagcctcaaccccgacgcctcgggctccagctgcagcctggcccggacgcgctcccgagaaagctgcgccagcgtgcgccgcgcctcgtcggccgacgacatcgaggccatgcgcgccggggtgctgcccccgccaccgcgccacgccagcaccggggccatgcacccactgcgcagcggcttgctcaactccacctcggactccgacctcgtgcgctaccgcaccattagcaagattccccaaatcaccctcaactttgtggacctcaagggcgaccccttcttggcttcgcccaccagtgaccgtgagatcatagcacctaagataaaggagcgaacccacaatgtcactgagaaggtcacccaggtcctgtccctgggcgccgacgtgctgcctgagtacaagctgcaggcaccgcgcatccaccgctggaccatcctgcattacagccccttcaaggccgtgtgggactggctcatcctgctgctggtcatctacacggctgtcttcacaccctactcggctgccttcctgctgaaggagacggaagaaggcccgcctgctaccgagtgtggctacgcctgccagccgctggctgtggtggacctcatcgtggacatcatgttcattgtggacatcctcatcaacttccgcaccacctacgtcaatgccaacgaggaggtggtcagccaccccggccgcatcgccgtccactacttcaagggctggttcctcatcgacatggtggccgccatccccttcgacctgctcatcttcggctctggctctgaggagctgatcgggctgctgaagactgcgcggctgctgcggctggtgcgcgtggcgcggaagctggatcgctactcagagtacggcgcggccgtgctgttcttgctcatgtgcacctttgcgctcatcgcgcactggctagcctgcatctggtacgccatcggcaacatggagcagccacacatggactcacgcatcggctggctgcacaacctgggcgaccagataggcaaaccctacaacagcagcggcctgggcggcccctccatcaaggacaagtatgtgacggcgctctacttcaccttcagcagcctcaccagtgtgggcttcggcaacgtctctcccaacaccaactcagagaagatcttctccatctgcgtcatgctcattggctccctcatgtatgctagcatcttcagcaacgtgtcggccatcatccagcggctgtactcgggcacagcccgctaccacacacagatgctgcgggtgcgggagttcatccgcttccaccagatccccaatcccctgcgccagcgcctcgaggagtacttccagcacgcctggtcctacaccaacggcatcgacatgaacgcggtgctgaagggcttccctgagtgcctgcaggctgacatctgcctgcacctgaaccgctcactgctgcagcactgcaaacccttccgaggggccaccaagggctgccttcgggccctggccatgaagttcaagaccacacatgcaccgccaggggacacactggtgcatgctggggacctgctcaccgccctgtacttcatctcccggggctccatcgagatcctgcggggcgacgtcgtcgtggccatcctggggaagaatgacatctttggggagcctctgaacctgtatgcaaggcctggcaagtcgaacggggatgtgcgggccctcacctactgtgacctacacaagatccatcgggacgacctgctggaggtgctggacatgtaccctgagttctccgaccacttctggtccagcctggagatcaccttcaacctgcgagataccaacatgatcccgggctcccccggcagtacggagttagagggtggcttcagtcggcaacgcaagcgcaagttgtccttccgcaggcgcacggacaaggacacggagcagccaggggaggtgtcggccttggggccgggccgggcgggggcagggccgagtagccggggccggccgggggggccgtggggggagagcccgtccagtggcccctccagccctgagagcagtgaggatgagggcccaggccgcagctccagccccctccgcctggtgcccttctccagccccaggccccccggagagccgccgggtggggagcccctgatggaggactgcgagaagagcagcgacacttgcaaccccctgtcaggcgccttctcaggagtgtccaacattttcagcttctggggggacagtcggggccgccagtaccaggagctccctcgatgccccgcccccacccccagcctcctcaacatccccctctccagcccgggtcggcggccccggggcgacgtggagagcaggctggatgccctccagcgccagctcaacaggctggagacccggctgagtgcagacatggccactgtcctgcagctgctacagaggcagatgacgctggtcccgcccgcctacagtgctgtgaccaccccggggcctggccccacttccacatccccgctgttgcccgtcagccccctccccaccctcaccttggactcgctttctcaggtttcccagttcatggcgtgtgaggagctgcccccgggggccccagagcttccccaagaaggccccacacgacgcctctccctaccgggccagctgggggccctcacctcccagcccctgcacagacacggctcggacccgggcagttagtggggctgcccagtgtggacacgtggctcacccagggatcaaggcgctgctgggccgctccccttggaggccctgctcaggaggccctgaccgtggaaggggagaggaactcgaaagcacagctcctcccccagcccttgggaccatcttctcctgcagtcccctgggccccagtgagaggggcaggggcagggccggcagtaggtggggcctgtggtccccccactgccctgagggcattagctggtctaactgcccggaggcacccggccctgggccttaggcacctcaaggacttttctgctatttactgctcttattgttaaggataataattaaggatcatatgaataattaatgaagatgctgatgactatgaataataaataattatcctgaggaga

SEQ ID NO: 389 - DNA, 3884 bp, Homo sapiens
  source 1..3884: mol_type = genomic DNA
  misc_feature 1..3884: note = cDNA of KCNH2 gene SNP c.1969G>C (p.Gly657Arg)
atgccggtgcggaggggccacgtcgcgccgcagaacaccttcctggacaccatcatccgcaagtttgagggccagagccgtaagttcatcatcgccaacgctcgggtggagaactgcgccgtcatctactgcaacgacggcttctgcgagctgtgcggctactcgcgggccgaggtgatgcagcgaccctgcacctgcgacttcctgcacgggccgcgcacgcagcgccgcgctgccgcgcagatcgcgcaggcactgctgggcgccgaggagcgcaaagtggaaatcgccttctaccggaaagatgggagctgcttcctatgtctggtggatgtggtgcccgtgaagaacgaggatggggctgtcatcatgttcatcctcaatttcgaggtggtgatggagaaggacatggtggggtccccggctcatgacaccaaccaccggggcccccccaccagctggctggccccaggccgcgccaagaccttccgcctgaagctgcccgcgctgctggcgctgacggcccgggagtcgtcggtgcggtcgggcggcgcgggcggcgcgggcgccccgggggccgtggtggtggacgtggacctgacgcccgcggcacccagcagcgagtcgctggccctggacgaagtgacagccatggacaaccacgtggcagggctcgggcccgcggaggagcggcgtgcgctggtgggtcccggctctccgccccgcagcgcgcccggccagctcccatcgccccgggcgcacagcctcaaccccgacgcctcgggctccagctgcagcctggcccggacgcgctcccgagaaagctgcgccagcgtgcgccgcgcctcgtcggccgacgacatcgaggccatgcgcgccggggtgctgcccccgccaccgcgccacgccagcaccggggccatgcacccactgcgcagcggcttgctcaactccacctcggactccgacctcgtgcgctaccgcaccattagcaagattccccaaatcaccctcaactttgtggacctcaagggcgaccccttcttggcttcgcccaccagtgaccgtgagatcatagcacctaagataaaggagcgaacccacaatgtcactgagaaggtcacccaggtcctgtccctgggcgccgacgtgctgcctgagtacaagctgcaggcaccgcgcatccaccgctggaccatcctgcattacagccccttcaaggccgtgtgggactggctcatcctgctgctggtcatctacacggctgtcttcacaccctactcggctgccttcctgctgaaggagacggaagaaggcccgcctgctaccgagtgtggctacgcctgccagccgctggctgtggtggacctcatcgtggacatcatgttcattgtggacatcctcatcaacttccgcaccacctacgtcaatgccaacgaggaggtggtcagccaccccggccgcatcgccgtccactacttcaagggctggttcctcatcgacatggtggccgccatccccttcgacctgctcatcttcggctctggctctgaggagctgatcgggctgctgaagactgcgcggctgctgcggctggtgcgcgtggcgcggaagctggatcgctactcagagtacggcgcggccgtgctgttcttgctcatgtgcacctttgcgctcatcgcgcactggctagcctgcatctggtacgccatcggcaacatggagcagccacacatggactcacgcatcggctggctgcacaacctgggcgaccagataggcaaaccctacaacagcagcggcctgggcggcccctccatcaaggacaagtatgtgacggcgctctacttcaccttcagcagcctcaccagtgtgggcttcggcaacgtctctcccaacaccaactcagagaagatcttctccatctgcgtcatgctcattggctccctcatgtatgctagcatcttccgcaacgtgtcggccatcatccagcggctgtactcgggcacagcccgctaccacacacagatgctgcgggtgcgggagttcatccgcttccaccagatccccaatcccctgcgccagcgcctcgaggagtacttccagcacgcctggtcctacaccaacggcatcgacatgaacgcggtgctgaagggcttccctgagtgcctgcaggctgacatctgcctgcacctgaaccgctcactgctgcagcactgcaaacccttccgaggggccaccaagggctgccttcgggccctggccatgaagttcaagaccacacatgcaccgccaggggacacactggtgcatgctggggacctgctcaccgccctgtacttcatctcccggggctccatcgagatcctgcggggcgacgtcgtcgtggccatcctggggaagaatgacatctttggggagcctctgaacctgtatgcaaggcctggcaagtcgaacggggatgtgcgggccctcacctactgtgacctacacaagatccatcgggacgacctgctggaggtgctggacatgtaccctgagttctccgaccacttctggtccagcctggagatcaccttcaacctgcgagataccaacatgatcccgggctcccccggcagtacggagttagagggtggcttcagtcggcaacgcaagcgcaagttgtccttccgcaggcgcacggacaaggacacggagcagccaggggaggtgtcggccttggggccgggccgggcgggggcagggccgagtagccggggccggccgggggggccgtggggggagagcccgtccagtggcccctccagccctgagagcagtgaggatgagggcccaggccgcagctccagccccctccgcctggtgcccttctccagccccaggccccccggagagccgccgggtggggagcccctgatggaggactgcgagaagagcagcgacacttgcaaccccctgtcaggcgccttctcaggagtgtccaacattttcagcttctggggggacagtcggggccgccagtaccaggagctccctcgatgccccgcccccacccccagcctcctcaacatccccctctccagcccgggtcggcggccccggggcgacgtggagagcaggctggatgccctccagcgccagctcaacaggctggagacccggctgagtgcagacatggccactgtcctgcagctgctacagaggcagatgacgctggtcccgcccgcctacagtgctgtgaccaccccggggcctggccccacttccacatccccgctgttgcccgtcagccccctccccaccctcaccttggactcgctttctcaggtttcccagttcatggcgtgtgaggagctgcccccgggggccccagagcttccccaagaaggccccacacgacgcctctccctaccgggccagctgggggccctcacctcccagcccctgcacagacacggctcggacccgggcagttagtggggctgcccagtgtggacacgtggctcacccagggatcaaggcgctgctgggccgctccccttggaggccctgctcaggaggccctgaccgtggaaggggagaggaactcgaaagcacagctcctcccccagcccttgggaccatcttctcctgcagtcccctgggccccagtgagaggggcaggggcagggccggcagtaggtggggcctgtggtccccccactgccctgagggcattagctggtctaactgcccggaggcacccggccctgggccttaggcacctcaaggacttttctgctatttactgctcttattgttaaggataataattaaggatcatatgaataattaatgaagatgctgatgactatgaataataaataattatcctgaggaga

SEQ ID NO: 390 - DNA, 3884 bp, Homo sapiens
  source 1..3884: mol_type = genomic DNA
  misc_feature 1..3884: note = cDNA of KCNH2 gene SNP c.1969G>T (p.Gly657Cys)
atgccggtgcggaggggccacgtcgcgccgcagaacaccttcctggacaccatcatccgcaagtttgagggccagagccgtaagttcatcatcgccaacgctcgggtggagaactgcgccgtcatctactgcaacgacggcttctgcgagctgtgcggctactcgcgggccgaggtgatgcagcgaccctgcacctgcgacttcctgcacgggccgcgcacgcagcgccgcgctgccgcgcagatcgcgcaggcactgctgggcgccgaggagcgcaaagtggaaatcgccttctaccggaaagatgggagctgcttcctatgtctggtggatgtggtgcccgtgaagaacgaggatggggctgtcatcatgttcatcctcaatttcgaggtggtgatggagaaggacatggtggggtccccggctcatgacaccaaccaccggggcccccccaccagctggctggccccaggccgcgccaagaccttccgcctgaagctgcccgcgctgctggcgctgacggcccgggagtcgtcggtgcggtcgggcggcgcgggcggcgcgggcgccccgggggccgtggtggtggacgtggacctgacgcccgcggcacccagcagcgagtcgctggccctggacgaagtgacagccatggacaaccacgtggcagggctcgggcccgcggaggagcggcgtgcgctggtgggtcccggctctccgccccgcagcgcgcccggccagctcccatcgccccgggcgcacagcctcaaccccgacgcctcgggctccagctgcagcctggcccggacgcgctcccgagaaagctgcgccagcgtgcgccgcgcctcgtcggccgacgacatcgaggccatgcgcgccggggtgctgcccccgccaccgcgccacgccagcaccggggccatgcacccactgcgcagcggcttgctcaactccacctcggactccgacctcgtgcgctaccgcaccattagcaagattccccaaatcaccctcaactttgtggacctcaagggcgaccccttcttggcttcgcccaccagtgaccgtgagatcatagcacctaagataaaggagcgaacccacaatgtcactgagaaggtcacccaggtcctgtccctgggcgccgacgtgctgcctgagtacaagctgcaggcaccgcgcatccaccgctggaccatcctgcattacagccccttcaaggccgtgtgggactggctcatcctgctgctggtcatctacacggctgtcttcacaccctactcggctgccttcctgctgaaggagacggaagaaggcccgcctgctaccgagtgtggctacgcctgccagccgctggctgtggtggacctcatcgtggacatcatgttcattgtggacatcctcatcaacttccgcaccacctacgtcaatgccaacgaggaggtggtcagccaccccggccgcatcgccgtccactacttcaagggctggttcctcatcgacatggtggccgccatccccttcgacctgctcatcttcggctctggctctgaggagctgatcgggctgctgaagactgcgcggctgctgcggctggtgcgcgtggcgcggaagctggatcgctactcagagtacggcgcggccgtgctgttcttgctcatgtgcacctttgcgctcatcgcgcactggctagcctgcatctggtacgccatcggcaacatggagcagccacacatggactcacgcatcggctggctgcacaacctgggcgaccagataggcaaaccctacaacagcagcggcctgggcggcccctccatcaaggacaagtatgtgacggcgctctacttcaccttcagcagcctcaccagtgtgggcttcggcaacgtctctcccaacaccaactcagagaagatcttctccatctgcgtcatgctcattggctccctcatgtatgctagcatcttctgcaacgtgtcggccatcatccagcggctgtactcgggcacagcccgctaccacacacagatgctgcgggtgcgggagttcatccgcttccaccagatccccaatcccctgcgccagcgcctcgaggagtacttccagcacgcctggtcctacaccaacggcatcgacatgaacgcggtgctgaagggcttccctgagtgcctgcaggctgacatctgcctgcacctgaaccgctcactgctgcagcactgcaaacccttccgaggggccaccaagggctgccttcgggccctggccatgaagttcaagaccacacatgcaccgccaggggacacactggtgcatgctggggacctgctcaccgccctgtacttcatctcccggggctccatcgagatcctgcggggcgacgtcgtcgtggccatcctggggaagaatgacatctttggggagcctctgaacctgtatgcaaggcctggcaagtcgaacggggatgtgcgggccctcacctactgtgacctacacaagatccatcgggacgacctgctggaggtgctggacatgtaccctgagttctccgaccacttctggtccagcctggagatcaccttcaacctgcgagataccaacatgatcccgggctcccccggcagtacggagttagagggtggcttcagtcggcaacgcaagcgcaagttgtccttccgcaggcgcacggacaaggacacggagcagccaggggaggtgtcggccttggggccgggccgggcgggggcagggccgagtagccggggccggccgggggggccgtggggggagagcccgtccagtggcccctccagccctgagagcagtgaggatgagggcccaggccgcagctccagccccctccgcctggtgcccttctccagccccaggccccccggagagccgccgggtggggagcccctgatggaggactgcgagaagagcagcgacacttgcaaccccctgtcaggcgccttctcaggagtgtccaacattttcagcttctggggggacagtcggggccgccagtaccaggagctccctcgatgccccgcccccacccccagcctcctcaacatccccctctccagcccgggtcggcggccccggggcgacgtggagagcaggctggatgccctccagcgccagctcaacaggctggagacccggctgagtgcagacatggccactgtcctgcagctgctacagaggcagatgacgctggtcccgcccgcctacagtgctgtgaccaccccggggcctggccccacttccacatccccgctgttgcccgtcagccccctccccaccctcaccttggactcgctttctcaggtttcccagttcatggcgtgtgaggagctgcccccgggggccccagagcttccccaagaaggccccacacgacgcctctccctaccgggccagctgggggccctcacctcccagcccctgcacagacacggctcggacccgggcagttagtggggctgcccagtgtggacacgtggctcacccagggatcaaggcgctgctgggccgctccccttggaggccctgctcaggaggccctgaccgtggaaggggagaggaactcgaaagcacagctcctcccccagcccttgggaccatcttctcctgcagtcccctgggccccagtgagaggggcaggggcagggccggcagtaggtggggcctgtggtccccccactgccctgagggcattagctggtctaactgcccggaggcacccggccctgggccttaggcacctcaaggacttttctgctatttactgctcttattgttaaggataataattaaggatcatatgaataattaatgaagatgctgatgactatgaataataaataattatcctgaggaga

SEQ ID NO: 391 - DNA, 3884 bp, Homo sapiens
  source 1..3884: mol_type = genomic DNA
  misc_feature 1..3884: note = cDNA of KCNH2 gene SNP c.196T>C (p.Cys66Arg)
atgccggtgcggaggggccacgtcgcgccgcagaacaccttcctggacaccatcatccgcaagtttgagggccagagccgtaagttcatcatcgccaacgctcgggtggagaactgcgccgtcatctactgcaacgacggcttctgcgagctgtgcggctactcgcgggccgaggtgatgcagcgaccctgcacccgcgacttcctgcacgggccgcgcacgcagcgccgcgctgccgcgcagatcgcgcaggcactgctgggcgccgaggagcgcaaagtggaaatcgccttctaccggaaagatgggagctgcttcctatgtctggtggatgtggtgcccgtgaagaacgaggatggggctgtcatcatgttcatcctcaatttcgaggtggtgatggagaaggacatggtggggtccccggctcatgacaccaaccaccggggcccccccaccagctggctggccccaggccgcgccaagaccttccgcctgaagctgcccgcgctgctggcgctgacggcccgggagtcgtcggtgcggtcgggcggcgcgggcggcgcgggcgccccgggggccgtggtggtggacgtggacctgacgcccgcggcacccagcagcgagtcgctggccctggacgaagtgacagccatggacaaccacgtggcagggctcgggcccgcggaggagcggcgtgcgctggtgggtcccggctctccgccccgcagcgcgcccggccagctcccatcgccccgggcgcacagcctcaaccccgacgcctcgggctccagctgcagcctggcccggacgcgctcccgagaaagctgcgccagcgtgcgccgcgcctcgtcggccgacgacatcgaggccatgcgcgccggggtgctgcccccgccaccgcgccacgccagcaccggggccatgcacccactgcgcagcggcttgctcaactccacctcggactccgacctcgtgcgctaccgcaccattagcaagattccccaaatcaccctcaactttgtggacctcaagggcgaccccttcttggcttcgcccaccagtgaccgtgagatcatagcacctaagataaaggagcgaacccacaatgtcactgagaaggtcacccaggtcctgtccctgggcgccgacgtgctgcctgagtacaagctgcaggcaccgcgcatccaccgctggaccatcctgcattacagccccttcaaggccgtgtgggactggctcatcctgctgctggtcatctacacggctgtcttcacaccctactcggctgccttcctgctgaaggagacggaagaaggcccgcctgctaccgagtgtggctacgcctgccagccgctggctgtggtggacctcatcgtggacatcatgttcattgtggacatcctcatcaacttccgcaccacctacgtcaatgccaacgaggaggtggtcagccaccccggccgcatcgccgtccactacttcaagggctggttcctcatcgacatggtggccgccatccccttcgacctgctcatcttcggctctggctctgaggagctgatcgggctgctgaagactgcgcggctgctgcggctggtgcgcgtggcgcggaagctggatcgctactcagagtacggcgcggccgtgctgttcttgctcatgtgcacctttgcgctcatcgcgcactggctagcctgcatctggtacgccatcggcaacatggagcagccacacatggactcacgcatcggctggctgcacaacctgggcgaccagataggcaaaccctacaacagcagcggcctgggcggcccctccatcaaggacaagtatgtgacggcgctctacttcaccttcagcagcctcaccagtgtgggcttcggcaacgtctctcccaacaccaactcagagaagatcttctccatctgcgtcatgctcattggctccctcatgtatgctagcatcttcggcaacgtgtcggccatcatccagcggctgtactcgggcacagcccgctaccacacacagatgctgcgggtgcgggagttcatccgcttccaccagatccccaatcccctgcgccagcgcctcgaggagtacttccagcacgcctggtcctacaccaacggcatcgacatgaacgcggtgctgaagggcttccctgagtgcctgcaggctgacatctgcctgcacctgaaccgctcactgctgcagcactgcaaacccttccgaggggccaccaagggctgccttcgggccctggccatgaagttcaagaccacacatgcaccgccaggggacacactggtgcatgctggggacctgctcaccgccctgtacttcatctcccggggctccatcgagatcctgcggggcgacgtcgtcgtggccatcctggggaagaatgacatctttggggagcctctgaacctgtatgcaaggcctggcaagtcgaacggggatgtgcgggccctcacctactgtgacctacacaagatccatcgggacgacctgctggaggtgctggacatgtaccctgagttctccgaccacttctggtccagcctggagatcaccttcaacctgcgagataccaacatgatcccgggctcccccggcagtacggagttagagggtggcttcagtcggcaacgcaagcgcaagttgtccttccgcaggcgcacggacaaggacacggagcagccaggggaggtgtcggccttggggccgggccgggcgggggcagggccgagtagccggggccggccgggggggccgtggggggagagcccgtccagtggcccctccagccctgagagcagtgaggatgagggcccaggccgcagctccagccccctccgcctggtgcccttctccagccccaggccccccggagagccgccgggtggggagcccctgatggaggactgcgagaagagcagcgacacttgcaaccccctgtcaggcgccttctcaggagtgtccaacattttcagcttctggggggacagtcggggccgccagtaccaggagctccctcgatgccccgcccccacccccagcctcctcaacatccccctctccagcccgggtcggcggccccggggcgacgtggagagcaggctggatgccctccagcgccagctcaacaggctggagacccggctgagtgcagacatggccactgtcctgcagctgctacagaggcagatgacgctggtcccgcccgcctacagtgctgtgaccaccccggggcctggccccacttccacatccccgctgttgcccgtcagccccctccccaccctcaccttggactcgctttctcaggtttcccagttcatggcgtgtgaggagctgcccccgggggccccagagcttccccaagaaggccccacacgacgcctctccctaccgggccagctgggggccctcacctcccagcccctgcacagacacggctcggacccgggcagttagtggggctgcccagtgtggacacgtggctcacccagggatcaaggcgctgctgggccgctccccttggaggccctgctcaggaggccctgaccgtggaaggggagaggaactcgaaagcacagctcctcccccagcccttgggaccatcttctcctgcagtcccctgggccccagtgagaggggcaggggcagggccggcagtaggtggggcctgtggtccccccactgccctgagggcattagctggtctaactgcccggaggcacccggccctgggccttaggcacctcaaggacttttctgctatttactgctcttattgttaaggataataattaaggatcatatgaataattaatgaagatgctgatgactatgaataataaataattatcctgaggaga

SEQ ID NO: 392 - DNA, 3884 bp, Homo sapiens
  source 1..3884: mol_type = genomic DNA
  misc_feature 1..3884: note = cDNA of KCNH2 gene SNP c.196T>G (p.Cys66Gly)
atgccggtgcggaggggccacgtcgcgccgcagaacaccttcctggacaccatcatccgcaagtttgagggccagagccgtaagttcatcatcgccaacgctcgggtggagaactgcgccgtcatctactgcaacgacggcttctgcgagctgtgcggctactcgcgggccgaggtgatgcagcgaccctgcaccggcgacttcctgcacgggccgcgcacgcagcgccgcgctgccgcgcagatcgcgcaggcactgctgggcgccgaggagcgcaaagtggaaatcgccttctaccggaaagatgggagctgcttcctatgtctggtggatgtggtgcccgtgaagaacgaggatggggctgtcatcatgttcatcctcaatttcgaggtggtgatggagaaggacatggtggggtccccggctcatgacaccaaccaccggggcccccccaccagctggctggccccaggccgcgccaagaccttccgcctgaagctgcccgcgctgctggcgctgacggcccgggagtcgtcggtgcggtcgggcggcgcgggcggcgcgggcgccccgggggccgtggtggtggacgtggacctgacgcccgcggcacccagcagcgagtcgctggccctggacgaagtgacagccatggacaaccacgtggcagggctcgggcccgcggaggagcggcgtgcgctggtgggtcccggctctccgccccgcagcgcgcccggccagctcccatcgccccgggcgcacagcctcaaccccgacgcctcgggctccagctgcagcctggcccggacgcgctcccgagaaagctgcgccagcgtgcgccgcgcctcgtcggccgacgacatcgaggccatgcgcgccggggtgctgcccccgccaccgcgccacgccagcaccggggccatgcacccactgcgcagcggcttgctcaactccacctcggactccgacctcgtgcgctaccgcaccattagcaagattccccaaatcaccctcaactttgtggacctcaagggcgaccccttcttggcttcgcccaccagtgaccgtgagatcatagcacctaagataaaggagcgaacccacaatgtcactgagaaggtcacccaggtcctgtccctgggcgccgacgtgctgcctgagtacaagctgcaggcaccgcgcatccaccgctggaccatcctgcattacagccccttcaaggccgtgtgggactggctcatcctgctgctggtcatctacacggctgtcttcacaccctactcggctgccttcctgctgaaggagacggaagaaggcccgcctgctaccgagtgtggctacgcctgccagccgctggctgtggtggacctcatcgtggacatcatgttcattgtggacatcctcatcaacttccgcaccacctacgtcaatgccaacgaggaggtggtcagccaccccggccgcatcgccgtccactacttcaagggctggttcctcatcgacatggtggccgccatccccttcgacctgctcatcttcggctctggctctgaggagctgatcgggctgctgaagactgcgcggctgctgcggctggtgcgcgtggcgcggaagctggatcgctactcagagtacggcgcggccgtgctgttcttgctcatgtgcacctttgcgctcatcgcgcactggctagcctgcatctggtacgccatcggcaacatggagcagccacacatggactcacgcatcggctggctgcacaacctgggcgaccagataggcaaaccctacaacagcagcggcctgggcggcccctccatcaaggacaagtatgtgacggcgctctacttcaccttcagcagcctcaccagtgtgggcttcggcaacgtctctcccaacaccaactcagagaagatcttctccatctgcgtcatgctcattggctccctcatgtatgctagcatcttcggcaacgtgtcggccatcatccagcggctgtactcgggcacagcccgctaccacacacagatgctgcgggtgcgggagttcatccgcttccaccagatccccaatcccctgcgccagcgcctcgaggagtacttccagcacgcctggtcctacaccaacggcatcgacatgaacgcggtgctgaagggcttccctgagtgcctgcaggctgacatctgcctgcacctgaaccgctcactgctgcagcactgcaaacccttccgaggggccaccaagggctgccttcgggccctggccatgaagttcaagaccacacatgcaccgccaggggacacactggtgcatgctggggacctgctcaccgccctgtacttcatctcccggggctccatcgagatcctgcggggcgacgtcgtcgtggccatcctggggaagaatgacatctttggggagcctctgaacctgtatgcaaggcctggcaagtcgaacggggatgtgcgggccctcacctactgtgacctacacaagatccatcgggacgacctgctggaggtgctggacatgtaccctgagttctccgaccacttctggtccagcctggagatcaccttcaacctgcgagataccaacatgatcccgggctcccccggcagtacggagttagagggtggcttcagtcggcaacgcaagcgcaagttgtccttccgcaggcgcacggacaaggacacggagcagccaggggaggtgtcggccttggggccgggccgggcgggggcagggccgagtagccggggccggccgggggggccgtggggggagagcccgtccagtggcccctccagccctgagagcagtgaggatgagggcccaggccgcagctccagccccctccgcctggtgcccttctccagccccaggccccccggagagccgccgggtggggagcccctgatggaggactgcgagaagagcagcgacacttgcaaccccctgtcaggcgccttctcaggagtgtccaacattttcagcttctggggggacagtcggggccgccagtaccaggagctccctcgatgccccgcccccacccccagcctcctcaacatccccctctccagcccgggtcggcggccccggggcgacgtggagagcaggctggatgccctccagcgccagctcaacaggctggagacccggctgagtgcagacatggccactgtcctgcagctgctacagaggcagatgacgctggtcccgcccgcctacagtgctgtgaccaccccggggcctggccccacttccacatccccgctgttgcccgtcagccccctccccaccctcaccttggactcgctttctcaggtttcccagttcatggcgtgtgaggagctgcccccgggggccccagagcttccccaagaaggccccacacgacgcctctccctaccgggccagctgggggccctcacctcccagcccctgcacagacacggctcggacccgggcagttagtggggctgcccagtgtggacacgtggctcacccagggatcaaggcgctgctgggccgctccccttggaggccctgctcaggaggccctgaccgtggaaggggagaggaactcgaaagcacagctcctcccccagcccttgggaccatcttctcctgcagtcccctgggccccagtgagaggggcaggggcagggccggcagtaggtggggcctgtggtccccccactgccctgagggcattagctggtctaactgcccggaggcacccggccctgggccttaggcacctcaaggacttttctgctatttactgctcttattgttaaggataataattaaggatcatatgaataattaatgaagatgctgatgactatgaataataaataattatcctgaggaga

SEQ ID NO: 393 - DNA, 3884 bp, Homo sapiens
  source 1..3884: mol_type = genomic DNA
  misc_feature 1..3884: note = cDNA of KCNH2 gene SNP c.1970G>T (p.Gly657Val)
atgccggtgcggaggggccacgtcgcgccgcagaacaccttcctggacaccatcatccgcaagtttgagggccagagccgtaagttcatcatcgccaacgctcgggtggagaactgcgccgtcatctactgcaacgacggcttctgcgagctgtgcggctactcgcgggccgaggtgatgcagcgaccctgcacctgcgacttcctgcacgggccgcgcacgcagcgccgcgctgccgcgcagatcgcgcaggcactgctgggcgccgaggagcgcaaagtggaaatcgccttctaccggaaagatgggagctgcttcctatgtctggtggatgtggtgcccgtgaagaacgaggatggggctgtcatcatgttcatcctcaatttcgaggtggtgatggagaaggacatggtggggtccccggctcatgacaccaaccaccggggcccccccaccagctggctggccccaggccgcgccaagaccttccgcctgaagctgcccgcgctgctggcgctgacggcccgggagtcgtcggtgcggtcgggcggcgcgggcggcgcgggcgccccgggggccgtggtggtggacgtggacctgacgcccgcggcacccagcagcgagtcgctggccctggacgaagtgacagccatggacaaccacgtggcagggctcgggcccgcggaggagcggcgtgcgctggtgggtcccggctctccgccccgcagcgcgcccggccagctcccatcgccccgggcgcacagcctcaaccccgacgcctcgggctccagctgcagcctggcccggacgcgctcccgagaaagctgcgccagcgtgcgccgcgcctcgtcggccgacgacatcgaggccatgcgcgccggggtgctgcccccgccaccgcgccacgccagcaccggggccatgcacccactgcgcagcggcttgctcaactccacctcggactccgacctcgtgcgctaccgcaccattagcaagattccccaaatcaccctcaactttgtggacctcaagggcgaccccttcttggcttcgcccaccagtgaccgtgagatcatagcacctaagataaaggagcgaacccacaatgtcactgagaaggtcacccaggtcctgtccctgggcgccgacgtgctgcctgagtacaagctgcaggcaccgcgcatccaccgctggaccatcctgcattacagccccttcaaggccgtgtgggactggctcatcctgctgctggtcatctacacggctgtcttcacaccctactcggctgccttcctgctgaaggagacggaagaaggcccgcctgctaccgagtgtggctacgcctgccagccgctggctgtggtggacctcatcgtggacatcatgttcattgtggacatcctcatcaacttccgcaccacctacgtcaatgccaacgaggaggtggtcagccaccccggccgcatcgccgtccactacttcaagggctggttcctcatcgacatggtggccgccatccccttcgacctgctcatcttcggctctggctctgaggagctgatcgggctgctgaagactgcgcggctgctgcggctggtgcgcgtggcgcggaagctggatcgctactcagagtacggcgcggccgtgctgttcttgctcatgtgcacctttgcgctcatcgcgcactggctagcctgcatctggtacgccatcggcaacatggagcagccacacatggactcacgcatcggctggctgcacaacctgggcgaccagataggcaaaccctacaacagcagcggcctgggcggcccctccatcaaggacaagtatgtgacggcgctctacttcaccttcagcagcctcaccagtgtgggcttcggcaacgtctctcccaacaccaactcagagaagatcttctccatctgcgtcatgctcattggctccctcatgtatgctagcatcttcgtcaacgtgtcggccatcatccagcggctgtactcgggcacagcccgctaccacacacagatgctgcgggtgcgggagttcatccgcttccaccagatccccaatcccctgcgccagcgcctcgaggagtacttccagcacgcctggtcctacaccaacggcatcgacatgaacgcggtgctgaagggcttccctgagtgcctgcaggctgacatctgcctgcacctgaaccgctcactgctgcagcactgcaaacccttccgaggggccaccaagggctgccttcgggccctggccatgaagttcaagaccacacatgcaccgccaggggacacactggtgcatgctggggacctgctcaccgccctgtacttcatctcccggggctccatcgagatcctgcggggcgacgtcgtcgtggccatcctggggaagaatgacatctttggggagcctctgaacctgtatgcaaggcctggcaagtcgaacggggatgtgcgggccctcacctactgtgacctacacaagatccatcgggacgacctgctggaggtgctggacatgtaccctgagttctccgaccacttctggtccagcctggagatcaccttcaacctgcgagataccaacatgatcccgggctcccccggcagtacggagttagagggtggcttcagtcggcaacgcaagcgcaagttgtccttccgcaggcgcacggacaaggacacggagcagccaggggaggtgtcggccttggggccgggccgggcgggggcagggccgagtagccggggccggccgggggggccgtggggggagagcccgtccagtggcccctccagccctgagagcagtgaggatgagggcccaggccgcagctccagccccctccgcctggtgcccttctccagccccaggccccccggagagccgccgggtggggagcccctgatggaggactgcgagaagagcagcgacacttgcaaccccctgtcaggcgccttctcaggagtgtccaacattttcagcttctggggggacagtcggggccgccagtaccaggagctccctcgatgccccgcccccacccccagcctcctcaacatccccctctccagcccgggtcggcggccccggggcgacgtggagagcaggctggatgccctccagcgccagctcaacaggctggagacccggctgagtgcagacatggccactgtcctgcagctgctacagaggcagatgacgctggtcccgcccgcctacagtgctgtgaccaccccggggcctggccccacttccacatccccgctgttgcccgtcagccccctccccaccctcaccttggactcgctttctcaggtttcccagttcatggcgtgtgaggagctgcccccgggggccccagagcttccccaagaaggccccacacgacgcctctccctaccgggccagctgggggccctcacctcccagcccctgcacagacacggctcggacccgggcagttagtggggctgcccagtgtggacacgtggctcacccagggatcaaggcgctgctgggccgctccccttggaggccctgctcaggaggccctgaccgtggaaggggagaggaactcgaaagcacagctcctcccccagcccttgggaccatcttctcctgcagtcccctgggccccagtgagaggggcaggggcagggccggcagtaggtggggcctgtggtccccccactgccctgagggcattagctggtctaactgcccggaggcacccggccctgggccttaggcacctcaaggacttttctgctatttactgctcttattgttaaggataataattaaggatcatatgaataattaatgaagatgctgatgactatgaataataaataattatcctgaggaga

SEQ ID NO: 394 - DNA, 3884 bp, Homo sapiens
  source 1..3884: mol_type = genomic DNA
  misc_feature 1..3884: note = cDNA of KCNH2 gene SNP c.1973A>G (p.Asn658Ser)
atgccggtgcggaggggccacgtcgcgccgcagaacaccttcctggacaccatcatccgcaagtttgagggccagagccgtaagttcatcatcgccaacgctcgggtggagaactgcgccgtcatctactgcaacgacggcttctgcgagctgtgcggctactcgcgggccgaggtgatgcagcgaccctgcacctgcgacttcctgcacgggccgcgcacgcagcgccgcgctgccgcgcagatcgcgcaggcactgctgggcgccgaggagcgcaaagtggaaatcgccttctaccggaaagatgggagctgcttcctatgtctggtggatgtggtgcccgtgaagaacgaggatggggctgtcatcatgttcatcctcaatttcgaggtggtgatggagaaggacatggtggggtccccggctcatgacaccaaccaccggggcccccccaccagctggctggccccaggccgcgccaagaccttccgcctgaagctgcccgcgctgctggcgctgacggcccgggagtcgtcggtgcggtcgggcggcgcgggcggcgcgggcgccccgggggccgtggtggtggacgtggacctgacgcccgcggcacccagcagcgagtcgctggccctggacgaagtgacagccatggacaaccacgtggcagggctcgggcccgcggaggagcggcgtgcgctggtgggtcccggctctccgccccgcagcgcgcccggccagctcccatcgccccgggcgcacagcctcaaccccgacgcctcgggctccagctgcagcctggcccggacgcgctcccgagaaagctgcgccagcgtgcgccgcgcctcgtcggccgacgacatcgaggccatgcgcgccggggtgctgcccccgccaccgcgccacgccagcaccggggccatgcacccactgcgcagcggcttgctcaactccacctcggactccgacctcgtgcgctaccgcaccattagcaagattccccaaatcaccctcaactttgtggacctcaagggcgaccccttcttggcttcgcccaccagtgaccgtgagatcatagcacctaagataaaggagcgaacccacaatgtcactgagaaggtcacccaggtcctgtccctgggcgccgacgtgctgcctgagtacaagctgcaggcaccgcgcatccaccgctggaccatcctgcattacagccccttcaaggccgtgtgggactggctcatcctgctgctggtcatctacacggctgtcttcacaccctactcggctgccttcctgctgaaggagacggaagaaggcccgcctgctaccgagtgtggctacgcctgccagccgctggctgtggtggacctcatcgtggacatcatgttcattgtggacatcctcatcaacttccgcaccacctacgtcaatgccaacgaggaggtggtcagccaccccggccgcatcgccgtccactacttcaagggctggttcctcatcgacatggtggccgccatccccttcgacctgctcatcttcggctctggctctgaggagctgatcgggctgctgaagactgcgcggctgctgcggctggtgcgcgtggcgcggaagctggatcgctactcagagtacggcgcggccgtgctgttcttgctcatgtgcacctttgcgctcatcgcgcactggctagcctgcatctggtacgccatcggcaacatggagcagccacacatggactcacgcatcggctggctgcacaacctgggcgaccagataggcaaaccctacaacagcagcggcctgggcggcccctccatcaaggacaagtatgtgacggcgctctacttcaccttcagcagcctcaccagtgtgggcttcggcaacgtctctcccaacaccaactcagagaagatcttctccatctgcgtcatgctcattggctccctcatgtatgctagcatcttcggcagcgtgtcggccatcatccagcggctgtactcgggcacagcccgctaccacacacagatgctgcgggtgcgggagttcatccgcttccaccagatccccaatcccctgcgccagcgcctcgaggagtacttccagcacgcctggtcctacaccaacggcatcgacatgaacgcggtgctgaagggcttccctgagtgcctgcaggctgacatctgcctgcacctgaaccgctcactgctgcagcactgcaaacccttccgaggggccaccaagggctgccttcgggccctggccatgaagttcaagaccacacatgcaccgccaggggacacactggtgcatgctggggacctgctcaccgccctgtacttcatctcccggggctccatcgagatcctgcggggcgacgtcgtcgtggccatcctggggaagaatgacatctttggggagcctctgaacctgtatgcaaggcctggcaagtcgaacggggatgtgcgggccctcacctactgtgacctacacaagatccatcgggacgacctgctggaggtgctggacatgtaccctgagttctccgaccacttctggtccagcctggagatcaccttcaacctgcgagataccaacatgatcccgggctcccccggcagtacggagttagagggtggcttcagtcggcaacgcaagcgcaagttgtccttccgcaggcgcacggacaaggacacggagcagccaggggaggtgtcggccttggggccgggccgggcgggggcagggccgagtagccggggccggccgggggggccgtggggggagagcccgtccagtggcccctccagccctgagagcagtgaggatgagggcccaggccgcagctccagccccctccgcctggtgcccttctccagccccaggccccccggagagccgccgggtggggagcccctgatggaggactgcgagaagagcagcgacacttgcaaccccctgtcaggcgccttctcaggagtgtccaacattttcagcttctggggggacagtcggggccgccagtaccaggagctccctcgatgccccgcccccacccccagcctcctcaacatccccctctccagcccgggtcggcggccccggggcgacgtggagagcaggctggatgccctccagcgccagctcaacaggctggagacccggctgagtgcagacatggccactgtcctgcagctgctacagaggcagatgacgctggtcccgcccgcctacagtgctgtgaccaccccggggcctggccccacttccacatccccgctgttgcccgtcagccccctccccaccctcaccttggactcgctttctcaggtttcccagttcatggcgtgtgaggagctgcccccgggggccccagagcttccccaagaaggccccacacgacgcctctccctaccgggccagctgggggccctcacctcccagcccctgcacagacacggctcggacccgggcagttagtggggctgcccagtgtggacacgtggctcacccagggatcaaggcgctgctgggccgctccccttggaggccctgctcaggaggccctgaccgtggaaggggagaggaactcgaaagcacagctcctcccccagcccttgggaccatcttctcctgcagtcccctgggccccagtgagaggggcaggggcagggccggcagtaggtggggcctgtggtccccccactgccctgagggcattagctggtctaactgcccggaggcacccggccctgggccttaggcacctcaaggacttttctgctatttactgctcttattgttaaggataataattaaggatcatatgaataattaatgaagatgctgatgactatgaataataaataattatcctgaggaga

SEQ ID NO: 395 - DNA, 3884 bp, Homo sapiens
  source 1..3884: mol_type = genomic DNA
  misc_feature 1..3884: note = cDNA of KCNH2 gene SNP c.1979C>T (p.Ser660Leu)
atgccggtgcggaggggccacgtcgcgccgcagaacaccttcctggacaccatcatccgcaagtttgagggccagagccgtaagttcatcatcgccaacgctcgggtggagaactgcgccgtcatctactgcaacgacggcttctgcgagctgtgcggctactcgcgggccgaggtgatgcagcgaccctgcacctgcgacttcctgcacgggccgcgcacgcagcgccgcgctgccgcgcagatcgcgcaggcactgctgggcgccgaggagcgcaaagtggaaatcgccttctaccggaaagatgggagctgcttcctatgtctggtggatgtggtgcccgtgaagaacgaggatggggctgtcatcatgttcatcctcaatttcgaggtggtgatggagaaggacatggtggggtccccggctcatgacaccaaccaccggggcccccccaccagctggctggccccaggccgcgccaagaccttccgcctgaagctgcccgcgctgctggcgctgacggcccgggagtcgtcggtgcggtcgggcggcgcgggcggcgcgggcgccccgggggccgtggtggtggacgtggacctgacgcccgcggcacccagcagcgagtcgctggccctggacgaagtgacagccatggacaaccacgtggcagggctcgggcccgcggaggagcggcgtgcgctggtgggtcccggctctccgccccgcagcgcgcccggccagctcccatcgccccgggcgcacagcctcaaccccgacgcctcgggctccagctgcagcctggcccggacgcgctcccgagaaagctgcgccagcgtgcgccgcgcctcgtcggccgacgacatcgaggccatgcgcgccggggtgctgcccccgccaccgcgccacgccagcaccggggccatgcacccactgcgcagcggcttgctcaactccacctcggactccgacctcgtgcgctaccgcaccattagcaagattccccaaatcaccctcaactttgtggacctcaagggcgaccccttcttggcttcgcccaccagtgaccgtgagatcatagcacctaagataaaggagcgaacccacaatgtcactgagaaggtcacccaggtcctgtccctgggcgccgacgtgctgcctgagtacaagctgcaggcaccgcgcatccaccgctggaccatcctgcattacagccccttcaaggccgtgtgggactggctcatcctgctgctggtcatctacacggctgtcttcacaccctactcggctgccttcctgctgaaggagacggaagaaggcccgcctgctaccgagtgtggctacgcctgccagccgctggctgtggtggacctcatcgtggacatcatgttcattgtggacatcctcatcaacttccgcaccacctacgtcaatgccaacgaggaggtggtcagccaccccggccgcatcgccgtccactacttcaagggctggttcctcatcgacatggtggccgccatccccttcgacctgctcatcttcggctctggctctgaggagctgatcgggctgctgaagactgcgcggctgctgcggctggtgcgcgtggcgcggaagctggatcgctactcagagtacggcgcggccgtgctgttcttgctcatgtgcacctttgcgctcatcgcgcactggctagcctgcatctggtacgccatcggcaacatggagcagccacacatggactcacgcatcggctggctgcacaacctgggcgaccagataggcaaaccctacaacagcagcggcctgggcggcccctccatcaaggacaagtatgtgacggcgctctacttcaccttcagcagcctcaccagtgtgggcttcggcaacgtctctcccaacaccaactcagagaagatcttctccatctgcgtcatgctcattggctccctcatgtatgctagcatcttcggcaacgtgttggccatcatccagcggctgtactcgggcacagcccgctaccacacacagatgctgcgggtgcgggagttcatccgcttccaccagatccccaatcccctgcgccagcgcctcgaggagtacttccagcacgcctggtcctacaccaacggcatcgacatgaacgcggtgctgaagggcttccctgagtgcctgcaggctgacatctgcctgcacctgaaccgctcactgctgcagcactgcaaacccttccgaggggccaccaagggctgccttcgggccctggccatgaagttcaagaccacacatgcaccgccaggggacacactggtgcatgctggggacctgctcaccgccctgtacttcatctcccggggctccatcgagatcctgcggggcgacgtcgtcgtggccatcctggggaagaatgacatctttggggagcctctgaacctgtatgcaaggcctggcaagtcgaacggggatgtgcgggccctcacctactgtgacctacacaagatccatcgggacgacctgctggaggtgctggacatgtaccctgagttctccgaccacttctggtccagcctggagatcaccttcaacctgcgagataccaacatgatcccgggctcccccggcagtacggagttagagggtggcttcagtcggcaacgcaagcgcaagttgtccttccgcaggcgcacggacaaggacacggagcagccaggggaggtgtcggccttggggccgggccgggcgggggcagggccgagtagccggggccggccgggggggccgtggggggagagcccgtccagtggcccctccagccctgagagcagtgaggatgagggcccaggccgcagctccagccccctccgcctggtgcccttctccagccccaggccccccggagagccgccgggtggggagcccctgatggaggactgcgagaagagcagcgacacttgcaaccccctgtcaggcgccttctcaggagtgtccaacattttcagcttctggggggacagtcggggccgccagtaccaggagctccctcgatgccccgcccccacccccagcctcctcaacatccccctctccagcccgggtcggcggccccggggcgacgtggagagcaggctggatgccctccagcgccagctcaacaggctggagacccggctgagtgcagacatggccactgtcctgcagctgctacagaggcagatgacgctggtcccgcccgcctacagtgctgtgaccaccccggggcctggccccacttccacatccccgctgttgcccgtcagccccctccccaccctcaccttggactcgctttctcaggtttcccagttcatggcgtgtgaggagctgcccccgggggccccagagcttccccaagaaggccccacacgacgcctctccctaccgggccagctgggggccctcacctcccagcccctgcacagacacggctcggacccgggcagttagtggggctgcccagtgtggacacgtggctcacccagggatcaaggcgctgctgggccgctccccttggaggccctgctcaggaggccctgaccgtggaaggggagaggaactcgaaagcacagctcctcccccagcccttgggaccatcttctcctgcagtcccctgggccccagtgagaggggcaggggcagggccggcagtaggtggggcctgtggtccccccactgccctgagggcattagctggtctaactgcccggaggcacccggccctgggccttaggcacctcaaggacttttctgctatttactgctcttattgttaaggataataattaaggatcatatgaataattaatgaagatgctgatgactatgaataataaataattatcctgaggaga

SEQ ID NO: 396 - DNA, 3884 bp, Homo sapiens
  source 1..3884: mol_type = genomic DNA
  misc_feature 1..3884: note = cDNA of KCNH2 gene SNP c.197G>A (p.Cys66Tyr)
atgccggtgcggaggggccacgtcgcgccgcagaacaccttcctggacaccatcatccgcaagtttgagggccagagccgtaagttcatcatcgccaacgctcgggtggagaactgcgccgtcatctactgcaacgacggcttctgcgagctgtgcggctactcgcgggccgaggtgatgcagcgaccctgcacctacgacttcctgcacgggccgcgcacgcagcgccgcgctgccgcgcagatcgcgcaggcactgctgggcgccgaggagcgcaaagtggaaatcgccttctaccggaaagatgggagctgcttcctatgtctggtggatgtggtgcccgtgaagaacgaggatggggctgtcatcatgttcatcctcaatttcgaggtggtgatggagaaggacatggtggggtccccggctcatgacaccaaccaccggggcccccccaccagctggctggccccaggccgcgccaagaccttccgcctgaagctgcccgcgctgctggcgctgacggcccgggagtcgtcggtgcggtcgggcggcgcgggcggcgcgggcgccccgggggccgtggtggtggacgtggacctgacgcccgcggcacccagcagcgagtcgctggccctggacgaagtgacagccatggacaaccacgtggcagggctcgggcccgcggaggagcggcgtgcgctggtgggtcccggctctccgccccgcagcgcgcccggccagctcccatcgccccgggcgcacagcctcaaccccgacgcctcgggctccagctgcagcctggcccggacgcgctcccgagaaagctgcgccagcgtgcgccgcgcctcgtcggccgacgacatcgaggccatgcgcgccggggtgctgcccccgccaccgcgccacgccagcaccggggccatgcacccactgcgcagcggcttgctcaactccacctcggactccgacctcgtgcgctaccgcaccattagcaagattccccaaatcaccctcaactttgtggacctcaagggcgaccccttcttggcttcgcccaccagtgaccgtgagatcatagcacctaagataaaggagcgaacccacaatgtcactgagaaggtcacccaggtcctgtccctgggcgccgacgtgctgcctgagtacaagctgcaggcaccgcgcatccaccgctggaccatcctgcattacagccccttcaaggccgtgtgggactggctcatcctgctgctggtcatctacacggctgtcttcacaccctactcggctgccttcctgctgaaggagacggaagaaggcccgcctgctaccgagtgtggctacgcctgccagccgctggctgtggtggacctcatcgtggacatcatgttcattgtggacatcctcatcaacttccgcaccacctacgtcaatgccaacgaggaggtggtcagccaccccggccgcatcgccgtccactacttcaagggctggttcctcatcgacatggtggccgccatccccttcgacctgctcatcttcggctctggctctgaggagctgatcgggctgctgaagactgcgcggctgctgcggctggtgcgcgtggcgcggaagctggatcgctactcagagtacggcgcggccgtgctgttcttgctcatgtgcacctttgcgctcatcgcgcactggctagcctgcatctggtacgccatcggcaacatggagcagccacacatggactcacgcatcggctggctgcacaacctgggcgaccagataggcaaaccctacaacagcagcggcctgggcggcccctccatcaaggacaagtatgtgacggcgctctacttcaccttcagcagcctcaccagtgtgggcttcggcaacgtctctcccaacaccaactcagagaagatcttctccatctgcgtcatgctcattggctccctcatgtatgctagcatcttcggcaacgtgtcggccatcatccagcggctgtactcgggcacagcccgctaccacacacagatgctgcgggtgcgggagttcatccgcttccaccagatccccaatcccctgcgccagcgcctcgaggagtacttccagcacgcctggtcctacaccaacggcatcgacatgaacgcggtgctgaagggcttccctgagtgcctgcaggctgacatctgcctgcacctgaaccgctcactgctgcagcactgcaaacccttccgaggggccaccaagggctgccttcgggccctggccatgaagttcaagaccacacatgcaccgccaggggacacactggtgcatgctggggacctgctcaccgccctgtacttcatctcccggggctccatcgagatcctgcggggcgacgtcgtcgtggccatcctggggaagaatgacatctttggggagcctctgaacctgtatgcaaggcctggcaagtcgaacggggatgtgcgggccctcacctactgtgacctacacaagatccatcgggacgacctgctggaggtgctggacatgtaccctgagttctccgaccacttctggtccagcctggagatcaccttcaacctgcgagataccaacatgatcccgggctcccccggcagtacggagttagagggtggcttcagtcggcaacgcaagcgcaagttgtccttccgcaggcgcacggacaaggacacggagcagccaggggaggtgtcggccttggggccgggccgggcgggggcagggccgagtagccggggccggccgggggggccgtggggggagagcccgtccagtggcccctccagccctgagagcagtgaggatgagggcccaggccgcagctccagccccctccgcctggtgcccttctccagccccaggccccccggagagccgccgggtggggagcccctgatggaggactgcgagaagagcagcgacacttgcaaccccctgtcaggcgccttctcaggagtgtccaacattttcagcttctggggggacagtcggggccgccagtaccaggagctccctcgatgccccgcccccacccccagcctcctcaacatccccctctccagcccgggtcggcggccccggggcgacgtggagagcaggctggatgccctccagcgccagctcaacaggctggagacccggctgagtgcagacatggccactgtcctgcagctgctacagaggcagatgacgctggtcccgcccgcctacagtgctgtgaccaccccggggcctggccccacttccacatccccgctgttgcccgtcagccccctccccaccctcaccttggactcgctttctcaggtttcccagttcatggcgtgtgaggagctgcccccgggggccccagagcttccccaagaaggccccacacgacgcctctccctaccgggccagctgggggccctcacctcccagcccctgcacagacacggctcggacccgggcagttagtggggctgcccagtgtggacacgtggctcacccagggatcaaggcgctgctgggccgctccccttggaggccctgctcaggaggccctgaccgtggaaggggagaggaactcgaaagcacagctcctcccccagcccttgggaccatcttctcctgcagtcccctgggccccagtgagaggggcaggggcagggccggcagtaggtggggcctgtggtccccccactgccctgagggcattagctggtctaactgcccggaggcacccggccctgggccttaggcacctcaaggacttttctgctatttactgctcttattgttaaggataataattaaggatcatatgaataattaatgaagatgctgatgactatgaataataaataattatcctgaggaga

SEQ ID NO: 397 - DNA, 3884 bp, Homo sapiens
  source 1..3884: mol_type = genomic DNA
  misc_feature 1..3884: note = cDNA of KCNH2 gene SNP c.1982C>T (p.Ala661Val)
atgccggtgcggaggggccacgtcgcgccgcagaacaccttcctggacaccatcatccgcaagtttgagggccagagccgtaagttcatcatcgccaacgctcgggtggagaactgcgccgtcatctactgcaacgacggcttctgcgagctgtgcggctactcgcgggccgaggtgatgcagcgaccctgcacctgcgacttcctgcacgggccgcgcacgcagcgccgcgctgccgcgcagatcgcgcaggcactgctgggcgccgaggagcgcaaagtggaaatcgccttctaccggaaagatgggagctgcttcctatgtctggtggatgtggtgcccgtgaagaacgaggatggggctgtcatcatgttcatcctcaatttcgaggtggtgatggagaaggacatggtggggtccccggctcatgacaccaaccaccggggcccccccaccagctggctggccccaggccgcgccaagaccttccgcctgaagctgcccgcgctgctggcgctgacggcccgggagtcgtcggtgcggtcgggcggcgcgggcggcgcgggcgccccgggggccgtggtggtggacgtggacctgacgcccgcggcacccagcagcgagtcgctggccctggacgaagtgacagccatggacaaccacgtggcagggctcgggcccgcggaggagcggcgtgcgctggtgggtcccggctctccgccccgcagcgcgcccggccagctcccatcgccccgggcgcacagcctcaaccccgacgcctcgggctccagctgcagcctggcccggacgcgctcccgagaaagctgcgccagcgtgcgccgcgcctcgtcggccgacgacatcgaggccatgcgcgccggggtgctgcccccgccaccgcgccacgccagcaccggggccatgcacccactgcgcagcggcttgctcaactccacctcggactccgacctcgtgcgctaccgcaccattagcaagattccccaaatcaccctcaactttgtggacctcaagggcgaccccttcttggcttcgcccaccagtgaccgtgagatcatagcacctaagataaaggagcgaacccacaatgtcactgagaaggtcacccaggtcctgtccctgggcgccgacgtgctgcctgagtacaagctgcaggcaccgcgcatccaccgctggaccatcctgcattacagccccttcaaggccgtgtgggactggctcatcctgctgctggtcatctacacggctgtcttcacaccctactcggctgccttcctgctgaaggagacggaagaaggcccgcctgctaccgagtgtggctacgcctgccagccgctggctgtggtggacctcatcgtggacatcatgttcattgtggacatcctcatcaacttccgcaccacctacgtcaatgccaacgaggaggtggtcagccaccccggccgcatcgccgtccactacttcaagggctggttcctcatcgacatggtggccgccatccccttcgacctgctcatcttcggctctggctctgaggagctgatcgggctgctgaagactgcgcggctgctgcggctggtgcgcgtggcgcggaagctggatcgctactcagagtacggcgcggccgtgctgttcttgctcatgtgcacctttgcgctcatcgcgcactggctagcctgcatctggtacgccatcggcaacatggagcagccacacatggactcacgcatcggctggctgcacaacctgggcgaccagataggcaaaccctacaacagcagcggcctgggcggcccctccatcaaggacaagtatgtgacggcgctctacttcaccttcagcagcctcaccagtgtgggcttcggcaacgtctctcccaacaccaactcagagaagatcttctccatctgcgtcatgctcattggctccctcatgtatgctagcatcttcggcaacgtgtcggtcatcatccagcggctgtactcgggcacagcccgctaccacacacagatgctgcgggtgcgggagttcatccgcttccaccagatccccaatcccctgcgccagcgcctcgaggagtacttccagcacgcctggtcctacaccaacggcatcgacatgaacgcggtgctgaagggcttccctgagtgcctgcaggctgacatctgcctgcacctgaaccgctcactgctgcagcactgcaaacccttccgaggggccaccaagggctgccttcgggccctggccatgaagttcaagaccacacatgcaccgccaggggacacactggtgcatgctggggacctgctcaccgccctgtacttcatctcccggggctccatcgagatcctgcggggcgacgtcgtcgtggccatcctggggaagaatgacatctttggggagcctctgaacctgtatgcaaggcctggcaagtcgaacggggatgtgcgggccctcacctactgtgacctacacaagatccatcgggacgacctgctggaggtgctggacatgtaccctgagttctccgaccacttctggtccagcctggagatcaccttcaacctgcgagataccaacatgatcccgggctcccccggcagtacggagttagagggtggcttcagtcggcaacgcaagcgcaagttgtccttccgcaggcgcacggacaaggacacggagcagccaggggaggtgtcggccttggggccgggccgggcgggggcagggccgagtagccggggccggccgggggggccgtggggggagagcccgtccagtggcccctccagccctgagagcagtgaggatgagggcccaggccgcagctccagccccctccgcctggtgcccttctccagccccaggccccccggagagccgccgggtggggagcccctgatggaggactgcgagaagagcagcgacacttgcaaccccctgtcaggcgccttctcaggagtgtccaacattttcagcttctggggggacagtcggggccgccagtaccaggagctccctcgatgccccgcccccacccccagcctcctcaacatccccctctccagcccgggtcggcggccccggggcgacgtggagagcaggctggatgccctccagcgccagctcaacaggctggagacccggctgagtgcagacatggccactgtcctgcagctgctacagaggcagatgacgctggtcccgcccgcctacagtgctgtgaccaccccggggcctggccccacttccacatccccgctgttgcccgtcagccccctccccaccctcaccttggactcgctttctcaggtttcccagttcatggcgtgtgaggagctgcccccgggggccccagagcttccccaagaaggccccacacgacgcctctccctaccgggccagctgggggccctcacctcccagcccctgcacagacacggctcggacccgggcagttagtggggctgcccagtgtggacacgtggctcacccagggatcaaggcgctgctgggccgctccccttggaggccctgctcaggaggccctgaccgtggaaggggagaggaactcgaaagcacagctcctcccccagcccttgggaccatcttctcctgcagtcccctgggccccagtgagaggggcaggggcagggccggcagtaggtggggcctgtggtccccccactgccctgagggcattagctggtctaactgcccggaggcacccggccctgggccttaggcacctcaaggacttttctgctatttactgctcttattgttaaggataataattaaggatcatatgaataattaatgaagatgctgatgactatgaataataaataattatcctgaggaga

SEQ ID NO: 398 - DNA, 3884 bp, Homo sapiens
  source 1..3884: mol_type = genomic DNA
  misc_feature 1..3884: note = cDNA of KCNH2 gene SNP c.1985T>C (p.Ile662Thr)
atgccggtgcggaggggccacgtcgcgccgcagaacaccttcctggacaccatcatccgcaagtttgagggccagagccgtaagttcatcatcgccaacgctcgggtggagaactgcgccgtcatctactgcaacgacggcttctgcgagctgtgcggctactcgcgggccgaggtgatgcagcgaccctgcacctgcgacttcctgcacgggccgcgcacgcagcgccgcgctgccgcgcagatcgcgcaggcactgctgggcgccgaggagcgcaaagtggaaatcgccttctaccggaaagatgggagctgcttcctatgtctggtggatgtggtgcccgtgaagaacgaggatggggctgtcatcatgttcatcctcaatttcgaggtggtgatggagaaggacatggtggggtccccggctcatgacaccaaccaccggggcccccccaccagctggctggccccaggccgcgccaagaccttccgcctgaagctgcccgcgctgctggcgctgacggcccgggagtcgtcggtgcggtcgggcggcgcgggcggcgcgggcgccccgggggccgtggtggtggacgtggacctgacgcccgcggcacccagcagcgagtcgctggccctggacgaagtgacagccatggacaaccacgtggcagggctcgggcccgcggaggagcggcgtgcgctggtgggtcccggctctccgccccgcagcgcgcccggccagctcccatcgccccgggcgcacagcctcaaccccgacgcctcgggctccagctgcagcctggcccggacgcgctcccgagaaagctgcgccagcgtgcgccgcgcctcgtcggccgacgacatcgaggccatgcgcgccggggtgctgcccccgccaccgcgccacgccagcaccggggccatgcacccactgcgcagcggcttgctcaactccacctcggactccgacctcgtgcgctaccgcaccattagcaagattccccaaatcaccctcaactttgtggacctcaagggcgaccccttcttggcttcgcccaccagtgaccgtgagatcatagcacctaagataaaggagcgaacccacaatgtcactgagaaggtcacccaggtcctgtccctgggcgccgacgtgctgcctgagtacaagctgcaggcaccgcgcatccaccgctggaccatcctgcattacagccccttcaaggccgtgtgggactggctcatcctgctgctggtcatctacacggctgtcttcacaccctactcggctgccttcctgctgaaggagacggaagaaggcccgcctgctaccgagtgtggctacgcctgccagccgctggctgtggtggacctcatcgtggacatcatgttcattgtggacatcctcatcaacttccgcaccacctacgtcaatgccaacgaggaggtggtcagccaccccggccgcatcgccgtccactacttcaagggctggttcctcatcgacatggtggccgccatccccttcgacctgctcatcttcggctctggctctgaggagctgatcgggctgctgaagactgcgcggctgctgcggctggtgcgcgtggcgcggaagctggatcgctactcagagtacggcgcggccgtgctgttcttgctcatgtgcacctttgcgctcatcgcgcactggctagcctgcatctggtacgccatcggcaacatggagcagccacacatggactcacgcatcggctggctgcacaacctgggcgaccagataggcaaaccctacaacagcagcggcctgggcggcccctccatcaaggacaagtatgtgacggcgctctacttcaccttcagcagcctcaccagtgtgggcttcggcaacgtctctcccaacaccaactcagagaagatcttctccatctgcgtcatgctcattggctccctcatgtatgctagcatcttcggcaacgtgtcggccaccatccagcggctgtactcgggcacagcccgctaccacacacagatgctgcgggtgcgggagttcatccgcttccaccagatccccaatcccctgcgccagcgcctcgaggagtacttccagcacgcctggtcctacaccaacggcatcgacatgaacgcggtgctgaagggcttccctgagtgcctgcaggctgacatctgcctgcacctgaaccgctcactgctgcagcactgcaaacccttccgaggggccaccaagggctgccttcgggccctggccatgaagttcaagaccacacatgcaccgccaggggacacactggtgcatgctggggacctgctcaccgccctgtacttcatctcccggggctccatcgagatcctgcggggcgacgtcgtcgtggccatcctggggaagaatgacatctttggggagcctctgaacctgtatgcaaggcctggcaagtcgaacggggatgtgcgggccctcacctactgtgacctacacaagatccatcgggacgacctgctggaggtgctggacatgtaccctgagttctccgaccacttctggtccagcctggagatcaccttcaacctgcgagataccaacatgatcccgggctcccccggcagtacggagttagagggtggcttcagtcggcaacgcaagcgcaagttgtccttccgcaggcgcacggacaaggacacggagcagccaggggaggtgtcggccttggggccgggccgggcgggggcagggccgagtagccggggccggccgggggggccgtggggggagagcccgtccagtggcccctccagccctgagagcagtgaggatgagggcccaggccgcagctccagccccctccgcctggtgcccttctccagccccaggccccccggagagccgccgggtggggagcccctgatggaggactgcgagaagagcagcgacacttgcaaccccctgtcaggcgccttctcaggagtgtccaacattttcagcttctggggggacagtcggggccgccagtaccaggagctccctcgatgccccgcccccacccccagcctcctcaacatccccctctccagcccgggtcggcggccccggggcgacgtggagagcaggctggatgccctccagcgccagctcaacaggctggagacccggctgagtgcagacatggccactgtcctgcagctgctacagaggcagatgacgctggtcccgcccgcctacagtgctgtgaccaccccggggcctggccccacttccacatccccgctgttgcccgtcagccccctccccaccctcaccttggactcgctttctcaggtttcccagttcatggcgtgtgaggagctgcccccgggggccccagagcttccccaagaaggccccacacgacgcctctccctaccgggccagctgggggccctcacctcccagcccctgcacagacacggctcggacccgggcagttagtggggctgcccagtgtggacacgtggctcacccagggatcaaggcgctgctgggccgctccccttggaggccctgctcaggaggccctgaccgtggaaggggagaggaactcgaaagcacagctcctcccccagcccttgggaccatcttctcctgcagtcccctgggccccagtgagaggggcaggggcagggccggcagtaggtggggcctgtggtccccccactgccctgagggcattagctggtctaactgcccggaggcacccggccctgggccttaggcacctcaaggacttttctgctatttactgctcttattgttaaggataataattaaggatcatatgaataattaatgaagatgctgatgactatgaataataaataattatcctgaggaga

SEQ ID NO: 399 - DNA, 3884 bp, Homo sapiens
  source 1..3884: mol_type = genomic DNA
  misc_feature 1..3884: note = cDNA of KCNH2 gene SNP c.198C>A (p.Cys66Ter)
atgccggtgcggaggggccacgtcgcgccgcagaacaccttcctggacaccatcatccgcaagtttgagggccagagccgtaagttcatcatcgccaacgctcgggtggagaactgcgccgtcatctactgcaacgacggcttctgcgagctgtgcggctactcgcgggccgaggtgatgcagcgaccctgcacctgagacttcctgcacgggccgcgcacgcagcgccgcgctgccgcgcagatcgcgcaggcactgctgggcgccgaggagcgcaaagtggaaatcgccttctaccggaaagatgggagctgcttcctatgtctggtggatgtggtgcccgtgaagaacgaggatggggctgtcatcatgttcatcctcaatttcgaggtggtgatggagaaggacatggtggggtccccggctcatgacaccaaccaccggggcccccccaccagctggctggccccaggccgcgccaagaccttccgcctgaagctgcccgcgctgctggcgctgacggcccgggagtcgtcggtgcggtcgggcggcgcgggcggcgcgggcgccccgggggccgtggtggtggacgtggacctgacgcccgcggcacccagcagcgagtcgctggccctggacgaagtgacagccatggacaaccacgtggcagggctcgggcccgcggaggagcggcgtgcgctggtgggtcccggctctccgccccgcagcgcgcccggccagctcccatcgccccgggcgcacagcctcaaccccgacgcctcgggctccagctgcagcctggcccggacgcgctcccgagaaagctgcgccagcgtgcgccgcgcctcgtcggccgacgacatcgaggccatgcgcgccggggtgctgcccccgccaccgcgccacgccagcaccggggccatgcacccactgcgcagcggcttgctcaactccacctcggactccgacctcgtgcgctaccgcaccattagcaagattccccaaatcaccctcaactttgtggacctcaagggcgaccccttcttggcttcgcccaccagtgaccgtgagatcatagcacctaagataaaggagcgaacccacaatgtcactgagaaggtcacccaggtcctgtccctgggcgccgacgtgctgcctgagtacaagctgcaggcaccgcgcatccaccgctggaccatcctgcattacagccccttcaaggccgtgtgggactggctcatcctgctgctggtcatctacacggctgtcttcacaccctactcggctgccttcctgctgaaggagacggaagaaggcccgcctgctaccgagtgtggctacgcctgccagccgctggctgtggtggacctcatcgtggacatcatgttcattgtggacatcctcatcaacttccgcaccacctacgtcaatgccaacgaggaggtggtcagccaccccggccgcatcgccgtccactacttcaagggctggttcctcatcgacatggtggccgccatccccttcgacctgctcatcttcggctctggctctgaggagctgatcgggctgctgaagactgcgcggctgctgcggctggtgcgcgtggcgcggaagctggatcgctactcagagtacggcgcggccgtgctgttcttgctcatgtgcacctttgcgctcatcgcgcactggctagcctgcatctggtacgccatcggcaacatggagcagccacacatggactcacgcatcggctggctgcacaacctgggcgaccagataggcaaaccctacaacagcagcggcctgggcggcccctccatcaaggacaagtatgtgacggcgctctacttcaccttcagcagcctcaccagtgtgggcttcggcaacgtctctcccaacaccaactcagagaagatcttctccatctgcgtcatgctcattggctccctcatgtatgctagcatcttcggcaacgtgtcggccatcatccagcggctgtactcgggcacagcccgctaccacacacagatgctgcgggtgcgggagttcatccgcttccaccagatccccaatcccctgcgccagcgcctcgaggagtacttccagcacgcctggtcctacaccaacggcatcgacatgaacgcggtgctgaagggcttccctgagtgcctgcaggctgacatctgcctgcacctgaaccgctcactgctgcagcactgcaaacccttccgaggggccaccaagggctgccttcgggccctggccatgaagttcaagaccacacatgcaccgccaggggacacactggtgcatgctggggacctgctcaccgccctgtacttcatctcccggggctccatcgagatcctgcggggcgacgtcgtcgtggccatcctggggaagaatgacatctttggggagcctctgaacctgtatgcaaggcctggcaagtcgaacggggatgtgcgggccctcacctactgtgacctacacaagatccatcgggacgacctgctggaggtgctggacatgtaccctgagttctccgaccacttctggtccagcctggagatcaccttcaacctgcgagataccaacatgatcccgggctcccccggcagtacggagttagagggtggcttcagtcggcaacgcaagcgcaagttgtccttccgcaggcgcacggacaaggacacggagcagccaggggaggtgtcggccttggggccgggccgggcgggggcagggccgagtagccggggccggccgggggggccgtggggggagagcccgtccagtggcccctccagccctgagagcagtgaggatgagggcccaggccgcagctccagccccctccgcctggtgcccttctccagccccaggccccccggagagccgccgggtggggagcccctgatggaggactgcgagaagagcagcgacacttgcaaccccctgtcaggcgccttctcaggagtgtccaacattttcagcttctggggggacagtcggggccgccagtaccaggagctccctcgatgccccgcccccacccccagcctcctcaacatccccctctccagcccgggtcggcggccccggggcgacgtggagagcaggctggatgccctccagcgccagctcaacaggctggagacccggctgagtgcagacatggccactgtcctgcagctgctacagaggcagatgacgctggtcccgcccgcctacagtgctgtgaccaccccggggcctggccccacttccacatccccgctgttgcccgtcagccccctccccaccctcaccttggactcgctttctcaggtttcccagttcatggcgtgtgaggagctgcccccgggggccccagagcttccccaagaaggccccacacgacgcctctccctaccgggccagctgggggccctcacctcccagcccctgcacagacacggctcggacccgggcagttagtggggctgcccagtgtggacacgtggctcacccagggatcaaggcgctgctgggccgctccccttggaggccctgctcaggaggccctgaccgtggaaggggagaggaactcgaaagcacagctcctcccccagcccttgggaccatcttctcctgcagtcccctgggccccagtgagaggggcaggggcagggccggcagtaggtggggcctgtggtccccccactgccctgagggcattagctggtctaactgcccggaggcacccggccctgggccttaggcacctcaaggacttttctgctatttactgctcttattgttaaggataataattaaggatcatatgaataattaatgaagatgctgatgactatgaataataaataattatcctgaggaga

SEQ ID NO: 400 - DNA, 3884 bp, Homo sapiens
  source 1..3884: mol_type = genomic DNA
  misc_feature 1..3884: note = cDNA of KCNH2 gene SNP c.1A>T (p.Met1Leu)
ttgccggtgcggaggggccacgtcgcgccgcagaacaccttcctggacaccatcatccgcaagtttgagggccagagccgtaagttcatcatcgccaacgctcgggtggagaactgcgccgtcatctactgcaacgacggcttctgcgagctgtgcggctactcgcgggccgaggtgatgcagcgaccctgcacctgcgacttcctgcacgggccgcgcacgcagcgccgcgctgccgcgcagatcgcgcaggcactgctgggcgccgaggagcgcaaagtggaaatcgccttctaccggaaagatgggagctgcttcctatgtctggtggatgtggtgcccgtgaagaacgaggatggggctgtcatcatgttcatcctcaatttcgaggtggtgatggagaaggacatggtggggtccccggctcatgacaccaaccaccggggcccccccaccagctggctggccccaggccgcgccaagaccttccgcctgaagctgcccgcgctgctggcgctgacggcccgggagtcgtcggtgcggtcgggcggcgcgggcggcgcgggcgccccgggggccgtggtggtggacgtggacctgacgcccgcggcacccagcagcgagtcgctggccctggacgaagtgacagccatggacaaccacgtggcagggctcgggcccgcggaggagcggcgtgcgctggtgggtcccggctctccgccccgcagcgcgcccggccagctcccatcgccccgggcgcacagcctcaaccccgacgcctcgggctccagctgcagcctggcccggacgcgctcccgagaaagctgcgccagcgtgcgccgcgcctcgtcggccgacgacatcgaggccatgcgcgccggggtgctgcccccgccaccgcgccacgccagcaccggggccatgcacccactgcgcagcggcttgctcaactccacctcggactccgacctcgtgcgctaccgcaccattagcaagattccccaaatcaccctcaactttgtggacctcaagggcgaccccttcttggcttcgcccaccagtgaccgtgagatcatagcacctaagataaaggagcgaacccacaatgtcactgagaaggtcacccaggtcctgtccctgggcgccgacgtgctgcctgagtacaagctgcaggcaccgcgcatccaccgctggaccatcctgcattacagccccttcaaggccgtgtgggactggctcatcctgctgctggtcatctacacggctgtcttcacaccctactcggctgccttcctgctgaaggagacggaagaaggcccgcctgctaccgagtgtggctacgcctgccagccgctggctgtggtggacctcatcgtggacatcatgttcattgtggacatcctcatcaacttccgcaccacctacgtcaatgccaacgaggaggtggtcagccaccccggccgcatcgccgtccactacttcaagggctggttcctcatcgacatggtggccgccatccccttcgacctgctcatcttcggctctggctctgaggagctgatcgggctgctgaagactgcgcggctgctgcggctggtgcgcgtggcgcggaagctggatcgctactcagagtacggcgcggccgtgctgttcttgctcatgtgcacctttgcgctcatcgcgcactggctagcctgcatctggtacgccatcggcaacatggagcagccacacatggactcacgcatcggctggctgcacaacctgggcgaccagataggcaaaccctacaacagcagcggcctgggcggcccctccatcaaggacaagtatgtgacggcgctctacttcaccttcagcagcctcaccagtgtgggcttcggcaacgtctctcccaacaccaactcagagaagatcttctccatctgcgtcatgctcattggctccctcatgtatgctagcatcttcggcaacgtgtcggccatcatccagcggctgtactcgggcacagcccgctaccacacacagatgctgcgggtgcgggagttcatccgcttccaccagatccccaatcccctgcgccagcgcctcgaggagtacttccagcacgcctggtcctacaccaacggcatcgacatgaacgcggtgctgaagggcttccctgagtgcctgcaggctgacatctgcctgcacctgaaccgctcactgctgcagcactgcaaacccttccgaggggccaccaagggctgccttcgggccctggccatgaagttcaagaccacacatgcaccgccaggggacacactggtgcatgctggggacctgctcaccgccctgtacttcatctcccggggctccatcgagatcctgcggggcgacgtcgtcgtggccatcctggggaagaatgacatctttggggagcctctgaacctgtatgcaaggcctggcaagtcgaacggggatgtgcgggccctcacctactgtgacctacacaagatccatcgggacgacctgctggaggtgctggacatgtaccctgagttctccgaccacttctggtccagcctggagatcaccttcaacctgcgagataccaacatgatcccgggctcccccggcagtacggagttagagggtggcttcagtcggcaacgcaagcgcaagttgtccttccgcaggcgcacggacaaggacacggagcagccaggggaggtgtcggccttggggccgggccgggcgggggcagggccgagtagccggggccggccgggggggccgtggggggagagcccgtccagtggcccctccagccctgagagcagtgaggatgagggcccaggccgcagctccagccccctccgcctggtgcccttctccagccccaggccccccggagagccgccgggtggggagcccctgatggaggactgcgagaagagcagcgacacttgcaaccccctgtcaggcgccttctcaggagtgtccaacattttcagcttctggggggacagtcggggccgccagtaccaggagctccctcgatgccccgcccccacccccagcctcctcaacatccccctctccagcccgggtcggcggccccggggcgacgtggagagcaggctggatgccctccagcgccagctcaacaggctggagacccggctgagtgcagacatggccactgtcctgcagctgctacagaggcagatgacgctggtcccgcccgcctacagtgctgtgaccaccccggggcctggccccacttccacatccccgctgttgcccgtcagccccctccccaccctcaccttggactcgctttctcaggtttcccagttcatggcgtgtgaggagctgcccccgggggccccagagcttccccaagaaggccccacacgacgcctctccctaccgggccagctgggggccctcacctcccagcccctgcacagacacggctcggacccgggcagttagtggggctgcccagtgtggacacgtggctcacccagggatcaaggcgctgctgggccgctccccttggaggccctgctcaggaggccctgaccgtggaaggggagaggaactcgaaagcacagctcctcccccagcccttgggaccatcttctcctgcagtcccctgggccccagtgagaggggcaggggcagggccggcagtaggtggggcctgtggtccccccactgccctgagggcattagctggtctaactgcccggaggcacccggccctgggccttaggcacctcaaggacttttctgctatttactgctcttattgttaaggataataattaaggatcatatgaataattaatgaagatgctgatgactatgaataataaataattatcctgaggaga

SEQ ID NO: 401 - DNA, 3884 bp, Homo sapiens
  source 1..3884: mol_type = genomic DNA
  misc_feature 1..3884: note = cDNA of KCNH2 gene SNP c.2003C>A (p.Ser668Ter)
atgccggtgcggaggggccacgtcgcgccgcagaacaccttcctggacaccatcatccgcaagtttgagggccagagccgtaagttcatcatcgccaacgctcgggtggagaactgcgccgtcatctactgcaacgacggcttctgcgagctgtgcggctactcgcgggccgaggtgatgcagcgaccctgcacctgcgacttcctgcacgggccgcgcacgcagcgccgcgctgccgcgcagatcgcgcaggcactgctgggcgccgaggagcgcaaagtggaaatcgccttctaccggaaagatgggagctgcttcctatgtctggtggatgtggtgcccgtgaagaacgaggatggggctgtcatcatgttcatcctcaatttcgaggtggtgatggagaaggacatggtggggtccccggctcatgacaccaaccaccggggcccccccaccagctggctggccccaggccgcgccaagaccttccgcctgaagctgcccgcgctgctggcgctgacggcccgggagtcgtcggtgcggtcgggcggcgcgggcggcgcgggcgccccgggggccgtggtggtggacgtggacctgacgcccgcggcacccagcagcgagtcgctggccctggacgaagtgacagccatggacaaccacgtggcagggctcgggcccgcggaggagcggcgtgcgctggtgggtcccggctctccgccccgcagcgcgcccggccagctcccatcgccccgggcgcacagcctcaaccccgacgcctcgggctccagctgcagcctggcccggacgcgctcccgagaaagctgcgccagcgtgcgccgcgcctcgtcggccgacgacatcgaggccatgcgcgccggggtgctgcccccgccaccgcgccacgccagcaccggggccatgcacccactgcgcagcggcttgctcaactccacctcggactccgacctcgtgcgctaccgcaccattagcaagattccccaaatcaccctcaactttgtggacctcaagggcgaccccttcttggcttcgcccaccagtgaccgtgagatcatagcacctaagataaaggagcgaacccacaatgtcactgagaaggtcacccaggtcctgtccctgggcgccgacgtgctgcctgagtacaagctgcaggcaccgcgcatccaccgctggaccatcctgcattacagccccttcaaggccgtgtgggactggctcatcctgctgctggtcatctacacggctgtcttcacaccctactcggctgccttcctgctgaaggagacggaagaaggcccgcctgctaccgagtgtggctacgcctgccagccgctggctgtggtggacctcatcgtggacatcatgttcattgtggacatcctcatcaacttccgcaccacctacgtcaatgccaacgaggaggtggtcagccaccccggccgcatcgccgtccactacttcaagggctggttcctcatcgacatggtggccgccatccccttcgacctgctcatcttcggctctggctctgaggagctgatcgggctgctgaagactgcgcggctgctgcggctggtgcgcgtggcgcggaagctggatcgctactcagagtacggcgcggccgtgctgttcttgctcatgtgcacctttgcgctcatcgcgcactggctagcctgcatctggtacgccatcggcaacatggagcagccacacatggactcacgcatcggctggctgcacaacctgggcgaccagataggcaaaccctacaacagcagcggcctgggcggcccctccatcaaggacaagtatgtgacggcgctctacttcaccttcagcagcctcaccagtgtgggcttcggcaacgtctctcccaacaccaactcagagaagatcttctccatctgcgtcatgctcattggctccctcatgtatgctagcatcttcggcaacgtgtcggccatcatccagcggctgtactagggcacagcccgctaccacacacagatgctgcgggtgcgggagttcatccgcttccaccagatccccaatcccctgcgccagcgcctcgaggagtacttccagcacgcctggtcctacaccaacggcatcgacatgaacgcggtgctgaagggcttccctgagtgcctgcaggctgacatctgcctgcacctgaaccgctcactgctgcagcactgcaaacccttccgaggggccaccaagggctgccttcgggccctggccatgaagttcaagaccacacatgcaccgccaggggacacactggtgcatgctggggacctgctcaccgccctgtacttcatctcccggggctccatcgagatcctgcggggcgacgtcgtcgtggccatcctggggaagaatgacatctttggggagcctctgaacctgtatgcaaggcctggcaagtcgaacggggatgtgcgggccctcacctactgtgacctacacaagatccatcgggacgacctgctggaggtgctggacatgtaccctgagttctccgaccacttctggtccagcctggagatcaccttcaacctgcgagataccaacatgatcccgggctcccccggcagtacggagttagagggtggcttcagtcggcaacgcaagcgcaagttgtccttccgcaggcgcacggacaaggacacggagcagccaggggaggtgtcggccttggggccgggccgggcgggggcagggccgagtagccggggccggccgggggggccgtggggggagagcccgtccagtggcccctccagccctgagagcagtgaggatgagggcccaggccgcagctccagccccctccgcctggtgcccttctccagccccaggccccccggagagccgccgggtggggagcccctgatggaggactgcgagaagagcagcgacacttgcaaccccctgtcaggcgccttctcaggagtgtccaacattttcagcttctggggggacagtcggggccgccagtaccaggagctccctcgatgccccgcccccacccccagcctcctcaacatccccctctccagcccgggtcggcggccccggggcgacgtggagagcaggctggatgccctccagcgccagctcaacaggctggagacccggctgagtgcagacatggccactgtcctgcagctgctacagaggcagatgacgctggtcccgcccgcctacagtgctgtgaccaccccggggcctggccccacttccacatccccgctgttgcccgtcagccccctccccaccctcaccttggactcgctttctcaggtttcccagttcatggcgtgtgaggagctgcccccgggggccccagagcttccccaagaaggccccacacgacgcctctccctaccgggccagctgggggccctcacctcccagcccctgcacagacacggctcggacccgggcagttagtggggctgcccagtgtggacacgtggctcacccagggatcaaggcgctgctgggccgctccccttggaggccctgctcaggaggccctgaccgtggaaggggagaggaactcgaaagcacagctcctcccccagcccttgggaccatcttctcctgcagtcccctgggccccagtgagaggggcaggggcagggccggcagtaggtggggcctgtggtccccccactgccctgagggcattagctggtctaactgcccggaggcacccggccctgggccttaggcacctcaaggacttttctgctatttactgctcttattgttaaggataataattaaggatcatatgaataattaatgaagatgctgatgactatgaataataaataattatcctgaggaga

SEQ ID NO: 402 - DNA, 3884 bp, Homo sapiens
  source 1..3884: mol_type = genomic DNA
  misc_feature 1..3884: note = cDNA of KCNH2 gene SNP c.2006G>C (p.Gly669Ala)
atgccggtgcggaggggccacgtcgcgccgcagaacaccttcctggacaccatcatccgcaagtttgagggccagagccgtaagttcatcatcgccaacgctcgggtggagaactgcgccgtcatctactgcaacgacggcttctgcgagctgtgcggctactcgcgggccgaggtgatgcagcgaccctgcacctgcgacttcctgcacgggccgcgcacgcagcgccgcgctgccgcgcagatcgcgcaggcactgctgggcgccgaggagcgcaaagtggaaatcgccttctaccggaaagatgggagctgcttcctatgtctggtggatgtggtgcccgtgaagaacgaggatggggctgtcatcatgttcatcctcaatttcgaggtggtgatggagaaggacatggtggggtccccggctcatgacaccaaccaccggggcccccccaccagctggctggccccaggccgcgccaagaccttccgcctgaagctgcccgcgctgctggcgctgacggcccgggagtcgtcggtgcggtcgggcggcgcgggcggcgcgggcgccccgggggccgtggtggtggacgtggacctgacgcccgcggcacccagcagcgagtcgctggccctggacgaagtgacagccatggacaaccacgtggcagggctcgggcccgcggaggagcggcgtgcgctggtgggtcccggctctccgccccgcagcgcgcccggccagctcccatcgccccgggcgcacagcctcaaccccgacgcctcgggctccagctgcagcctggcccggacgcgctcccgagaaagctgcgccagcgtgcgccgcgcctcgtcggccgacgacatcgaggccatgcgcgccggggtgctgcccccgccaccgcgccacgccagcaccggggccatgcacccactgcgcagcggcttgctcaactccacctcggactccgacctcgtgcgctaccgcaccattagcaagattccccaaatcaccctcaactttgtggacctcaagggcgaccccttcttggcttcgcccaccagtgaccgtgagatcatagcacctaagataaaggagcgaacccacaatgtcactgagaaggtcacccaggtcctgtccctgggcgccgacgtgctgcctgagtacaagctgcaggcaccgcgcatccaccgctggaccatcctgcattacagccccttcaaggccgtgtgggactggctcatcctgctgctggtcatctacacggctgtcttcacaccctactcggctgccttcctgctgaaggagacggaagaaggcccgcctgctaccgagtgtggctacgcctgccagccgctggctgtggtggacctcatcgtggacatcatgttcattgtggacatcctcatcaacttccgcaccacctacgtcaatgccaacgaggaggtggtcagccaccccggccgcatcgccgtccactacttcaagggctggttcctcatcgacatggtggccgccatccccttcgacctgctcatcttcggctctggctctgaggagctgatcgggctgctgaagactgcgcggctgctgcggctggtgcgcgtggcgcggaagctggatcgctactcagagtacggcgcggccgtgctgttcttgctcatgtgcacctttgcgctcatcgcgcactggctagcctgcatctggtacgccatcggcaacatggagcagccacacatggactcacgcatcggctggctgcacaacctgggcgaccagataggcaaaccctacaacagcagcggcctgggcggcccctccatcaaggacaagtatgtgacggcgctctacttcaccttcagcagcctcaccagtgtgggcttcggcaacgtctctcccaacaccaactcagagaagatcttctccatctgcgtcatgctcattggctccctcatgtatgctagcatcttcggcaacgtgtcggccatcatccagcggctgtactcggccacagcccgctaccacacacagatgctgcgggtgcgggagttcatccgcttccaccagatccccaatcccctgcgccagcgcctcgaggagtacttccagcacgcctggtcctacaccaacggcatcgacatgaacgcggtgctgaagggcttccctgagtgcctgcaggctgacatctgcctgcacctgaaccgctcactgctgcagcactgcaaacccttccgaggggccaccaagggctgccttcgggccctggccatgaagttcaagaccacacatgcaccgccaggggacacactggtgcatgctggggacctgctcaccgccctgtacttcatctcccggggctccatcgagatcctgcggggcgacgtcgtcgtggccatcctggggaagaatgacatctttggggagcctctgaacctgtatgcaaggcctggcaagtcgaacggggatgtgcgggccctcacctactgtgacctacacaagatccatcgggacgacctgctggaggtgctggacatgtaccctgagttctccgaccacttctggtccagcctggagatcaccttcaacctgcgagataccaacatgatcccgggctcccccggcagtacggagttagagggtggcttcagtcggcaacgcaagcgcaagttgtccttccgcaggcgcacggacaaggacacggagcagccaggggaggtgtcggccttggggccgggccgggcgggggcagggccgagtagccggggccggccgggggggccgtggggggagagcccgtccagtggcccctccagccctgagagcagtgaggatgagggcccaggccgcagctccagccccctccgcctggtgcccttctccagccccaggccccccggagagccgccgggtggggagcccctgatggaggactgcgagaagagcagcgacacttgcaaccccctgtcaggcgccttctcaggagtgtccaacattttcagcttctggggggacagtcggggccgccagtaccaggagctccctcgatgccccgcccccacccccagcctcctcaacatccccctctccagcccgggtcggcggccccggggcgacgtggagagcaggctggatgccctccagcgccagctcaacaggctggagacccggctgagtgcagacatggccactgtcctgcagctgctacagaggcagatgacgctggtcccgcccgcctacagtgctgtgaccaccccggggcctggccccacttccacatccccgctgttgcccgtcagccccctccccaccctcaccttggactcgctttctcaggtttcccagttcatggcgtgtgaggagctgcccccgggggccccagagcttccccaagaaggccccacacgacgcctctccctaccgggccagctgggggccctcacctcccagcccctgcacagacacggctcggacccgggcagttagtggggctgcccagtgtggacacgtggctcacccagggatcaaggcgctgctgggccgctccccttggaggccctgctcaggaggccctgaccgtggaaggggagaggaactcgaaagcacagctcctcccccagcccttgggaccatcttctcctgcagtcccctgggccccagtgagaggggcaggggcagggccggcagtaggtggggcctgtggtccccccactgccctgagggcattagctggtctaactgcccggaggcacccggccctgggccttaggcacctcaaggacttttctgctatttactgctcttattgttaaggataataattaaggatcatatgaataattaatgaagatgctgatgactatgaataataaataattatcctgaggaga

SEQ ID NO: 403 - DNA, 3884 bp, Homo sapiens
  source 1..3884: mol_type = genomic DNA
  misc_feature 1..3884: note = cDNA of KCNH2 gene SNP c.200A>G (p.Asp67Gly)
atgccggtgcggaggggccacgtcgcgccgcagaacaccttcctggacaccatcatccgcaagtttgagggccagagccgtaagttcatcatcgccaacgctcgggtggagaactgcgccgtcatctactgcaacgacggcttctgcgagctgtgcggctactcgcgggccgaggtgatgcagcgaccctgcacctgcggcttcctgcacgggccgcgcacgcagcgccgcgctgccgcgcagatcgcgcaggcactgctgggcgccgaggagcgcaaagtggaaatcgccttctaccggaaagatgggagctgcttcctatgtctggtggatgtggtgcccgtgaagaacgaggatggggctgtcatcatgttcatcctcaatttcgaggtggtgatggagaaggacatggtggggtccccggctcatgacaccaaccaccggggcccccccaccagctggctggccccaggccgcgccaagaccttccgcctgaagctgcccgcgctgctggcgctgacggcccgggagtcgtcggtgcggtcgggcggcgcgggcggcgcgggcgccccgggggccgtggtggtggacgtggacctgacgcccgcggcacccagcagcgagtcgctggccctggacgaagtgacagccatggacaaccacgtggcagggctcgggcccgcggaggagcggcgtgcgctggtgggtcccggctctccgccccgcagcgcgcccggccagctcccatcgccccgggcgcacagcctcaaccccgacgcctcgggctccagctgcagcctggcccggacgcgctcccgagaaagctgcgccagcgtgcgccgcgcctcgtcggccgacgacatcgaggccatgcgcgccggggtgctgcccccgccaccgcgccacgccagcaccggggccatgcacccactgcgcagcggcttgctcaactccacctcggactccgacctcgtgcgctaccgcaccattagcaagattccccaaatcaccctcaactttgtggacctcaagggcgaccccttcttggcttcgcccaccagtgaccgtgagatcatagcacctaagataaaggagcgaacccacaatgtcactgagaaggtcacccaggtcctgtccctgggcgccgacgtgctgcctgagtacaagctgcaggcaccgcgcatccaccgctggaccatcctgcattacagccccttcaaggccgtgtgggactggctcatcctgctgctggtcatctacacggctgtcttcacaccctactcggctgccttcctgctgaaggagacggaagaaggcccgcctgctaccgagtgtggctacgcctgccagccgctggctgtggtggacctcatcgtggacatcatgttcattgtggacatcctcatcaacttccgcaccacctacgtcaatgccaacgaggaggtggtcagccaccccggccgcatcgccgtccactacttcaagggctggttcctcatcgacatggtggccgccatccccttcgacctgctcatcttcggctctggctctgaggagctgatcgggctgctgaagactgcgcggctgctgcggctggtgcgcgtggcgcggaagctggatcgctactcagagtacggcgcggccgtgctgttcttgctcatgtgcacctttgcgctcatcgcgcactggctagcctgcatctggtacgccatcggcaacatggagcagccacacatggactcacgcatcggctggctgcacaacctgggcgaccagataggcaaaccctacaacagcagcggcctgggcggcccctccatcaaggacaagtatgtgacggcgctctacttcaccttcagcagcctcaccagtgtgggcttcggcaacgtctctcccaacaccaactcagagaagatcttctccatctgcgtcatgctcattggctccctcatgtatgctagcatcttcggcaacgtgtcggccatcatccagcggctgtactcgggcacagcccgctaccacacacagatgctgcgggtgcgggagttcatccgcttccaccagatccccaatcccctgcgccagcgcctcgaggagtacttccagcacgcctggtcctacaccaacggcatcgacatgaacgcggtgctgaagggcttccctgagtgcctgcaggctgacatctgcctgcacctgaaccgctcactgctgcagcactgcaaacccttccgaggggccaccaagggctgccttcgggccctggccatgaagttcaagaccacacatgcaccgccaggggacacactggtgcatgctggggacctgctcaccgccctgtacttcatctcccggggctccatcgagatcctgcggggcgacgtcgtcgtggccatcctggggaagaatgacatctttggggagcctctgaacctgtatgcaaggcctggcaagtcgaacggggatgtgcgggccctcacctactgtgacctacacaagatccatcgggacgacctgctggaggtgctggacatgtaccctgagttctccgaccacttctggtccagcctggagatcaccttcaacctgcgagataccaacatgatcccgggctcccccggcagtacggagttagagggtggcttcagtcggcaacgcaagcgcaagttgtccttccgcaggcgcacggacaaggacacggagcagccaggggaggtgtcggccttggggccgggccgggcgggggcagggccgagtagccggggccggccgggggggccgtggggggagagcccgtccagtggcccctccagccctgagagcagtgaggatgagggcccaggccgcagctccagccccctccgcctggtgcccttctccagccccaggccccccggagagccgccgggtggggagcccctgatggaggactgcgagaagagcagcgacacttgcaaccccctgtcaggcgccttctcaggagtgtccaacattttcagcttctggggggacagtcggggccgccagtaccaggagctccctcgatgccccgcccccacccccagcctcctcaacatccccctctccagcccgggtcggcggccccggggcgacgtggagagcaggctggatgccctccagcgccagctcaacaggctggagacccggctgagtgcagacatggccactgtcctgcagctgctacagaggcagatgacgctggtcccgcccgcctacagtgctgtgaccaccccggggcctggccccacttccacatccccgctgttgcccgtcagccccctccccaccctcaccttggactcgctttctcaggtttcccagttcatggcgtgtgaggagctgcccccgggggccccagagcttccccaagaaggccccacacgacgcctctccctaccgggccagctgggggccctcacctcccagcccctgcacagacacggctcggacccgggcagttagtggggctgcccagtgtggacacgtggctcacccagggatcaaggcgctgctgggccgctccccttggaggccctgctcaggaggccctgaccgtggaaggggagaggaactcgaaagcacagctcctcccccagcccttgggaccatcttctcctgcagtcccctgggccccagtgagaggggcaggggcagggccggcagtaggtggggcctgtggtccccccactgccctgagggcattagctggtctaactgcccggaggcacccggccctgggccttaggcacctcaaggacttttctgctatttactgctcttattgttaaggataataattaaggatcatatgaataattaatgaagatgctgatgactatgaataataaataattatcctgaggaga

SEQ ID NO: 404 - DNA, 3884 bp, Homo sapiens
  source 1..3884: mol_type = genomic DNA
  misc_feature 1..3884: note = cDNA of KCNH2 gene SNP c.2012C>G (p.Ala671Gly)
atgccggtgcggaggggccacgtcgcgccgcagaacaccttcctggacaccatcatccgcaagtttgagggccagagccgtaagttcatcatcgccaacgctcgggtggagaactgcgccgtcatctactgcaacgacggcttctgcgagctgtgcggctactcgcgggccgaggtgatgcagcgaccctgcacctgcgacttcctgcacgggccgcgcacgcagcgccgcgctgccgcgcagatcgcgcaggcactgctgggcgccgaggagcgcaaagtggaaatcgccttctaccggaaagatgggagctgcttcctatgtctggtggatgtggtgcccgtgaagaacgaggatggggctgtcatcatgttcatcctcaatttcgaggtggtgatggagaaggacatggtggggtccccggctcatgacaccaaccaccggggcccccccaccagctggctggccccaggccgcgccaagaccttccgcctgaagctgcccgcgctgctggcgctgacggcccgggagtcgtcggtgcggtcgggcggcgcgggcggcgcgggcgccccgggggccgtggtggtggacgtggacctgacgcccgcggcacccagcagcgagtcgctggccctggacgaagtgacagccatggacaaccacgtggcagggctcgggcccgcggaggagcggcgtgcgctggtgggtcccggctctccgccccgcagcgcgcccggccagctcccatcgccccgggcgcacagcctcaaccccgacgcctcgggctccagctgcagcctggcccggacgcgctcccgagaaagctgcgccagcgtgcgccgcgcctcgtcggccgacgacatcgaggccatgcgcgccggggtgctgcccccgccaccgcgccacgccagcaccggggccatgcacccactgcgcagcggcttgctcaactccacctcggactccgacctcgtgcgctaccgcaccattagcaagattccccaaatcaccctcaactttgtggacctcaagggcgaccccttcttggcttcgcccaccagtgaccgtgagatcatagcacctaagataaaggagcgaacccacaatgtcactgagaaggtcacccaggtcctgtccctgggcgccgacgtgctgcctgagtacaagctgcaggcaccgcgcatccaccgctggaccatcctgcattacagccccttcaaggccgtgtgggactggctcatcctgctgctggtcatctacacggctgtcttcacaccctactcggctgccttcctgctgaaggagacggaagaaggcccgcctgctaccgagtgtggctacgcctgccagccgctggctgtggtggacctcatcgtggacatcatgttcattgtggacatcctcatcaacttccgcaccacctacgtcaatgccaacgaggaggtggtcagccaccccggccgcatcgccgtccactacttcaagggctggttcctcatcgacatggtggccgccatccccttcgacctgctcatcttcggctctggctctgaggagctgatcgggctgctgaagactgcgcggctgctgcggctggtgcgcgtggcgcggaagctggatcgctactcagagtacggcgcggccgtgctgttcttgctcatgtgcacctttgcgctcatcgcgcactggctagcctgcatctggtacgccatcggcaacatggagcagccacacatggactcacgcatcggctggctgcacaacctgggcgaccagataggcaaaccctacaacagcagcggcctgggcggcccctccatcaaggacaagtatgtgacggcgctctacttcaccttcagcagcctcaccagtgtgggcttcggcaacgtctctcccaacaccaactcagagaagatcttctccatctgcgtcatgctcattggctccctcatgtatgctagcatcttcggcaacgtgtcggccatcatccagcggctgtactcgggcacaggccgctaccacacacagatgctgcgggtgcgggagttcatccgcttccaccagatccccaatcccctgcgccagcgcctcgaggagtacttccagcacgcctggtcctacaccaacggcatcgacatgaacgcggtgctgaagggcttccctgagtgcctgcaggctgacatctgcctgcacctgaaccgctcactgctgcagcactgcaaacccttccgaggggccaccaagggctgccttcgggccctggccatgaagttcaagaccacacatgcaccgccaggggacacactggtgcatgctggggacctgctcaccgccctgtacttcatctcccggggctccatcgagatcctgcggggcgacgtcgtcgtggccatcctggggaagaatgacatctttggggagcctctgaacctgtatgcaaggcctggcaagtcgaacggggatgtgcgggccctcacctactgtgacctacacaagatccatcgggacgacctgctggaggtgctggacatgtaccctgagttctccgaccacttctggtccagcctggagatcaccttcaacctgcgagataccaacatgatcccgggctcccccggcagtacggagttagagggtggcttcagtcggcaacgcaagcgcaagttgtccttccgcaggcgcacggacaaggacacggagcagccaggggaggtgtcggccttggggccgggccgggcgggggcagggccgagtagccggggccggccgggggggccgtggggggagagcccgtccagtggcccctccagccctgagagcagtgaggatgagggcccaggccgcagctccagccccctccgcctggtgcccttctccagccccaggccccccggagagccgccgggtggggagcccctgatggaggactgcgagaagagcagcgacacttgcaaccccctgtcaggcgccttctcaggagtgtccaacattttcagcttctggggggacagtcggggccgccagtaccaggagctccctcgatgccccgcccccacccccagcctcctcaacatccccctctccagcccgggtcggcggccccggggcgacgtggagagcaggctggatgccctccagcgccagctcaacaggctggagacccggctgagtgcagacatggccactgtcctgcagctgctacagaggcagatgacgctggtcccgcccgcctacagtgctgtgaccaccccggggcctggccccacttccacatccccgctgttgcccgtcagccccctccccaccctcaccttggactcgctttctcaggtttcccagttcatggcgtgtgaggagctgcccccgggggccccagagcttccccaagaaggccccacacgacgcctctccctaccgggccagctgggggccctcacctcccagcccctgcacagacacggctcggacccgggcagttagtggggctgcccagtgtggacacgtggctcacccagggatcaaggcgctgctgggccgctccccttggaggccctgctcaggaggccctgaccgtggaaggggagaggaactcgaaagcacagctcctcccccagcccttgggaccatcttctcctgcagtcccctgggccccagtgagaggggcaggggcagggccggcagtaggtggggcctgtggtccccccactgccctgagggcattagctggtctaactgcccggaggcacccggccctgggccttaggcacctcaaggacttttctgctatttactgctcttattgttaaggataataattaaggatcatatgaataattaatgaagatgctgatgactatgaataataaataattatcctgaggaga

SEQ ID NO: 405 - DNA, 3884 bp, Homo sapiens
  source 1..3884: mol_type = genomic DNA
  misc_feature 1..3884: note = cDNA of KCNH2 gene SNP c.2014C>T (p.Arg672Cys)
atgccggtgcggaggggccacgtcgcgccgcagaacaccttcctggacaccatcatccgcaagtttgagggccagagccgtaagttcatcatcgccaacgctcgggtggagaactgcgccgtcatctactgcaacgacggcttctgcgagctgtgcggctactcgcgggccgaggtgatgcagcgaccctgcacctgcgacttcctgcacgggccgcgcacgcagcgccgcgctgccgcgcagatcgcgcaggcactgctgggcgccgaggagcgcaaagtggaaatcgccttctaccggaaagatgggagctgcttcctatgtctggtggatgtggtgcccgtgaagaacgaggatggggctgtcatcatgttcatcctcaatttcgaggtggtgatggagaaggacatggtggggtccccggctcatgacaccaaccaccggggcccccccaccagctggctggccccaggccgcgccaagaccttccgcctgaagctgcccgcgctgctggcgctgacggcccgggagtcgtcggtgcggtcgggcggcgcgggcggcgcgggcgccccgggggccgtggtggtggacgtggacctgacgcccgcggcacccagcagcgagtcgctggccctggacgaagtgacagccatggacaaccacgtggcagggctcgggcccgcggaggagcggcgtgcgctggtgggtcccggctctccgccccgcagcgcgcccggccagctcccatcgccccgggcgcacagcctcaaccccgacgcctcgggctccagctgcagcctggcccggacgcgctcccgagaaagctgcgccagcgtgcgccgcgcctcgtcggccgacgacatcgaggccatgcgcgccggggtgctgcccccgccaccgcgccacgccagcaccggggccatgcacccactgcgcagcggcttgctcaactccacctcggactccgacctcgtgcgctaccgcaccattagcaagattccccaaatcaccctcaactttgtggacctcaagggcgaccccttcttggcttcgcccaccagtgaccgtgagatcatagcacctaagataaaggagcgaacccacaatgtcactgagaaggtcacccaggtcctgtccctgggcgccgacgtgctgcctgagtacaagctgcaggcaccgcgcatccaccgctggaccatcctgcattacagccccttcaaggccgtgtgggactggctcatcctgctgctggtcatctacacggctgtcttcacaccctactcggctgccttcctgctgaaggagacggaagaaggcccgcctgctaccgagtgtggctacgcctgccagccgctggctgtggtggacctcatcgtggacatcatgttcattgtggacatcctcatcaacttccgcaccacctacgtcaatgccaacgaggaggtggtcagccaccccggccgcatcgccgtccactacttcaagggctggttcctcatcgacatggtggccgccatccccttcgacctgctcatcttcggctctggctctgaggagctgatcgggctgctgaagactgcgcggctgctgcggctggtgcgcgtggcgcggaagctggatcgctactcagagtacggcgcggccgtgctgttcttgctcatgtgcacctttgcgctcatcgcgcactggctagcctgcatctggtacgccatcggcaacatggagcagccacacatggactcacgcatcggctggctgcacaacctgggcgaccagataggcaaaccctacaacagcagcggcctgggcggcccctccatcaaggacaagtatgtgacggcgctctacttcaccttcagcagcctcaccagtgtgggcttcggcaacgtctctcccaacaccaactcagagaagatcttctccatctgcgtcatgctcattggctccctcatgtatgctagcatcttcggcaacgtgtcggccatcatccagcggctgtactcgggcacagcctgctaccacacacagatgctgcgggtgcgggagttcatccgcttccaccagatccccaatcccctgcgccagcgcctcgaggagtacttccagcacgcctggtcctacaccaacggcatcgacatgaacgcggtgctgaagggcttccctgagtgcctgcaggctgacatctgcctgcacctgaaccgctcactgctgcagcactgcaaacccttccgaggggccaccaagggctgccttcgggccctggccatgaagttcaagaccacacatgcaccgccaggggacacactggtgcatgctggggacctgctcaccgccctgtacttcatctcccggggctccatcgagatcctgcggggcgacgtcgtcgtggccatcctggggaagaatgacatctttggggagcctctgaacctgtatgcaaggcctggcaagtcgaacggggatgtgcgggccctcacctactgtgacctacacaagatccatcgggacgacctgctggaggtgctggacatgtaccctgagttctccgaccacttctggtccagcctggagatcaccttcaacctgcgagataccaacatgatcccgggctcccccggcagtacggagttagagggtggcttcagtcggcaacgcaagcgcaagttgtccttccgcaggcgcacggacaaggacacggagcagccaggggaggtgtcggccttggggccgggccgggcgggggcagggccgagtagccggggccggccgggggggccgtggggggagagcccgtccagtggcccctccagccctgagagcagtgaggatgagggcccaggccgcagctccagccccctccgcctggtgcccttctccagccccaggccccccggagagccgccgggtggggagcccctgatggaggactgcgagaagagcagcgacacttgcaaccccctgtcaggcgccttctcaggagtgtccaacattttcagcttctggggggacagtcggggccgccagtaccaggagctccctcgatgccccgcccccacccccagcctcctcaacatccccctctccagcccgggtcggcggccccggggcgacgtggagagcaggctggatgccctccagcgccagctcaacaggctggagacccggctgagtgcagacatggccactgtcctgcagctgctacagaggcagatgacgctggtcccgcccgcctacagtgctgtgaccaccccggggcctggccccacttccacatccccgctgttgcccgtcagccccctccccaccctcaccttggactcgctttctcaggtttcccagttcatggcgtgtgaggagctgcccccgggggccccagagcttccccaagaaggccccacacgacgcctctccctaccgggccagctgggggccctcacctcccagcccctgcacagacacggctcggacccgggcagttagtggggctgcccagtgtggacacgtggctcacccagggatcaaggcgctgctgggccgctccccttggaggccctgctcaggaggccctgaccgtggaaggggagaggaactcgaaagcacagctcctcccccagcccttgggaccatcttctcctgcagtcccctgggccccagtgagaggggcaggggcagggccggcagtaggtggggcctgtggtccccccactgccctgagggcattagctggtctaactgcccggaggcacccggccctgggccttaggcacctcaaggacttttctgctatttactgctcttattgttaaggataataattaaggatcatatgaataattaatgaagatgctgatgactatgaataataaataattatcctgaggaga

SEQ ID NO: 406 - DNA, 3884 bp, Homo sapiens
  source 1..3884: mol_type = genomic DNA
  misc_feature 1..3884: note = cDNA of KCNH2 gene SNP c.2026C>T (p.Gln676Ter)
atgccggtgcggaggggccacgtcgcgccgcagaacaccttcctggacaccatcatccgcaagtttgagggccagagccgtaagttcatcatcgccaacgctcgggtggagaactgcgccgtcatctactgcaacgacggcttctgcgagctgtgcggctactcgcgggccgaggtgatgcagcgaccctgcacctgcgacttcctgcacgggccgcgcacgcagcgccgcgctgccgcgcagatcgcgcaggcactgctgggcgccgaggagcgcaaagtggaaatcgccttctaccggaaagatgggagctgcttcctatgtctggtggatgtggtgcccgtgaagaacgaggatggggctgtcatcatgttcatcctcaatttcgaggtggtgatggagaaggacatggtggggtccccggctcatgacaccaaccaccggggcccccccaccagctggctggccccaggccgcgccaagaccttccgcctgaagctgcccgcgctgctggcgctgacggcccgggagtcgtcggtgcggtcgggcggcgcgggcggcgcgggcgccccgggggccgtggtggtggacgtggacctgacgcccgcggcacccagcagcgagtcgctggccctggacgaagtgacagccatggacaaccacgtggcagggctcgggcccgcggaggagcggcgtgcgctggtgggtcccggctctccgccccgcagcgcgcccggccagctcccatcgccccgggcgcacagcctcaaccccgacgcctcgggctccagctgcagcctggcccggacgcgctcccgagaaagctgcgccagcgtgcgccgcgcctcgtcggccgacgacatcgaggccatgcgcgccggggtgctgcccccgccaccgcgccacgccagcaccggggccatgcacccactgcgcagcggcttgctcaactccacctcggactccgacctcgtgcgctaccgcaccattagcaagattccccaaatcaccctcaactttgtggacctcaagggcgaccccttcttggcttcgcccaccagtgaccgtgagatcatagcacctaagataaaggagcgaacccacaatgtcactgagaaggtcacccaggtcctgtccctgggcgccgacgtgctgcctgagtacaagctgcaggcaccgcgcatccaccgctggaccatcctgcattacagccccttcaaggccgtgtgggactggctcatcctgctgctggtcatctacacggctgtcttcacaccctactcggctgccttcctgctgaaggagacggaagaaggcccgcctgctaccgagtgtggctacgcctgccagccgctggctgtggtggacctcatcgtggacatcatgttcattgtggacatcctcatcaacttccgcaccacctacgtcaatgccaacgaggaggtggtcagccaccccggccgcatcgccgtccactacttcaagggctggttcctcatcgacatggtggccgccatccccttcgacctgctcatcttcggctctggctctgaggagctgatcgggctgctgaagactgcgcggctgctgcggctggtgcgcgtggcgcggaagctggatcgctactcagagtacggcgcggccgtgctgttcttgctcatgtgcacctttgcgctcatcgcgcactggctagcctgcatctggtacgccatcggcaacatggagcagccacacatggactcacgcatcggctggctgcacaacctgggcgaccagataggcaaaccctacaacagcagcggcctgggcggcccctccatcaaggacaagtatgtgacggcgctctacttcaccttcagcagcctcaccagtgtgggcttcggcaacgtctctcccaacaccaactcagagaagatcttctccatctgcgtcatgctcattggctccctcatgtatgctagcatcttcggcaacgtgtcggccatcatccagcggctgtactcgggcacagcccgctaccacacatagatgctgcgggtgcgggagttcatccgcttccaccagatccccaatcccctgcgccagcgcctcgaggagtacttccagcacgcctggtcctacaccaacggcatcgacatgaacgcggtgctgaagggcttccctgagtgcctgcaggctgacatctgcctgcacctgaaccgctcactgctgcagcactgcaaacccttccgaggggccaccaagggctgccttcgggccctggccatgaagttcaagaccacacatgcaccgccaggggacacactggtgcatgctggggacctgctcaccgccctgtacttcatctcccggggctccatcgagatcctgcggggcgacgtcgtcgtggccatcctggggaagaatgacatctttggggagcctctgaacctgtatgcaaggcctggcaagtcgaacggggatgtgcgggccctcacctactgtgacctacacaagatccatcgggacgacctgctggaggtgctggacatgtaccctgagttctccgaccacttctggtccagcctggagatcaccttcaacctgcgagataccaacatgatcccgggctcccccggcagtacggagttagagggtggcttcagtcggcaacgcaagcgcaagttgtccttccgcaggcgcacggacaaggacacggagcagccaggggaggtgtcggccttggggccgggccgggcgggggcagggccgagtagccggggccggccgggggggccgtggggggagagcccgtccagtggcccctccagccctgagagcagtgaggatgagggcccaggccgcagctccagccccctccgcctggtgcccttctccagccccaggccccccggagagccgccgggtggggagcccctgatggaggactgcgagaagagcagcgacacttgcaaccccctgtcaggcgccttctcaggagtgtccaacattttcagcttctggggggacagtcggggccgccagtaccaggagctccctcgatgccccgcccccacccccagcctcctcaacatccccctctccagcccgggtcggcggccccggggcgacgtggagagcaggctggatgccctccagcgccagctcaacaggctggagacccggctgagtgcagacatggccactgtcctgcagctgctacagaggcagatgacgctggtcccgcccgcctacagtgctgtgaccaccccggggcctggccccacttccacatccccgctgttgcccgtcagccccctccccaccctcaccttggactcgctttctcaggtttcccagttcatggcgtgtgaggagctgcccccgggggccccagagcttccccaagaaggccccacacgacgcctctccctaccgggccagctgggggccctcacctcccagcccctgcacagacacggctcggacccgggcagttagtggggctgcccagtgtggacacgtggctcacccagggatcaaggcgctgctgggccgctccccttggaggccctgctcaggaggccctgaccgtggaaggggagaggaactcgaaagcacagctcctcccccagcccttgggaccatcttctcctgcagtcccctgggccccagtgagaggggcaggggcagggccggcagtaggtggggcctgtggtccccccactgccctgagggcattagctggtctaactgcccggaggcacccggccctgggccttaggcacctcaaggacttttctgctatttactgctcttattgttaaggataataattaaggatcatatgaataattaatgaagatgctgatgactatgaataataaataattatcctgaggaga

SEQ ID NO: 407 - DNA, 3884 bp, Homo sapiens
  source 1..3884: mol_type = genomic DNA
  misc_feature 1..3884: note = cDNA of KCNH2 gene SNP c.202T>C (p.Phe68Leu)
atgccggtgcggaggggccacgtcgcgccgcagaacaccttcctggacaccatcatccgcaagtttgagggccagagccgtaagttcatcatcgccaacgctcgggtggagaactgcgccgtcatctactgcaacgacggcttctgcgagctgtgcggctactcgcgggccgaggtgatgcagcgaccctgcacctgcgacctcctgcacgggccgcgcacgcagcgccgcgctgccgcgcagatcgcgcaggcactgctgggcgccgaggagcgcaaagtggaaatcgccttctaccggaaagatgggagctgcttcctatgtctggtggatgtggtgcccgtgaagaacgaggatggggctgtcatcatgttcatcctcaatttcgaggtggtgatggagaaggacatggtggggtccccggctcatgacaccaaccaccggggcccccccaccagctggctggccccaggccgcgccaagaccttccgcctgaagctgcccgcgctgctggcgctgacggcccgggagtcgtcggtgcggtcgggcggcgcgggcggcgcgggcgccccgggggccgtggtggtggacgtggacctgacgcccgcggcacccagcagcgagtcgctggccctggacgaagtgacagccatggacaaccacgtggcagggctcgggcccgcggaggagcggcgtgcgctggtgggtcccggctctccgccccgcagcgcgcccggccagctcccatcgccccgggcgcacagcctcaaccccgacgcctcgggctccagctgcagcctggcccggacgcgctcccgagaaagctgcgccagcgtgcgccgcgcctcgtcggccgacgacatcgaggccatgcgcgccggggtgctgcccccgccaccgcgccacgccagcaccggggccatgcacccactgcgcagcggcttgctcaactccacctcggactccgacctcgtgcgctaccgcaccattagcaagattccccaaatcaccctcaactttgtggacctcaagggcgaccccttcttggcttcgcccaccagtgaccgtgagatcatagcacctaagataaaggagcgaacccacaatgtcactgagaaggtcacccaggtcctgtccctgggcgccgacgtgctgcctgagtacaagctgcaggcaccgcgcatccaccgctggaccatcctgcattacagccccttcaaggccgtgtgggactggctcatcctgctgctggtcatctacacggctgtcttcacaccctactcggctgccttcctgctgaaggagacggaagaaggcccgcctgctaccgagtgtggctacgcctgccagccgctggctgtggtggacctcatcgtggacatcatgttcattgtggacatcctcatcaacttccgcaccacctacgtcaatgccaacgaggaggtggtcagccaccccggccgcatcgccgtccactacttcaagggctggttcctcatcgacatggtggccgccatccccttcgacctgctcatcttcggctctggctctgaggagctgatcgggctgctgaagactgcgcggctgctgcggctggtgcgcgtggcgcggaagctggatcgctactcagagtacggcgcggccgtgctgttcttgctcatgtgcacctttgcgctcatcgcgcactggctagcctgcatctggtacgccatcggcaacatggagcagccacacatggactcacgcatcggctggctgcacaacctgggcgaccagataggcaaaccctacaacagcagcggcctgggcggcccctccatcaaggacaagtatgtgacggcgctctacttcaccttcagcagcctcaccagtgtgggcttcggcaacgtctctcccaacaccaactcagagaagatcttctccatctgcgtcatgctcattggctccctcatgtatgctagcatcttcggcaacgtgtcggccatcatccagcggctgtactcgggcacagcccgctaccacacacagatgctgcgggtgcgggagttcatccgcttccaccagatccccaatcccctgcgccagcgcctcgaggagtacttccagcacgcctggtcctacaccaacggcatcgacatgaacgcggtgctgaagggcttccctgagtgcctgcaggctgacatctgcctgcacctgaaccgctcactgctgcagcactgcaaacccttccgaggggccaccaagggctgccttcgggccctggccatgaagttcaagaccacacatgcaccgccaggggacacactggtgcatgctggggacctgctcaccgccctgtacttcatctcccggggctccatcgagatcctgcggggcgacgtcgtcgtggccatcctggggaagaatgacatctttggggagcctctgaacctgtatgcaaggcctggcaagtcgaacggggatgtgcgggccctcacctactgtgacctacacaagatccatcgggacgacctgctggaggtgctggacatgtaccctgagttctccgaccacttctggtccagcctggagatcaccttcaacctgcgagataccaacatgatcccgggctcccccggcagtacggagttagagggtggcttcagtcggcaacgcaagcgcaagttgtccttccgcaggcgcacggacaaggacacggagcagccaggggaggtgtcggccttggggccgggccgggcgggggcagggccgagtagccggggccggccgggggggccgtggggggagagcccgtccagtggcccctccagccctgagagcagtgaggatgagggcccaggccgcagctccagccccctccgcctggtgcccttctccagccccaggccccccggagagccgccgggtggggagcccctgatggaggactgcgagaagagcagcgacacttgcaaccccctgtcaggcgccttctcaggagtgtccaacattttcagcttctggggggacagtcggggccgccagtaccaggagctccctcgatgccccgcccccacccccagcctcctcaacatccccctctccagcccgggtcggcggccccggggcgacgtggagagcaggctggatgccctccagcgccagctcaacaggctggagacccggctgagtgcagacatggccactgtcctgcagctgctacagaggcagatgacgctggtcccgcccgcctacagtgctgtgaccaccccggggcctggccccacttccacatccccgctgttgcccgtcagccccctccccaccctcaccttggactcgctttctcaggtttcccagttcatggcgtgtgaggagctgcccccgggggccccagagcttccccaagaaggccccacacgacgcctctccctaccgggccagctgggggccctcacctcccagcccctgcacagacacggctcggacccgggcagttagtggggctgcccagtgtggacacgtggctcacccagggatcaaggcgctgctgggccgctccccttggaggccctgctcaggaggccctgaccgtggaaggggagaggaactcgaaagcacagctcctcccccagcccttgggaccatcttctcctgcagtcccctgggccccagtgagaggggcaggggcagggccggcagtaggtggggcctgtggtccccccactgccctgagggcattagctggtctaactgcccggaggcacccggccctgggccttaggcacctcaaggacttttctgctatttactgctcttattgttaaggataataattaaggatcatatgaataattaatgaagatgctgatgactatgaataataaataattatcctgaggaga

SEQ ID NO: 408 - DNA, 3884 bp, Homo sapiens
  source 1..3884: mol_type = genomic DNA
  misc_feature 1..3884: note = cDNA of KCNH2 gene SNP c.2030T>C (p.Met677Thr)
atgccggtgcggaggggccacgtcgcgccgcagaacaccttcctggacaccatcatccgcaagtttgagggccagagccgtaagttcatcatcgccaacgctcgggtggagaactgcgccgtcatctactgcaacgacggcttctgcgagctgtgcggctactcgcgggccgaggtgatgcagcgaccctgcacctgcgacttcctgcacgggccgcgcacgcagcgccgcgctgccgcgcagatcgcgcaggcactgctgggcgccgaggagcgcaaagtggaaatcgccttctaccggaaagatgggagctgcttcctatgtctggtggatgtggtgcccgtgaagaacgaggatggggctgtcatcatgttcatcctcaatttcgaggtggtgatggagaaggacatggtggggtccccggctcatgacaccaaccaccggggcccccccaccagctggctggccccaggccgcgccaagaccttccgcctgaagctgcccgcgctgctggcgctgacggcccgggagtcgtcggtgcggtcgggcggcgcgggcggcgcgggcgccccgggggccgtggtggtggacgtggacctgacgcccgcggcacccagcagcgagtcgctggccctggacgaagtgacagccatggacaaccacgtggcagggctcgggcccgcggaggagcggcgtgcgctggtgggtcccggctctccgccccgcagcgcgcccggccagctcccatcgccccgggcgcacagcctcaaccccgacgcctcgggctccagctgcagcctggcccggacgcgctcccgagaaagctgcgccagcgtgcgccgcgcctcgtcggccgacgacatcgaggccatgcgcgccggggtgctgcccccgccaccgcgccacgccagcaccggggccatgcacccactgcgcagcggcttgctcaactccacctcggactccgacctcgtgcgctaccgcaccattagcaagattccccaaatcaccctcaactttgtggacctcaagggcgaccccttcttggcttcgcccaccagtgaccgtgagatcatagcacctaagataaaggagcgaacccacaatgtcactgagaaggtcacccaggtcctgtccctgggcgccgacgtgctgcctgagtacaagctgcaggcaccgcgcatccaccgctggaccatcctgcattacagccccttcaaggccgtgtgggactggctcatcctgctgctggtcatctacacggctgtcttcacaccctactcggctgccttcctgctgaaggagacggaagaaggcccgcctgctaccgagtgtggctacgcctgccagccgctggctgtggtggacctcatcgtggacatcatgttcattgtggacatcctcatcaacttccgcaccacctacgtcaatgccaacgaggaggtggtcagccaccccggccgcatcgccgtccactacttcaagggctggttcctcatcgacatggtggccgccatccccttcgacctgctcatcttcggctctggctctgaggagctgatcgggctgctgaagactgcgcggctgctgcggctggtgcgcgtggcgcggaagctggatcgctactcagagtacggcgcggccgtgctgttcttgctcatgtgcacctttgcgctcatcgcgcactggctagcctgcatctggtacgccatcggcaacatggagcagccacacatggactcacgcatcggctggctgcacaacctgggcgaccagataggcaaaccctacaacagcagcggcctgggcggcccctccatcaaggacaagtatgtgacggcgctctacttcaccttcagcagcctcaccagtgtgggcttcggcaacgtctctcccaacaccaactcagagaagatcttctccatctgcgtcatgctcattggctccctcatgtatgctagcatcttcggcaacgtgtcggccatcatccagcggctgtactcgggcacagcccgctaccacacacagacgctgcgggtgcgggagttcatccgcttccaccagatccccaatcccctgcgccagcgcctcgaggagtacttccagcacgcctggtcctacaccaacggcatcgacatgaacgcggtgctgaagggcttccctgagtgcctgcaggctgacatctgcctgcacctgaaccgctcactgctgcagcactgcaaacccttccgaggggccaccaagggctgccttcgggccctggccatgaagttcaagaccacacatgcaccgccaggggacacactggtgcatgctggggacctgctcaccgccctgtacttcatctcccggggctccatcgagatcctgcggggcgacgtcgtcgtggccatcctggggaagaatgacatctttggggagcctctgaacctgtatgcaaggcctggcaagtcgaacggggatgtgcgggccctcacctactgtgacctacacaagatccatcgggacgacctgctggaggtgctggacatgtaccctgagttctccgaccacttctggtccagcctggagatcaccttcaacctgcgagataccaacatgatcccgggctcccccggcagtacggagttagagggtggcttcagtcggcaacgcaagcgcaagttgtccttccgcaggcgcacggacaaggacacggagcagccaggggaggtgtcggccttggggccgggccgggcgggggcagggccgagtagccggggccggccgggggggccgtggggggagagcccgtccagtggcccctccagccctgagagcagtgaggatgagggcccaggccgcagctccagccccctccgcctggtgcccttctccagccccaggccccccggagagccgccgggtggggagcccctgatggaggactgcgagaagagcagcgacacttgcaaccccctgtcaggcgccttctcaggagtgtccaacattttcagcttctggggggacagtcggggccgccagtaccaggagctccctcgatgccccgcccccacccccagcctcctcaacatccccctctccagcccgggtcggcggccccggggcgacgtggagagcaggctggatgccctccagcgccagctcaacaggctggagacccggctgagtgcagacatggccactgtcctgcagctgctacagaggcagatgacgctggtcccgcccgcctacagtgctgtgaccaccccggggcctggccccacttccacatccccgctgttgcccgtcagccccctccccaccctcaccttggactcgctttctcaggtttcccagttcatggcgtgtgaggagctgcccccgggggccccagagcttccccaagaaggccccacacgacgcctctccctaccgggccagctgggggccctcacctcccagcccctgcacagacacggctcggacccgggcagttagtggggctgcccagtgtggacacgtggctcacccagggatcaaggcgctgctgggccgctccccttggaggccctgctcaggaggccctgaccgtggaaggggagaggaactcgaaagcacagctcctcccccagcccttgggaccatcttctcctgcagtcccctgggccccagtgagaggggcaggggcagggccggcagtaggtggggcctgtggtccccccactgccctgagggcattagctggtctaactgcccggaggcacccggccctgggccttaggcacctcaaggacttttctgctatttactgctcttattgttaaggataataattaaggatcatatgaataattaatgaagatgctgatgactatgaataataaataattatcctgaggaga

SEQ ID NO: 409 - DNA, 3884 bp, Homo sapiens
  source 1..3884: mol_type = genomic DNA
  misc_feature 1..3884: note = cDNA of KCNH2 gene SNP c.2033T>C (p.Leu678Pro)
atgccggtgcggaggggccacgtcgcgccgcagaacaccttcctggacaccatcatccgcaagtttgagggccagagccgtaagttcatcatcgccaacgctcgggtggagaactgcgccgtcatctactgcaacgacggcttctgcgagctgtgcggctactcgcgggccgaggtgatgcagcgaccctgcacctgcgacttcctgcacgggccgcgcacgcagcgccgcgctgccgcgcagatcgcgcaggcactgctgggcgccgaggagcgcaaagtggaaatcgccttctaccggaaagatgggagctgcttcctatgtctggtggatgtggtgcccgtgaagaacgaggatggggctgtcatcatgttcatcctcaatttcgaggtggtgatggagaaggacatggtggggtccccggctcatgacaccaaccaccggggcccccccaccagctggctggccccaggccgcgccaagaccttccgcctgaagctgcccgcgctgctggcgctgacggcccgggagtcgtcggtgcggtcgggcggcgcgggcggcgcgggcgccccgggggccgtggtggtggacgtggacctgacgcccgcggcacccagcagcgagtcgctggccctggacgaagtgacagccatggacaaccacgtggcagggctcgggcccgcggaggagcggcgtgcgctggtgggtcccggctctccgccccgcagcgcgcccggccagctcccatcgccccgggcgcacagcctcaaccccgacgcctcgggctccagctgcagcctggcccggacgcgctcccgagaaagctgcgccagcgtgcgccgcgcctcgtcggccgacgacatcgaggccatgcgcgccggggtgctgcccccgccaccgcgccacgccagcaccggggccatgcacccactgcgcagcggcttgctcaactccacctcggactccgacctcgtgcgctaccgcaccattagcaagattccccaaatcaccctcaactttgtggacctcaagggcgaccccttcttggcttcgcccaccagtgaccgtgagatcatagcacctaagataaaggagcgaacccacaatgtcactgagaaggtcacccaggtcctgtccctgggcgccgacgtgctgcctgagtacaagctgcaggcaccgcgcatccaccgctggaccatcctgcattacagccccttcaaggccgtgtgggactggctcatcctgctgctggtcatctacacggctgtcttcacaccctactcggctgccttcctgctgaaggagacggaagaaggcccgcctgctaccgagtgtggctacgcctgccagccgctggctgtggtggacctcatcgtggacatcatgttcattgtggacatcctcatcaacttccgcaccacctacgtcaatgccaacgaggaggtggtcagccaccccggccgcatcgccgtccactacttcaagggctggttcctcatcgacatggtggccgccatccccttcgacctgctcatcttcggctctggctctgaggagctgatcgggctgctgaagactgcgcggctgctgcggctggtgcgcgtggcgcggaagctggatcgctactcagagtacggcgcggccgtgctgttcttgctcatgtgcacctttgcgctcatcgcgcactggctagcctgcatctggtacgccatcggcaacatggagcagccacacatggactcacgcatcggctggctgcacaacctgggcgaccagataggcaaaccctacaacagcagcggcctgggcggcccctccatcaaggacaagtatgtgacggcgctctacttcaccttcagcagcctcaccagtgtgggcttcggcaacgtctctcccaacaccaactcagagaagatcttctccatctgcgtcatgctcattggctccctcatgtatgctagcatcttcggcaacgtgtcggccatcatccagcggctgtactcgggcacagcccgctaccacacacagatgccgcgggtgcgggagttcatccgcttccaccagatccccaatcccctgcgccagcgcctcgaggagtacttccagcacgcctggtcctacaccaacggcatcgacatgaacgcggtgctgaagggcttccctgagtgcctgcaggctgacatctgcctgcacctgaaccgctcactgctgcagcactgcaaacccttccgaggggccaccaagggctgccttcgggccctggccatgaagttcaagaccacacatgcaccgccaggggacacactggtgcatgctggggacctgctcaccgccctgtacttcatctcccggggctccatcgagatcctgcggggcgacgtcgtcgtggccatcctggggaagaatgacatctttggggagcctctgaacctgtatgcaaggcctggcaagtcgaacggggatgtgcgggccctcacctactgtgacctacacaagatccatcgggacgacctgctggaggtgctggacatgtaccctgagttctccgaccacttctggtccagcctggagatcaccttcaacctgcgagataccaacatgatcccgggctcccccggcagtacggagttagagggtggcttcagtcggcaacgcaagcgcaagttgtccttccgcaggcgcacggacaaggacacggagcagccaggggaggtgtcggccttggggccgggccgggcgggggcagggccgagtagccggggccggccgggggggccgtggggggagagcccgtccagtggcccctccagccctgagagcagtgaggatgagggcccaggccgcagctccagccccctccgcctggtgcccttctccagccccaggccccccggagagccgccgggtggggagcccctgatggaggactgcgagaagagcagcgacacttgcaaccccctgtcaggcgccttctcaggagtgtccaacattttcagcttctggggggacagtcggggccgccagtaccaggagctccctcgatgccccgcccccacccccagcctcctcaacatccccctctccagcccgggtcggcggccccggggcgacgtggagagcaggctggatgccctccagcgccagctcaacaggctggagacccggctgagtgcagacatggccactgtcctgcagctgctacagaggcagatgacgctggtcccgcccgcctacagtgctgtgaccaccccggggcctggccccacttccacatccccgctgttgcccgtcagccccctccccaccctcaccttggactcgctttctcaggtttcccagttcatggcgtgtgaggagctgcccccgggggccccagagcttccccaagaaggccccacacgacgcctctccctaccgggccagctgggggccctcacctcccagcccctgcacagacacggctcggacccgggcagttagtggggctgcccagtgtggacacgtggctcacccagggatcaaggcgctgctgggccgctccccttggaggccctgctcaggaggccctgaccgtggaaggggagaggaactcgaaagcacagctcctcccccagcccttgggaccatcttctcctgcagtcccctgggccccagtgagaggggcaggggcagggccggcagtaggtggggcctgtggtccccccactgccctgagggcattagctggtctaactgcccggaggcacccggccctgggccttaggcacctcaaggacttttctgctatttactgctcttattgttaaggataataattaaggatcatatgaataattaatgaagatgctgatgactatgaataataaataattatcctgaggaga

SEQ ID NO: 410 - DNA, 3884 bp, Homo sapiens
  source 1..3884: mol_type = genomic DNA
  misc_feature 1..3884: note = cDNA of KCNH2 gene SNP c.2035C>T (p.Arg679Trp)
atgccggtgcggaggggccacgtcgcgccgcagaacaccttcctggacaccatcatccgcaagtttgagggccagagccgtaagttcatcatcgccaacgctcgggtggagaactgcgccgtcatctactgcaacgacggcttctgcgagctgtgcggctactcgcgggccgaggtgatgcagcgaccctgcacctgcgacttcctgcacgggccgcgcacgcagcgccgcgctgccgcgcagatcgcgcaggcactgctgggcgccgaggagcgcaaagtggaaatcgccttctaccggaaagatgggagctgcttcctatgtctggtggatgtggtgcccgtgaagaacgaggatggggctgtcatcatgttcatcctcaatttcgaggtggtgatggagaaggacatggtggggtccccggctcatgacaccaaccaccggggcccccccaccagctggctggccccaggccgcgccaagaccttccgcctgaagctgcccgcgctgctggcgctgacggcccgggagtcgtcggtgcggtcgggcggcgcgggcggcgcgggcgccccgggggccgtggtggtggacgtggacctgacgcccgcggcacccagcagcgagtcgctggccctggacgaagtgacagccatggacaaccacgtggcagggctcgggcccgcggaggagcggcgtgcgctggtgggtcccggctctccgccccgcagcgcgcccggccagctcccatcgccccgggcgcacagcctcaaccccgacgcctcgggctccagctgcagcctggcccggacgcgctcccgagaaagctgcgccagcgtgcgccgcgcctcgtcggccgacgacatcgaggccatgcgcgccggggtgctgcccccgccaccgcgccacgccagcaccggggccatgcacccactgcgcagcggcttgctcaactccacctcggactccgacctcgtgcgctaccgcaccattagcaagattccccaaatcaccctcaactttgtggacctcaagggcgaccccttcttggcttcgcccaccagtgaccgtgagatcatagcacctaagataaaggagcgaacccacaatgtcactgagaaggtcacccaggtcctgtccctgggcgccgacgtgctgcctgagtacaagctgcaggcaccgcgcatccaccgctggaccatcctgcattacagccccttcaaggccgtgtgggactggctcatcctgctgctggtcatctacacggctgtcttcacaccctactcggctgccttcctgctgaaggagacggaagaaggcccgcctgctaccgagtgtggctacgcctgccagccgctggctgtggtggacctcatcgtggacatcatgttcattgtggacatcctcatcaacttccgcaccacctacgtcaatgccaacgaggaggtggtcagccaccccggccgcatcgccgtccactacttcaagggctggttcctcatcgacatggtggccgccatccccttcgacctgctcatcttcggctctggctctgaggagctgatcgggctgctgaagactgcgcggctgctgcggctggtgcgcgtggcgcggaagctggatcgctactcagagtacggcgcggccgtgctgttcttgctcatgtgcacctttgcgctcatcgcgcactggctagcctgcatctggtacgccatcggcaacatggagcagccacacatggactcacgcatcggctggctgcacaacctgggcgaccagataggcaaaccctacaacagcagcggcctgggcggcccctccatcaaggacaagtatgtgacggcgctctacttcaccttcagcagcctcaccagtgtgggcttcggcaacgtctctcccaacaccaactcagagaagatcttctccatctgcgtcatgctcattggctccctcatgtatgctagcatcttcggcaacgtgtcggccatcatccagcggctgtactcgggcacagcccgctaccacacacagatgctgtgggtgcgggagttcatccgcttccaccagatccccaatcccctgcgccagcgcctcgaggagtacttccagcacgcctggtcctacaccaacggcatcgacatgaacgcggtgctgaagggcttccctgagtgcctgcaggctgacatctgcctgcacctgaaccgctcactgctgcagcactgcaaacccttccgaggggccaccaagggctgccttcgggccctggccatgaagttcaagaccacacatgcaccgccaggggacacactggtgcatgctggggacctgctcaccgccctgtacttcatctcccggggctccatcgagatcctgcggggcgacgtcgtcgtggccatcctggggaagaatgacatctttggggagcctctgaacctgtatgcaaggcctggcaagtcgaacggggatgtgcgggccctcacctactgtgacctacacaagatccatcgggacgacctgctggaggtgctggacatgtaccctgagttctccgaccacttctggtccagcctggagatcaccttcaacctgcgagataccaacatgatcccgggctcccccggcagtacggagttagagggtggcttcagtcggcaacgcaagcgcaagttgtccttccgcaggcgcacggacaaggacacggagcagccaggggaggtgtcggccttggggccgggccgggcgggggcagggccgagtagccggggccggccgggggggccgtggggggagagcccgtccagtggcccctccagccctgagagcagtgaggatgagggcccaggccgcagctccagccccctccgcctggtgcccttctccagccccaggccccccggagagccgccgggtggggagcccctgatggaggactgcgagaagagcagcgacacttgcaaccccctgtcaggcgccttctcaggagtgtccaacattttcagcttctggggggacagtcggggccgccagtaccaggagctccctcgatgccccgcccccacccccagcctcctcaacatccccctctccagcccgggtcggcggccccggggcgacgtggagagcaggctggatgccctccagcgccagctcaacaggctggagacccggctgagtgcagacatggccactgtcctgcagctgctacagaggcagatgacgctggtcccgcccgcctacagtgctgtgaccaccccggggcctggccccacttccacatccccgctgttgcccgtcagccccctccccaccctcaccttggactcgctttctcaggtttcccagttcatggcgtgtgaggagctgcccccgggggccccagagcttccccaagaaggccccacacgacgcctctccctaccgggccagctgggggccctcacctcccagcccctgcacagacacggctcggacccgggcagttagtggggctgcccagtgtggacacgtggctcacccagggatcaaggcgctgctgggccgctccccttggaggccctgctcaggaggccctgaccgtggaaggggagaggaactcgaaagcacagctcctcccccagcccttgggaccatcttctcctgcagtcccctgggccccagtgagaggggcaggggcagggccggcagtaggtggggcctgtggtccccccactgccctgagggcattagctggtctaactgcccggaggcacccggccctgggccttaggcacctcaaggacttttctgctatttactgctcttattgttaaggataataattaaggatcatatgaataattaatgaagatgctgatgactatgaataataaataattatcctgaggaga

SEQ ID NO: 411 - DNA, 3884 bp, Homo sapiens
  source 1..3884: mol_type = genomic DNA
  misc_feature 1..3884: note = cDNA of KCNH2 gene SNP c.2036G>A (p.Arg679Gln)
atgccggtgcggaggggccacgtcgcgccgcagaacaccttcctggacaccatcatccgcaagtttgagggccagagccgtaagttcatcatcgccaacgctcgggtggagaactgcgccgtcatctactgcaacgacggcttctgcgagctgtgcggctactcgcgggccgaggtgatgcagcgaccctgcacctgcgacttcctgcacgggccgcgcacgcagcgccgcgctgccgcgcagatcgcgcaggcactgctgggcgccgaggagcgcaaagtggaaatcgccttctaccggaaagatgggagctgcttcctatgtctggtggatgtggtgcccgtgaagaacgaggatggggctgtcatcatgttcatcctcaatttcgaggtggtgatggagaaggacatggtggggtccccggctcatgacaccaaccaccggggcccccccaccagctggctggccccaggccgcgccaagaccttccgcctgaagctgcccgcgctgctggcgctgacggcccgggagtcgtcggtgcggtcgggcggcgcgggcggcgcgggcgccccgggggccgtggtggtggacgtggacctgacgcccgcggcacccagcagcgagtcgctggccctggacgaagtgacagccatggacaaccacgtggcagggctcgggcccgcggaggagcggcgtgcgctggtgggtcccggctctccgccccgcagcgcgcccggccagctcccatcgccccgggcgcacagcctcaaccccgacgcctcgggctccagctgcagcctggcccggacgcgctcccgagaaagctgcgccagcgtgcgccgcgcctcgtcggccgacgacatcgaggccatgcgcgccggggtgctgcccccgccaccgcgccacgccagcaccggggccatgcacccactgcgcagcggcttgctcaactccacctcggactccgacctcgtgcgctaccgcaccattagcaagattccccaaatcaccctcaactttgtggacctcaagggcgaccccttcttggcttcgcccaccagtgaccgtgagatcatagcacctaagataaaggagcgaacccacaatgtcactgagaaggtcacccaggtcctgtccctgggcgccgacgtgctgcctgagtacaagctgcaggcaccgcgcatccaccgctggaccatcctgcattacagccccttcaaggccgtgtgggactggctcatcctgctgctggtcatctacacggctgtcttcacaccctactcggctgccttcctgctgaaggagacggaagaaggcccgcctgctaccgagtgtggctacgcctgccagccgctggctgtggtggacctcatcgtggacatcatgttcattgtggacatcctcatcaacttccgcaccacctacgtcaatgccaacgaggaggtggtcagccaccccggccgcatcgccgtccactacttcaagggctggttcctcatcgacatggtggccgccatccccttcgacctgctcatcttcggctctggctctgaggagctgatcgggctgctgaagactgcgcggctgctgcggctggtgcgcgtggcgcggaagctggatcgctactcagagtacggcgcggccgtgctgttcttgctcatgtgcacctttgcgctcatcgcgcactggctagcctgcatctggtacgccatcggcaacatggagcagccacacatggactcacgcatcggctggctgcacaacctgggcgaccagataggcaaaccctacaacagcagcggcctgggcggcccctccatcaaggacaagtatgtgacggcgctctacttcaccttcagcagcctcaccagtgtgggcttcggcaacgtctctcccaacaccaactcagagaagatcttctccatctgcgtcatgctcattggctccctcatgtatgctagcatcttcggcaacgtgtcggccatcatccagcggctgtactcgggcacagcccgctaccacacacagatgctgcaggtgcgggagttcatccgcttccaccagatccccaatcccctgcgccagcgcctcgaggagtacttccagcacgcctggtcctacaccaacggcatcgacatgaacgcggtgctgaagggcttccctgagtgcctgcaggctgacatctgcctgcacctgaaccgctcactgctgcagcactgcaaacccttccgaggggccaccaagggctgccttcgggccctggccatgaagttcaagaccacacatgcaccgccaggggacacactggtgcatgctggggacctgctcaccgccctgtacttcatctcccggggctccatcgagatcctgcggggcgacgtcgtcgtggccatcctggggaagaatgacatctttggggagcctctgaacctgtatgcaaggcctggcaagtcgaacggggatgtgcgggccctcacctactgtgacctacacaagatccatcgggacgacctgctggaggtgctggacatgtaccctgagttctccgaccacttctggtccagcctggagatcaccttcaacctgcgagataccaacatgatcccgggctcccccggcagtacggagttagagggtggcttcagtcggcaacgcaagcgcaagttgtccttccgcaggcgcacggacaaggacacggagcagccaggggaggtgtcggccttggggccgggccgggcgggggcagggccgagtagccggggccggccgggggggccgtggggggagagcccgtccagtggcccctccagccctgagagcagtgaggatgagggcccaggccgcagctccagccccctccgcctggtgcccttctccagccccaggccccccggagagccgccgggtggggagcccctgatggaggactgcgagaagagcagcgacacttgcaaccccctgtcaggcgccttctcaggagtgtccaacattttcagcttctggggggacagtcggggccgccagtaccaggagctccctcgatgccccgcccccacccccagcctcctcaacatccccctctccagcccgggtcggcggccccggggcgacgtggagagcaggctggatgccctccagcgccagctcaacaggctggagacccggctgagtgcagacatggccactgtcctgcagctgctacagaggcagatgacgctggtcccgcccgcctacagtgctgtgaccaccccggggcctggccccacttccacatccccgctgttgcccgtcagccccctccccaccctcaccttggactcgctttctcaggtttcccagttcatggcgtgtgaggagctgcccccgggggccccagagcttccccaagaaggccccacacgacgcctctccctaccgggccagctgggggccctcacctcccagcccctgcacagacacggctcggacccgggcagttagtggggctgcccagtgtggacacgtggctcacccagggatcaaggcgctgctgggccgctccccttggaggccctgctcaggaggccctgaccgtggaaggggagaggaactcgaaagcacagctcctcccccagcccttgggaccatcttctcctgcagtcccctgggccccagtgagaggggcaggggcagggccggcagtaggtggggcctgtggtccccccactgccctgagggcattagctggtctaactgcccggaggcacccggccctgggccttaggcacctcaaggacttttctgctatttactgctcttattgttaaggataataattaaggatcatatgaataattaatgaagatgctgatgactatgaataataaataattatcctgaggaga

SEQ ID NO: 412 - DNA, 3884 bp, Homo sapiens
  source 1..3884: mol_type = genomic DNA
  misc_feature 1..3884: note = cDNA of KCNH2 gene SNP c.203T>G (p.Phe68Cys)
atgccggtgcggaggggccacgtcgcgccgcagaacaccttcctggacaccatcatccgcaagtttgagggccagagccgtaagttcatcatcgccaacgctcgggtggagaactgcgccgtcatctactgcaacgacggcttctgcgagctgtgcggctactcgcgggccgaggtgatgcagcgaccctgcacctgcgactgcctgcacgggccgcgcacgcagcgccgcgctgccgcgcagatcgcgcaggcactgctgggcgccgaggagcgcaaagtggaaatcgccttctaccggaaagatgggagctgcttcctatgtctggtggatgtggtgcccgtgaagaacgaggatggggctgtcatcatgttcatcctcaatttcgaggtggtgatggagaaggacatggtggggtccccggctcatgacaccaaccaccggggcccccccaccagctggctggccccaggccgcgccaagaccttccgcctgaagctgcccgcgctgctggcgctgacggcccgggagtcgtcggtgcggtcgggcggcgcgggcggcgcgggcgccccgggggccgtggtggtggacgtggacctgacgcccgcggcacccagcagcgagtcgctggccctggacgaagtgacagccatggacaaccacgtggcagggctcgggcccgcggaggagcggcgtgcgctggtgggtcccggctctccgccccgcagcgcgcccggccagctcccatcgccccgggcgcacagcctcaaccccgacgcctcgggctccagctgcagcctggcccggacgcgctcccgagaaagctgcgccagcgtgcgccgcgcctcgtcggccgacgacatcgaggccatgcgcgccggggtgctgcccccgccaccgcgccacgccagcaccggggccatgcacccactgcgcagcggcttgctcaactccacctcggactccgacctcgtgcgctaccgcaccattagcaagattccccaaatcaccctcaactttgtggacctcaagggcgaccccttcttggcttcgcccaccagtgaccgtgagatcatagcacctaagataaaggagcgaacccacaatgtcactgagaaggtcacccaggtcctgtccctgggcgccgacgtgctgcctgagtacaagctgcaggcaccgcgcatccaccgctggaccatcctgcattacagccccttcaaggccgtgtgggactggctcatcctgctgctggtcatctacacggctgtcttcacaccctactcggctgccttcctgctgaaggagacggaagaaggcccgcctgctaccgagtgtggctacgcctgccagccgctggctgtggtggacctcatcgtggacatcatgttcattgtggacatcctcatcaacttccgcaccacctacgtcaatgccaacgaggaggtggtcagccaccccggccgcatcgccgtccactacttcaagggctggttcctcatcgacatggtggccgccatccccttcgacctgctcatcttcggctctggctctgaggagctgatcgggctgctgaagactgcgcggctgctgcggctggtgcgcgtggcgcggaagctggatcgctactcagagtacggcgcggccgtgctgttcttgctcatgtgcacctttgcgctcatcgcgcactggctagcctgcatctggtacgccatcggcaacatggagcagccacacatggactcacgcatcggctggctgcacaacctgggcgaccagataggcaaaccctacaacagcagcggcctgggcggcccctccatcaaggacaagtatgtgacggcgctctacttcaccttcagcagcctcaccagtgtgggcttcggcaacgtctctcccaacaccaactcagagaagatcttctccatctgcgtcatgctcattggctccctcatgtatgctagcatcttcggcaacgtgtcggccatcatccagcggctgtactcgggcacagcccgctaccacacacagatgctgcgggtgcgggagttcatccgcttccaccagatccccaatcccctgcgccagcgcctcgaggagtacttccagcacgcctggtcctacaccaacggcatcgacatgaacgcggtgctgaagggcttccctgagtgcctgcaggctgacatctgcctgcacctgaaccgctcactgctgcagcactgcaaacccttccgaggggccaccaagggctgccttcgggccctggccatgaagttcaagaccacacatgcaccgccaggggacacactggtgcatgctggggacctgctcaccgccctgtacttcatctcccggggctccatcgagatcctgcggggcgacgtcgtcgtggccatcctggggaagaatgacatctttggggagcctctgaacctgtatgcaaggcctggcaagtcgaacggggatgtgcgggccctcacctactgtgacctacacaagatccatcgggacgacctgctggaggtgctggacatgtaccctgagttctccgaccacttctggtccagcctggagatcaccttcaacctgcgagataccaacatgatcccgggctcccccggcagtacggagttagagggtggcttcagtcggcaacgcaagcgcaagttgtccttccgcaggcgcacggacaaggacacggagcagccaggggaggtgtcggccttggggccgggccgggcgggggcagggccgagtagccggggccggccgggggggccgtggggggagagcccgtccagtggcccctccagccctgagagcagtgaggatgagggcccaggccgcagctccagccccctccgcctggtgcccttctccagccccaggccccccggagagccgccgggtggggagcccctgatggaggactgcgagaagagcagcgacacttgcaaccccctgtcaggcgccttctcaggagtgtccaacattttcagcttctggggggacagtcggggccgccagtaccaggagctccctcgatgccccgcccccacccccagcctcctcaacatccccctctccagcccgggtcggcggccccggggcgacgtggagagcaggctggatgccctccagcgccagctcaacaggctggagacccggctgagtgcagacatggccactgtcctgcagctgctacagaggcagatgacgctggtcccgcccgcctacagtgctgtgaccaccccggggcctggccccacttccacatccccgctgttgcccgtcagccccctccccaccctcaccttggactcgctttctcaggtttcccagttcatggcgtgtgaggagctgcccccgggggccccagagcttccccaagaaggccccacacgacgcctctccctaccgggccagctgggggccctcacctcccagcccctgcacagacacggctcggacccgggcagttagtggggctgcccagtgtggacacgtggctcacccagggatcaaggcgctgctgggccgctccccttggaggccctgctcaggaggccctgaccgtggaaggggagaggaactcgaaagcacagctcctcccccagcccttgggaccatcttctcctgcagtcccctgggccccagtgagaggggcaggggcagggccggcagtaggtggggcctgtggtccccccactgccctgagggcattagctggtctaactgcccggaggcacccggccctgggccttaggcacctcaaggacttttctgctatttactgctcttattgttaaggataataattaaggatcatatgaataattaatgaagatgctgatgactatgaataataaataattatcctgaggaga

SEQ ID NO: 413 - DNA, 3884 bp, Homo sapiens
  source 1..3884: mol_type = genomic DNA
  misc_feature 1..3884: note = cDNA of KCNH2 gene SNP c.2042G>A (p.Arg681Gln)
atgccggtgcggaggggccacgtcgcgccgcagaacaccttcctggacaccatcatccgcaagtttgagggccagagccgtaagttcatcatcgccaacgctcgggtggagaactgcgccgtcatctactgcaacgacggcttctgcgagctgtgcggctactcgcgggccgaggtgatgcagcgaccctgcacctgcgacttcctgcacgggccgcgcacgcagcgccgcgctgccgcgcagatcgcgcaggcactgctgggcgccgaggagcgcaaagtggaaatcgccttctaccggaaagatgggagctgcttcctatgtctggtggatgtggtgcccgtgaagaacgaggatggggctgtcatcatgttcatcctcaatttcgaggtggtgatggagaaggacatggtggggtccccggctcatgacaccaaccaccggggcccccccaccagctggctggccccaggccgcgccaagaccttccgcctgaagctgcccgcgctgctggcgctgacggcccgggagtcgtcggtgcggtcgggcggcgcgggcggcgcgggcgccccgggggccgtggtggtggacgtggacctgacgcccgcggcacccagcagcgagtcgctggccctggacgaagtgacagccatggacaaccacgtggcagggctcgggcccgcggaggagcggcgtgcgctggtgggtcccggctctccgccccgcagcgcgcccggccagctcccatcgccccgggcgcacagcctcaaccccgacgcctcgggctccagctgcagcctggcccggacgcgctcccgagaaagctgcgccagcgtgcgccgcgcctcgtcggccgacgacatcgaggccatgcgcgccggggtgctgcccccgccaccgcgccacgccagcaccggggccatgcacccactgcgcagcggcttgctcaactccacctcggactccgacctcgtgcgctaccgcaccattagcaagattccccaaatcaccctcaactttgtggacctcaagggcgaccccttcttggcttcgcccaccagtgaccgtgagatcatagcacctaagataaaggagcgaacccacaatgtcactgagaaggtcacccaggtcctgtccctgggcgccgacgtgctgcctgagtacaagctgcaggcaccgcgcatccaccgctggaccatcctgcattacagccccttcaaggccgtgtgggactggctcatcctgctgctggtcatctacacggctgtcttcacaccctactcggctgccttcctgctgaaggagacggaagaaggcccgcctgctaccgagtgtggctacgcctgccagccgctggctgtggtggacctcatcgtggacatcatgttcattgtggacatcctcatcaacttccgcaccacctacgtcaatgccaacgaggaggtggtcagccaccccggccgcatcgccgtccactacttcaagggctggttcctcatcgacatggtggccgccatccccttcgacctgctcatcttcggctctggctctgaggagctgatcgggctgctgaagactgcgcggctgctgcggctggtgcgcgtggcgcggaagctggatcgctactcagagtacggcgcggccgtgctgttcttgctcatgtgcacctttgcgctcatcgcgcactggctagcctgcatctggtacgccatcggcaacatggagcagccacacatggactcacgcatcggctggctgcacaacctgggcgaccagataggcaaaccctacaacagcagcggcctgggcggcccctccatcaaggacaagtatgtgacggcgctctacttcaccttcagcagcctcaccagtgtgggcttcggcaacgtctctcccaacaccaactcagagaagatcttctccatctgcgtcatgctcattggctccctcatgtatgctagcatcttcggcaacgtgtcggccatcatccagcggctgtactcgggcacagcccgctaccacacacagatgctgcgggtgcaggagttcatccgcttccaccagatccccaatcccctgcgccagcgcctcgaggagtacttccagcacgcctggtcctacaccaacggcatcgacatgaacgcggtgctgaagggcttccctgagtgcctgcaggctgacatctgcctgcacctgaaccgctcactgctgcagcactgcaaacccttccgaggggccaccaagggctgccttcgggccctggccatgaagttcaagaccacacatgcaccgccaggggacacactggtgcatgctggggacctgctcaccgccctgtacttcatctcccggggctccatcgagatcctgcggggcgacgtcgtcgtggccatcctggggaagaatgacatctttggggagcctctgaacctgtatgcaaggcctggcaagtcgaacggggatgtgcgggccctcacctactgtgacctacacaagatccatcgggacgacctgctggaggtgctggacatgtaccctgagttctccgaccacttctggtccagcctggagatcaccttcaacctgcgagataccaacatgatcccgggctcccccggcagtacggagttagagggtggcttcagtcggcaacgcaagcgcaagttgtccttccgcaggcgcacggacaaggacacggagcagccaggggaggtgtcggccttggggccgggccgggcgggggcagggccgagtagccggggccggccgggggggccgtggggggagagcccgtccagtggcccctccagccctgagagcagtgaggatgagggcccaggccgcagctccagccccctccgcctggtgcccttctccagccccaggccccccggagagccgccgggtggggagcccctgatggaggactgcgagaagagcagcgacacttgcaaccccctgtcaggcgccttctcaggagtgtccaacattttcagcttctggggggacagtcggggccgccagtaccaggagctccctcgatgccccgcccccacccccagcctcctcaacatccccctctccagcccgggtcggcggccccggggcgacgtggagagcaggctggatgccctccagcgccagctcaacaggctggagacccggctgagtgcagacatggccactgtcctgcagctgctacagaggcagatgacgctggtcccgcccgcctacagtgctgtgaccaccccggggcctggccccacttccacatccccgctgttgcccgtcagccccctccccaccctcaccttggactcgctttctcaggtttcccagttcatggcgtgtgaggagctgcccccgggggccccagagcttccccaagaaggccccacacgacgcctctccctaccgggccagctgggggccctcacctcccagcccctgcacagacacggctcggacccgggcagttagtggggctgcccagtgtggacacgtggctcacccagggatcaaggcgctgctgggccgctccccttggaggccctgctcaggaggccctgaccgtggaaggggagaggaactcgaaagcacagctcctcccccagcccttgggaccatcttctcctgcagtcccctgggccccagtgagaggggcaggggcagggccggcagtaggtggggcctgtggtccccccactgccctgagggcattagctggtctaactgcccggaggcacccggccctgggccttaggcacctcaaggacttttctgctatttactgctcttattgttaaggataataattaaggatcatatgaataattaatgaagatgctgatgactatgaataataaataattatcctgaggaga

SEQ ID NO: 414 - DNA, 3884 bp, Homo sapiens
  source 1..3884: mol_type = genomic DNA
  misc_feature 1..3884: note = cDNA of KCNH2 gene SNP c.2046G>C (p.Glu682Asp)
atgccggtgcggaggggccacgtcgcgccgcagaacaccttcctggacaccatcatccgcaagtttgagggccagagccgtaagttcatcatcgccaacgctcgggtggagaactgcgccgtcatctactgcaacgacggcttctgcgagctgtgcggctactcgcgggccgaggtgatgcagcgaccctgcacctgcgacttcctgcacgggccgcgcacgcagcgccgcgctgccgcgcagatcgcgcaggcactgctgggcgccgaggagcgcaaagtggaaatcgccttctaccggaaagatgggagctgcttcctatgtctggtggatgtggtgcccgtgaagaacgaggatggggctgtcatcatgttcatcctcaatttcgaggtggtgatggagaaggacatggtggggtccccggctcatgacaccaaccaccggggcccccccaccagctggctggccccaggccgcgccaagaccttccgcctgaagctgcccgcgctgctggcgctgacggcccgggagtcgtcggtgcggtcgggcggcgcgggcggcgcgggcgccccgggggccgtggtggtggacgtggacctgacgcccgcggcacccagcagcgagtcgctggccctggacgaagtgacagccatggacaaccacgtggcagggctcgggcccgcggaggagcggcgtgcgctggtgggtcccggctctccgccccgcagcgcgcccggccagctcccatcgccccgggcgcacagcctcaaccccgacgcctcgggctccagctgcagcctggcccggacgcgctcccgagaaagctgcgccagcgtgcgccgcgcctcgtcggccgacgacatcgaggccatgcgcgccggggtgctgcccccgccaccgcgccacgccagcaccggggccatgcacccactgcgcagcggcttgctcaactccacctcggactccgacctcgtgcgctaccgcaccattagcaagattccccaaatcaccctcaactttgtggacctcaagggcgaccccttcttggcttcgcccaccagtgaccgtgagatcatagcacctaagataaaggagcgaacccacaatgtcactgagaaggtcacccaggtcctgtccctgggcgccgacgtgctgcctgagtacaagctgcaggcaccgcgcatccaccgctggaccatcctgcattacagccccttcaaggccgtgtgggactggctcatcctgctgctggtcatctacacggctgtcttcacaccctactcggctgccttcctgctgaaggagacggaagaaggcccgcctgctaccgagtgtggctacgcctgccagccgctggctgtggtggacctcatcgtggacatcatgttcattgtggacatcctcatcaacttccgcaccacctacgtcaatgccaacgaggaggtggtcagccaccccggccgcatcgccgtccactacttcaagggctggttcctcatcgacatggtggccgccatccccttcgacctgctcatcttcggctctggctctgaggagctgatcgggctgctgaagactgcgcggctgctgcggctggtgcgcgtggcgcggaagctggatcgctactcagagtacggcgcggccgtgctgttcttgctcatgtgcacctttgcgctcatcgcgcactggctagcctgcatctggtacgccatcggcaacatggagcagccacacatggactcacgcatcggctggctgcacaacctgggcgaccagataggcaaaccctacaacagcagcggcctgggcggcccctccatcaaggacaagtatgtgacggcgctctacttcaccttcagcagcctcaccagtgtgggcttcggcaacgtctctcccaacaccaactcagagaagatcttctccatctgcgtcatgctcattggctccctcatgtatgctagcatcttcggcaacgtgtcggccatcatccagcggctgtactcgggcacagcccgctaccacacacagatgctgcgggtgcgggacttcatccgcttccaccagatccccaatcccctgcgccagcgcctcgaggagtacttccagcacgcctggtcctacaccaacggcatcgacatgaacgcggtgctgaagggcttccctgagtgcctgcaggctgacatctgcctgcacctgaaccgctcactgctgcagcactgcaaacccttccgaggggccaccaagggctgccttcgggccctggccatgaagttcaagaccacacatgcaccgccaggggacacactggtgcatgctggggacctgctcaccgccctgtacttcatctcccggggctccatcgagatcctgcggggcgacgtcgtcgtggccatcctggggaagaatgacatctttggggagcctctgaacctgtatgcaaggcctggcaagtcgaacggggatgtgcgggccctcacctactgtgacctacacaagatccatcgggacgacctgctggaggtgctggacatgtaccctgagttctccgaccacttctggtccagcctggagatcaccttcaacctgcgagataccaacatgatcccgggctcccccggcagtacggagttagagggtggcttcagtcggcaacgcaagcgcaagttgtccttccgcaggcgcacggacaaggacacggagcagccaggggaggtgtcggccttggggccgggccgggcgggggcagggccgagtagccggggccggccgggggggccgtggggggagagcccgtccagtggcccctccagccctgagagcagtgaggatgagggcccaggccgcagctccagccccctccgcctggtgcccttctccagccccaggccccccggagagccgccgggtggggagcccctgatggaggactgcgagaagagcagcgacacttgcaaccccctgtcaggcgccttctcaggagtgtccaacattttcagcttctggggggacagtcggggccgccagtaccaggagctccctcgatgccccgcccccacccccagcctcctcaacatccccctctccagcccgggtcggcggccccggggcgacgtggagagcaggctggatgccctccagcgccagctcaacaggctggagacccggctgagtgcagacatggccactgtcctgcagctgctacagaggcagatgacgctggtcccgcccgcctacagtgctgtgaccaccccggggcctggccccacttccacatccccgctgttgcccgtcagccccctccccaccctcaccttggactcgctttctcaggtttcccagttcatggcgtgtgaggagctgcccccgggggccccagagcttccccaagaaggccccacacgacgcctctccctaccgggccagctgggggccctcacctcccagcccctgcacagacacggctcggacccgggcagttagtggggctgcccagtgtggacacgtggctcacccagggatcaaggcgctgctgggccgctccccttggaggccctgctcaggaggccctgaccgtggaaggggagaggaactcgaaagcacagctcctcccccagcccttgggaccatcttctcctgcagtcccctgggccccagtgagaggggcaggggcagggccggcagtaggtggggcctgtggtccccccactgccctgagggcattagctggtctaactgcccggaggcacccggccctgggccttaggcacctcaaggacttttctgctatttactgctcttattgttaaggataataattaaggatcatatgaataattaatgaagatgctgatgactatgaataataaataattatcctgaggaga

SEQ ID NO: 415 - DNA, 3884 bp, Homo sapiens
  source 1..3884: mol_type = genomic DNA
  misc_feature 1..3884: note = cDNA of KCNH2 gene SNP c.2053C>T (p.Arg685Cys)
atgccggtgcggaggggccacgtcgcgccgcagaacaccttcctggacaccatcatccgcaagtttgagggccagagccgtaagttcatcatcgccaacgctcgggtggagaactgcgccgtcatctactgcaacgacggcttctgcgagctgtgcggctactcgcgggccgaggtgatgcagcgaccctgcacctgcgacttcctgcacgggccgcgcacgcagcgccgcgctgccgcgcagatcgcgcaggcactgctgggcgccgaggagcgcaaagtggaaatcgccttctaccggaaagatgggagctgcttcctatgtctggtggatgtggtgcccgtgaagaacgaggatggggctgtcatcatgttcatcctcaatttcgaggtggtgatggagaaggacatggtggggtccccggctcatgacaccaaccaccggggcccccccaccagctggctggccccaggccgcgccaagaccttccgcctgaagctgcccgcgctgctggcgctgacggcccgggagtcgtcggtgcggtcgggcggcgcgggcggcgcgggcgccccgggggccgtggtggtggacgtggacctgacgcccgcggcacccagcagcgagtcgctggccctggacgaagtgacagccatggacaaccacgtggcagggctcgggcccgcggaggagcggcgtgcgctggtgggtcccggctctccgccccgcagcgcgcccggccagctcccatcgccccgggcgcacagcctcaaccccgacgcctcgggctccagctgcagcctggcccggacgcgctcccgagaaagctgcgccagcgtgcgccgcgcctcgtcggccgacgacatcgaggccatgcgcgccggggtgctgcccccgccaccgcgccacgccagcaccggggccatgcacccactgcgcagcggcttgctcaactccacctcggactccgacctcgtgcgctaccgcaccattagcaagattccccaaatcaccctcaactttgtggacctcaagggcgaccccttcttggcttcgcccaccagtgaccgtgagatcatagcacctaagataaaggagcgaacccacaatgtcactgagaaggtcacccaggtcctgtccctgggcgccgacgtgctgcctgagtacaagctgcaggcaccgcgcatccaccgctggaccatcctgcattacagccccttcaaggccgtgtgggactggctcatcctgctgctggtcatctacacggctgtcttcacaccctactcggctgccttcctgctgaaggagacggaagaaggcccgcctgctaccgagtgtggctacgcctgccagccgctggctgtggtggacctcatcgtggacatcatgttcattgtggacatcctcatcaacttccgcaccacctacgtcaatgccaacgaggaggtggtcagccaccccggccgcatcgccgtccactacttcaagggctggttcctcatcgacatggtggccgccatccccttcgacctgctcatcttcggctctggctctgaggagctgatcgggctgctgaagactgcgcggctgctgcggctggtgcgcgtggcgcggaagctggatcgctactcagagtacggcgcggccgtgctgttcttgctcatgtgcacctttgcgctcatcgcgcactggctagcctgcatctggtacgccatcggcaacatggagcagccacacatggactcacgcatcggctggctgcacaacctgggcgaccagataggcaaaccctacaacagcagcggcctgggcggcccctccatcaaggacaagtatgtgacggcgctctacttcaccttcagcagcctcaccagtgtgggcttcggcaacgtctctcccaacaccaactcagagaagatcttctccatctgcgtcatgctcattggctccctcatgtatgctagcatcttcggcaacgtgtcggccatcatccagcggctgtactcgggcacagcccgctaccacacacagatgctgcgggtgcgggagttcatctgcttccaccagatccccaatcccctgcgccagcgcctcgaggagtacttccagcacgcctggtcctacaccaacggcatcgacatgaacgcggtgctgaagggcttccctgagtgcctgcaggctgacatctgcctgcacctgaaccgctcactgctgcagcactgcaaacccttccgaggggccaccaagggctgccttcgggccctggccatgaagttcaagaccacacatgcaccgccaggggacacactggtgcatgctggggacctgctcaccgccctgtacttcatctcccggggctccatcgagatcctgcggggcgacgtcgtcgtggccatcctggggaagaatgacatctttggggagcctctgaacctgtatgcaaggcctggcaagtcgaacggggatgtgcgggccctcacctactgtgacctacacaagatccatcgggacgacctgctggaggtgctggacatgtaccctgagttctccgaccacttctggtccagcctggagatcaccttcaacctgcgagataccaacatgatcccgggctcccccggcagtacggagttagagggtggcttcagtcggcaacgcaagcgcaagttgtccttccgcaggcgcacggacaaggacacggagcagccaggggaggtgtcggccttggggccgggccgggcgggggcagggccgagtagccggggccggccgggggggccgtggggggagagcccgtccagtggcccctccagccctgagagcagtgaggatgagggcccaggccgcagctccagccccctccgcctggtgcccttctccagccccaggccccccggagagccgccgggtggggagcccctgatggaggactgcgagaagagcagcgacacttgcaaccccctgtcaggcgccttctcaggagtgtccaacattttcagcttctggggggacagtcggggccgccagtaccaggagctccctcgatgccccgcccccacccccagcctcctcaacatccccctctccagcccgggtcggcggccccggggcgacgtggagagcaggctggatgccctccagcgccagctcaacaggctggagacccggctgagtgcagacatggccactgtcctgcagctgctacagaggcagatgacgctggtcccgcccgcctacagtgctgtgaccaccccggggcctggccccacttccacatccccgctgttgcccgtcagccccctccccaccctcaccttggactcgctttctcaggtttcccagttcatggcgtgtgaggagctgcccccgggggccccagagcttccccaagaaggccccacacgacgcctctccctaccgggccagctgggggccctcacctcccagcccctgcacagacacggctcggacccgggcagttagtggggctgcccagtgtggacacgtggctcacccagggatcaaggcgctgctgggccgctccccttggaggccctgctcaggaggccctgaccgtggaaggggagaggaactcgaaagcacagctcctcccccagcccttgggaccatcttctcctgcagtcccctgggccccagtgagaggggcaggggcagggccggcagtaggtggggcctgtggtccccccactgccctgagggcattagctggtctaactgcccggaggcacccggccctgggccttaggcacctcaaggacttttctgctatttactgctcttattgttaaggataataattaaggatcatatgaataattaatgaagatgctgatgactatgaataataaataattatcctgaggaga

SEQ ID NO: 416 - DNA, 3884 bp, Homo sapiens
  source 1..3884: mol_type = genomic DNA
  misc_feature 1..3884: note = cDNA of KCNH2 gene SNP c.2054G>A (p.Arg685His)
atgccggtgcggaggggccacgtcgcgccgcagaacaccttcctggacaccatcatccgcaagtttgagggccagagccgtaagttcatcatcgccaacgctcgggtggagaactgcgccgtcatctactgcaacgacggcttctgcgagctgtgcggctactcgcgggccgaggtgatgcagcgaccctgcacctgcgacttcctgcacgggccgcgcacgcagcgccgcgctgccgcgcagatcgcgcaggcactgctgggcgccgaggagcgcaaagtggaaatcgccttctaccggaaagatgggagctgcttcctatgtctggtggatgtggtgcccgtgaagaacgaggatggggctgtcatcatgttcatcctcaatttcgaggtggtgatggagaaggacatggtggggtccccggctcatgacaccaaccaccggggcccccccaccagctggctggccccaggccgcgccaagaccttccgcctgaagctgcccgcgctgctggcgctgacggcccgggagtcgtcggtgcggtcgggcggcgcgggcggcgcgggcgccccgggggccgtggtggtggacgtggacctgacgcccgcggcacccagcagcgagtcgctggccctggacgaagtgacagccatggacaaccacgtggcagggctcgggcccgcggaggagcggcgtgcgctggtgggtcccggctctccgccccgcagcgcgcccggccagctcccatcgccccgggcgcacagcctcaaccccgacgcctcgggctccagctgcagcctggcccggacgcgctcccgagaaagctgcgccagcgtgcgccgcgcctcgtcggccgacgacatcgaggccatgcgcgccggggtgctgcccccgccaccgcgccacgccagcaccggggccatgcacccactgcgcagcggcttgctcaactccacctcggactccgacctcgtgcgctaccgcaccattagcaagattccccaaatcaccctcaactttgtggacctcaagggcgaccccttcttggcttcgcccaccagtgaccgtgagatcatagcacctaagataaaggagcgaacccacaatgtcactgagaaggtcacccaggtcctgtccctgggcgccgacgtgctgcctgagtacaagctgcaggcaccgcgcatccaccgctggaccatcctgcattacagccccttcaaggccgtgtgggactggctcatcctgctgctggtcatctacacggctgtcttcacaccctactcggctgccttcctgctgaaggagacggaagaaggcccgcctgctaccgagtgtggctacgcctgccagccgctggctgtggtggacctcatcgtggacatcatgttcattgtggacatcctcatcaacttccgcaccacctacgtcaatgccaacgaggaggtggtcagccaccccggccgcatcgccgtccactacttcaagggctggttcctcatcgacatggtggccgccatccccttcgacctgctcatcttcggctctggctctgaggagctgatcgggctgctgaagactgcgcggctgctgcggctggtgcgcgtggcgcggaagctggatcgctactcagagtacggcgcggccgtgctgttcttgctcatgtgcacctttgcgctcatcgcgcactggctagcctgcatctggtacgccatcggcaacatggagcagccacacatggactcacgcatcggctggctgcacaacctgggcgaccagataggcaaaccctacaacagcagcggcctgggcggcccctccatcaaggacaagtatgtgacggcgctctacttcaccttcagcagcctcaccagtgtgggcttcggcaacgtctctcccaacaccaactcagagaagatcttctccatctgcgtcatgctcattggctccctcatgtatgctagcatcttcggcaacgtgtcggccatcatccagcggctgtactcgggcacagcccgctaccacacacagatgctgcgggtgcgggagttcatccacttccaccagatccccaatcccctgcgccagcgcctcgaggagtacttccagcacgcctggtcctacaccaacggcatcgacatgaacgcggtgctgaagggcttccctgagtgcctgcaggctgacatctgcctgcacctgaaccgctcactgctgcagcactgcaaacccttccgaggggccaccaagggctgccttcgggccctggccatgaagttcaagaccacacatgcaccgccaggggacacactggtgcatgctggggacctgctcaccgccctgtacttcatctcccggggctccatcgagatcctgcggggcgacgtcgtcgtggccatcctggggaagaatgacatctttggggagcctctgaacctgtatgcaaggcctggcaagtcgaacggggatgtgcgggccctcacctactgtgacctacacaagatccatcgggacgacctgctggaggtgctggacatgtaccctgagttctccgaccacttctggtccagcctggagatcaccttcaacctgcgagataccaacatgatcccgggctcccccggcagtacggagttagagggtggcttcagtcggcaacgcaagcgcaagttgtccttccgcaggcgcacggacaaggacacggagcagccaggggaggtgtcggccttggggccgggccgggcgggggcagggccgagtagccggggccggccgggggggccgtggggggagagcccgtccagtggcccctccagccctgagagcagtgaggatgagggcccaggccgcagctccagccccctccgcctggtgcccttctccagccccaggccccccggagagccgccgggtggggagcccctgatggaggactgcgagaagagcagcgacacttgcaaccccctgtcaggcgccttctcaggagtgtccaacattttcagcttctggggggacagtcggggccgccagtaccaggagctccctcgatgccccgcccccacccccagcctcctcaacatccccctctccagcccgggtcggcggccccggggcgacgtggagagcaggctggatgccctccagcgccagctcaacaggctggagacccggctgagtgcagacatggccactgtcctgcagctgctacagaggcagatgacgctggtcccgcccgcctacagtgctgtgaccaccccggggcctggccccacttccacatccccgctgttgcccgtcagccccctccccaccctcaccttggactcgctttctcaggtttcccagttcatggcgtgtgaggagctgcccccgggggccccagagcttccccaagaaggccccacacgacgcctctccctaccgggccagctgggggccctcacctcccagcccctgcacagacacggctcggacccgggcagttagtggggctgcccagtgtggacacgtggctcacccagggatcaaggcgctgctgggccgctccccttggaggccctgctcaggaggccctgaccgtggaaggggagaggaactcgaaagcacagctcctcccccagcccttgggaccatcttctcctgcagtcccctgggccccagtgagaggggcaggggcagggccggcagtaggtggggcctgtggtccccccactgccctgagggcattagctggtctaactgcccggaggcacccggccctgggccttaggcacctcaaggacttttctgctatttactgctcttattgttaaggataataattaaggatcatatgaataattaatgaagatgctgatgactatgaataataaataattatcctgaggaga

SEQ ID NO: 417 - DNA, 3884 bp, Homo sapiens
  source 1..3884: mol_type = genomic DNA
  misc_feature 1..3884: note = cDNA of KCNH2 gene SNP c.2059C>T (p.His687Tyr)
atgccggtgcggaggggccacgtcgcgccgcagaacaccttcctggacaccatcatccgcaagtttgagggccagagccgtaagttcatcatcgccaacgctcgggtggagaactgcgccgtcatctactgcaacgacggcttctgcgagctgtgcggctactcgcgggccgaggtgatgcagcgaccctgcacctgcgacttcctgcacgggccgcgcacgcagcgccgcgctgccgcgcagatcgcgcaggcactgctgggcgccgaggagcgcaaagtggaaatcgccttctaccggaaagatgggagctgcttcctatgtctggtggatgtggtgcccgtgaagaacgaggatggggctgtcatcatgttcatcctcaatttcgaggtggtgatggagaaggacatggtggggtccccggctcatgacaccaaccaccggggcccccccaccagctggctggccccaggccgcgccaagaccttccgcctgaagctgcccgcgctgctggcgctgacggcccgggagtcgtcggtgcggtcgggcggcgcgggcggcgcgggcgccccgggggccgtggtggtggacgtggacctgacgcccgcggcacccagcagcgagtcgctggccctggacgaagtgacagccatggacaaccacgtggcagggctcgggcccgcggaggagcggcgtgcgctggtgggtcccggctctccgccccgcagcgcgcccggccagctcccatcgccccgggcgcacagcctcaaccccgacgcctcgggctccagctgcagcctggcccggacgcgctcccgagaaagctgcgccagcgtgcgccgcgcctcgtcggccgacgacatcgaggccatgcgcgccggggtgctgcccccgccaccgcgccacgccagcaccggggccatgcacccactgcgcagcggcttgctcaactccacctcggactccgacctcgtgcgctaccgcaccattagcaagattccccaaatcaccctcaactttgtggacctcaagggcgaccccttcttggcttcgcccaccagtgaccgtgagatcatagcacctaagataaaggagcgaacccacaatgtcactgagaaggtcacccaggtcctgtccctgggcgccgacgtgctgcctgagtacaagctgcaggcaccgcgcatccaccgctggaccatcctgcattacagccccttcaaggccgtgtgggactggctcatcctgctgctggtcatctacacggctgtcttcacaccctactcggctgccttcctgctgaaggagacggaagaaggcccgcctgctaccgagtgtggctacgcctgccagccgctggctgtggtggacctcatcgtggacatcatgttcattgtggacatcctcatcaacttccgcaccacctacgtcaatgccaacgaggaggtggtcagccaccccggccgcatcgccgtccactacttcaagggctggttcctcatcgacatggtggccgccatccccttcgacctgctcatcttcggctctggctctgaggagctgatcgggctgctgaagactgcgcggctgctgcggctggtgcgcgtggcgcggaagctggatcgctactcagagtacggcgcggccgtgctgttcttgctcatgtgcacctttgcgctcatcgcgcactggctagcctgcatctggtacgccatcggcaacatggagcagccacacatggactcacgcatcggctggctgcacaacctgggcgaccagataggcaaaccctacaacagcagcggcctgggcggcccctccatcaaggacaagtatgtgacggcgctctacttcaccttcagcagcctcaccagtgtgggcttcggcaacgtctctcccaacaccaactcagagaagatcttctccatctgcgtcatgctcattggctccctcatgtatgctagcatcttcggcaacgtgtcggccatcatccagcggctgtactcgggcacagcccgctaccacacacagatgctgcgggtgcgggagttcatccgcttctaccagatccccaatcccctgcgccagcgcctcgaggagtacttccagcacgcctggtcctacaccaacggcatcgacatgaacgcggtgctgaagggcttccctgagtgcctgcaggctgacatctgcctgcacctgaaccgctcactgctgcagcactgcaaacccttccgaggggccaccaagggctgccttcgggccctggccatgaagttcaagaccacacatgcaccgccaggggacacactggtgcatgctggggacctgctcaccgccctgtacttcatctcccggggctccatcgagatcctgcggggcgacgtcgtcgtggccatcctggggaagaatgacatctttggggagcctctgaacctgtatgcaaggcctggcaagtcgaacggggatgtgcgggccctcacctactgtgacctacacaagatccatcgggacgacctgctggaggtgctggacatgtaccctgagttctccgaccacttctggtccagcctggagatcaccttcaacctgcgagataccaacatgatcccgggctcccccggcagtacggagttagagggtggcttcagtcggcaacgcaagcgcaagttgtccttccgcaggcgcacggacaaggacacggagcagccaggggaggtgtcggccttggggccgggccgggcgggggcagggccgagtagccggggccggccgggggggccgtggggggagagcccgtccagtggcccctccagccctgagagcagtgaggatgagggcccaggccgcagctccagccccctccgcctggtgcccttctccagccccaggccccccggagagccgccgggtggggagcccctgatggaggactgcgagaagagcagcgacacttgcaaccccctgtcaggcgccttctcaggagtgtccaacattttcagcttctggggggacagtcggggccgccagtaccaggagctccctcgatgccccgcccccacccccagcctcctcaacatccccctctccagcccgggtcggcggccccggggcgacgtggagagcaggctggatgccctccagcgccagctcaacaggctggagacccggctgagtgcagacatggccactgtcctgcagctgctacagaggcagatgacgctggtcccgcccgcctacagtgctgtgaccaccccggggcctggccccacttccacatccccgctgttgcccgtcagccccctccccaccctcaccttggactcgctttctcaggtttcccagttcatggcgtgtgaggagctgcccccgggggccccagagcttccccaagaaggccccacacgacgcctctccctaccgggccagctgggggccctcacctcccagcccctgcacagacacggctcggacccgggcagttagtggggctgcccagtgtggacacgtggctcacccagggatcaaggcgctgctgggccgctccccttggaggccctgctcaggaggccctgaccgtggaaggggagaggaactcgaaagcacagctcctcccccagcccttgggaccatcttctcctgcagtcccctgggccccagtgagaggggcaggggcagggccggcagtaggtggggcctgtggtccccccactgccctgagggcattagctggtctaactgcccggaggcacccggccctgggccttaggcacctcaaggacttttctgctatttactgctcttattgttaaggataataattaaggatcatatgaataattaatgaagatgctgatgactatgaataataaataattatcctgaggaga

SEQ ID NO: 418 - DNA, 3884 bp, Homo sapiens
  source 1..3884: mol_type = genomic DNA
  misc_feature 1..3884: note = cDNA of KCNH2 gene SNP c.2062C>T (p.Gln688Ter)
atgccggtgcggaggggccacgtcgcgccgcagaacaccttcctggacaccatcatccgcaagtttgagggccagagccgtaagttcatcatcgccaacgctcgggtggagaactgcgccgtcatctactgcaacgacggcttctgcgagctgtgcggctactcgcgggccgaggtgatgcagcgaccctgcacctgcgacttcctgcacgggccgcgcacgcagcgccgcgctgccgcgcagatcgcgcaggcactgctgggcgccgaggagcgcaaagtggaaatcgccttctaccggaaagatgggagctgcttcctatgtctggtggatgtggtgcccgtgaagaacgaggatggggctgtcatcatgttcatcctcaatttcgaggtggtgatggagaaggacatggtggggtccccggctcatgacaccaaccaccggggcccccccaccagctggctggccccaggccgcgccaagaccttccgcctgaagctgcccgcgctgctggcgctgacggcccgggagtcgtcggtgcggtcgggcggcgcgggcggcgcgggcgccccgggggccgtggtggtggacgtggacctgacgcccgcggcacccagcagcgagtcgctggccctggacgaagtgacagccatggacaaccacgtggcagggctcgggcccgcggaggagcggcgtgcgctggtgggtcccggctctccgccccgcagcgcgcccggccagctcccatcgccccgggcgcacagcctcaaccccgacgcctcgggctccagctgcagcctggcccggacgcgctcccgagaaagctgcgccagcgtgcgccgcgcctcgtcggccgacgacatcgaggccatgcgcgccggggtgctgcccccgccaccgcgccacgccagcaccggggccatgcacccactgcgcagcggcttgctcaactccacctcggactccgacctcgtgcgctaccgcaccattagcaagattccccaaatcaccctcaactttgtggacctcaagggcgaccccttcttggcttcgcccaccagtgaccgtgagatcatagcacctaagataaaggagcgaacccacaatgtcactgagaaggtcacccaggtcctgtccctgggcgccgacgtgctgcctgagtacaagctgcaggcaccgcgcatccaccgctggaccatcctgcattacagccccttcaaggccgtgtgggactggctcatcctgctgctggtcatctacacggctgtcttcacaccctactcggctgccttcctgctgaaggagacggaagaaggcccgcctgctaccgagtgtggctacgcctgccagccgctggctgtggtggacctcatcgtggacatcatgttcattgtggacatcctcatcaacttccgcaccacctacgtcaatgccaacgaggaggtggtcagccaccccggccgcatcgccgtccactacttcaagggctggttcctcatcgacatggtggccgccatccccttcgacctgctcatcttcggctctggctctgaggagctgatcgggctgctgaagactgcgcggctgctgcggctggtgcgcgtggcgcggaagctggatcgctactcagagtacggcgcggccgtgctgttcttgctcatgtgcacctttgcgctcatcgcgcactggctagcctgcatctggtacgccatcggcaacatggagcagccacacatggactcacgcatcggctggctgcacaacctgggcgaccagataggcaaaccctacaacagcagcggcctgggcggcccctccatcaaggacaagtatgtgacggcgctctacttcaccttcagcagcctcaccagtgtgggcttcggcaacgtctctcccaacaccaactcagagaagatcttctccatctgcgtcatgctcattggctccctcatgtatgctagcatcttcggcaacgtgtcggccatcatccagcggctgtactcgggcacagcccgctaccacacacagatgctgcgggtgcgggagttcatccgcttccactagatccccaatcccctgcgccagcgcctcgaggagtacttccagcacgcctggtcctacaccaacggcatcgacatgaacgcggtgctgaagggcttccctgagtgcctgcaggctgacatctgcctgcacctgaaccgctcactgctgcagcactgcaaacccttccgaggggccaccaagggctgccttcgggccctggccatgaagttcaagaccacacatgcaccgccaggggacacactggtgcatgctggggacctgctcaccgccctgtacttcatctcccggggctccatcgagatcctgcggggcgacgtcgtcgtggccatcctggggaagaatgacatctttggggagcctctgaacctgtatgcaaggcctggcaagtcgaacggggatgtgcgggccctcacctactgtgacctacacaagatccatcgggacgacctgctggaggtgctggacatgtaccctgagttctccgaccacttctggtccagcctggagatcaccttcaacctgcgagataccaacatgatcccgggctcccccggcagtacggagttagagggtggcttcagtcggcaacgcaagcgcaagttgtccttccgcaggcgcacggacaaggacacggagcagccaggggaggtgtcggccttggggccgggccgggcgggggcagggccgagtagccggggccggccgggggggccgtggggggagagcccgtccagtggcccctccagccctgagagcagtgaggatgagggcccaggccgcagctccagccccctccgcctggtgcccttctccagccccaggccccccggagagccgccgggtggggagcccctgatggaggactgcgagaagagcagcgacacttgcaaccccctgtcaggcgccttctcaggagtgtccaacattttcagcttctggggggacagtcggggccgccagtaccaggagctccctcgatgccccgcccccacccccagcctcctcaacatccccctctccagcccgggtcggcggccccggggcgacgtggagagcaggctggatgccctccagcgccagctcaacaggctggagacccggctgagtgcagacatggccactgtcctgcagctgctacagaggcagatgacgctggtcccgcccgcctacagtgctgtgaccaccccggggcctggccccacttccacatccccgctgttgcccgtcagccccctccccaccctcaccttggactcgctttctcaggtttcccagttcatggcgtgtgaggagctgcccccgggggccccagagcttccccaagaaggccccacacgacgcctctccctaccgggccagctgggggccctcacctcccagcccctgcacagacacggctcggacccgggcagttagtggggctgcccagtgtggacacgtggctcacccagggatcaaggcgctgctgggccgctccccttggaggccctgctcaggaggccctgaccgtggaaggggagaggaactcgaaagcacagctcctcccccagcccttgggaccatcttctcctgcagtcccctgggccccagtgagaggggcaggggcagggccggcagtaggtggggcctgtggtccccccactgccctgagggcattagctggtctaactgcccggaggcacccggccctgggccttaggcacctcaaggacttttctgctatttactgctcttattgttaaggataataattaaggatcatatgaataattaatgaagatgctgatgactatgaataataaataattatcctgaggaga

SEQ ID NO: 419 - DNA, 3884 bp, Homo sapiens
  source 1..3884: mol_type = genomic DNA
  misc_feature 1..3884: note = cDNA of KCNH2 gene SNP c.206T>A (p.Leu69Gln)
atgccggtgcggaggggccacgtcgcgccgcagaacaccttcctggacaccatcatccgcaagtttgagggccagagccgtaagttcatcatcgccaacgctcgggtggagaactgcgccgtcatctactgcaacgacggcttctgcgagctgtgcggctactcgcgggccgaggtgatgcagcgaccctgcacctgcgacttccagcacgggccgcgcacgcagcgccgcgctgccgcgcagatcgcgcaggcactgctgggcgccgaggagcgcaaagtggaaatcgccttctaccggaaagatgggagctgcttcctatgtctggtggatgtggtgcccgtgaagaacgaggatggggctgtcatcatgttcatcctcaatttcgaggtggtgatggagaaggacatggtggggtccccggctcatgacaccaaccaccggggcccccccaccagctggctggccccaggccgcgccaagaccttccgcctgaagctgcccgcgctgctggcgctgacggcccgggagtcgtcggtgcggtcgggcggcgcgggcggcgcgggcgccccgggggccgtggtggtggacgtggacctgacgcccgcggcacccagcagcgagtcgctggccctggacgaagtgacagccatggacaaccacgtggcagggctcgggcccgcggaggagcggcgtgcgctggtgggtcccggctctccgccccgcagcgcgcccggccagctcccatcgccccgggcgcacagcctcaaccccgacgcctcgggctccagctgcagcctggcccggacgcgctcccgagaaagctgcgccagcgtgcgccgcgcctcgtcggccgacgacatcgaggccatgcgcgccggggtgctgcccccgccaccgcgccacgccagcaccggggccatgcacccactgcgcagcggcttgctcaactccacctcggactccgacctcgtgcgctaccgcaccattagcaagattccccaaatcaccctcaactttgtggacctcaagggcgaccccttcttggcttcgcccaccagtgaccgtgagatcatagcacctaagataaaggagcgaacccacaatgtcactgagaaggtcacccaggtcctgtccctgggcgccgacgtgctgcctgagtacaagctgcaggcaccgcgcatccaccgctggaccatcctgcattacagccccttcaaggccgtgtgggactggctcatcctgctgctggtcatctacacggctgtcttcacaccctactcggctgccttcctgctgaaggagacggaagaaggcccgcctgctaccgagtgtggctacgcctgccagccgctggctgtggtggacctcatcgtggacatcatgttcattgtggacatcctcatcaacttccgcaccacctacgtcaatgccaacgaggaggtggtcagccaccccggccgcatcgccgtccactacttcaagggctggttcctcatcgacatggtggccgccatccccttcgacctgctcatcttcggctctggctctgaggagctgatcgggctgctgaagactgcgcggctgctgcggctggtgcgcgtggcgcggaagctggatcgctactcagagtacggcgcggccgtgctgttcttgctcatgtgcacctttgcgctcatcgcgcactggctagcctgcatctggtacgccatcggcaacatggagcagccacacatggactcacgcatcggctggctgcacaacctgggcgaccagataggcaaaccctacaacagcagcggcctgggcggcccctccatcaaggacaagtatgtgacggcgctctacttcaccttcagcagcctcaccagtgtgggcttcggcaacgtctctcccaacaccaactcagagaagatcttctccatctgcgtcatgctcattggctccctcatgtatgctagcatcttcggcaacgtgtcggccatcatccagcggctgtactcgggcacagcccgctaccacacacagatgctgcgggtgcgggagttcatccgcttccaccagatccccaatcccctgcgccagcgcctcgaggagtacttccagcacgcctggtcctacaccaacggcatcgacatgaacgcggtgctgaagggcttccctgagtgcctgcaggctgacatctgcctgcacctgaaccgctcactgctgcagcactgcaaacccttccgaggggccaccaagggctgccttcgggccctggccatgaagttcaagaccacacatgcaccgccaggggacacactggtgcatgctggggacctgctcaccgccctgtacttcatctcccggggctccatcgagatcctgcggggcgacgtcgtcgtggccatcctggggaagaatgacatctttggggagcctctgaacctgtatgcaaggcctggcaagtcgaacggggatgtgcgggccctcacctactgtgacctacacaagatccatcgggacgacctgctggaggtgctggacatgtaccctgagttctccgaccacttctggtccagcctggagatcaccttcaacctgcgagataccaacatgatcccgggctcccccggcagtacggagttagagggtggcttcagtcggcaacgcaagcgcaagttgtccttccgcaggcgcacggacaaggacacggagcagccaggggaggtgtcggccttggggccgggccgggcgggggcagggccgagtagccggggccggccgggggggccgtggggggagagcccgtccagtggcccctccagccctgagagcagtgaggatgagggcccaggccgcagctccagccccctccgcctggtgcccttctccagccccaggccccccggagagccgccgggtggggagcccctgatggaggactgcgagaagagcagcgacacttgcaaccccctgtcaggcgccttctcaggagtgtccaacattttcagcttctggggggacagtcggggccgccagtaccaggagctccctcgatgccccgcccccacccccagcctcctcaacatccccctctccagcccgggtcggcggccccggggcgacgtggagagcaggctggatgccctccagcgccagctcaacaggctggagacccggctgagtgcagacatggccactgtcctgcagctgctacagaggcagatgacgctggtcccgcccgcctacagtgctgtgaccaccccggggcctggccccacttccacatccccgctgttgcccgtcagccccctccccaccctcaccttggactcgctttctcaggtttcccagttcatggcgtgtgaggagctgcccccgggggccccagagcttccccaagaaggccccacacgacgcctctccctaccgggccagctgggggccctcacctcccagcccctgcacagacacggctcggacccgggcagttagtggggctgcccagtgtggacacgtggctcacccagggatcaaggcgctgctgggccgctccccttggaggccctgctcaggaggccctgaccgtggaaggggagaggaactcgaaagcacagctcctcccccagcccttgggaccatcttctcctgcagtcccctgggccccagtgagaggggcaggggcagggccggcagtaggtggggcctgtggtccccccactgccctgagggcattagctggtctaactgcccggaggcacccggccctgggccttaggcacctcaaggacttttctgctatttactgctcttattgttaaggataataattaaggatcatatgaataattaatgaagatgctgatgactatgaataataaataattatcctgaggaga

SEQ ID NO: 420 - DNA, 3884 bp, Homo sapiens
  source 1..3884: mol_type = genomic DNA
  misc_feature 1..3884: note = cDNA of KCNH2 gene SNP c.206T>C (p.Leu69Pro)
atgccggtgcggaggggccacgtcgcgccgcagaacaccttcctggacaccatcatccgcaagtttgagggccagagccgtaagttcatcatcgccaacgctcgggtggagaactgcgccgtcatctactgcaacgacggcttctgcgagctgtgcggctactcgcgggccgaggtgatgcagcgaccctgcacctgcgacttcccgcacgggccgcgcacgcagcgccgcgctgccgcgcagatcgcgcaggcactgctgggcgccgaggagcgcaaagtggaaatcgccttctaccggaaagatgggagctgcttcctatgtctggtggatgtggtgcccgtgaagaacgaggatggggctgtcatcatgttcatcctcaatttcgaggtggtgatggagaaggacatggtggggtccccggctcatgacaccaaccaccggggcccccccaccagctggctggccccaggccgcgccaagaccttccgcctgaagctgcccgcgctgctggcgctgacggcccgggagtcgtcggtgcggtcgggcggcgcgggcggcgcgggcgccccgggggccgtggtggtggacgtggacctgacgcccgcggcacccagcagcgagtcgctggccctggacgaagtgacagccatggacaaccacgtggcagggctcgggcccgcggaggagcggcgtgcgctggtgggtcccggctctccgccccgcagcgcgcccggccagctcccatcgccccgggcgcacagcctcaaccccgacgcctcgggctccagctgcagcctggcccggacgcgctcccgagaaagctgcgccagcgtgcgccgcgcctcgtcggccgacgacatcgaggccatgcgcgccggggtgctgcccccgccaccgcgccacgccagcaccggggccatgcacccactgcgcagcggcttgctcaactccacctcggactccgacctcgtgcgctaccgcaccattagcaagattccccaaatcaccctcaactttgtggacctcaagggcgaccccttcttggcttcgcccaccagtgaccgtgagatcatagcacctaagataaaggagcgaacccacaatgtcactgagaaggtcacccaggtcctgtccctgggcgccgacgtgctgcctgagtacaagctgcaggcaccgcgcatccaccgctggaccatcctgcattacagccccttcaaggccgtgtgggactggctcatcctgctgctggtcatctacacggctgtcttcacaccctactcggctgccttcctgctgaaggagacggaagaaggcccgcctgctaccgagtgtggctacgcctgccagccgctggctgtggtggacctcatcgtggacatcatgttcattgtggacatcctcatcaacttccgcaccacctacgtcaatgccaacgaggaggtggtcagccaccccggccgcatcgccgtccactacttcaagggctggttcctcatcgacatggtggccgccatccccttcgacctgctcatcttcggctctggctctgaggagctgatcgggctgctgaagactgcgcggctgctgcggctggtgcgcgtggcgcggaagctggatcgctactcagagtacggcgcggccgtgctgttcttgctcatgtgcacctttgcgctcatcgcgcactggctagcctgcatctggtacgccatcggcaacatggagcagccacacatggactcacgcatcggctggctgcacaacctgggcgaccagataggcaaaccctacaacagcagcggcctgggcggcccctccatcaaggacaagtatgtgacggcgctctacttcaccttcagcagcctcaccagtgtgggcttcggcaacgtctctcccaacaccaactcagagaagatcttctccatctgcgtcatgctcattggctccctcatgtatgctagcatcttcggcaacgtgtcggccatcatccagcggctgtactcgggcacagcccgctaccacacacagatgctgcgggtgcgggagttcatccgcttccaccagatccccaatcccctgcgccagcgcctcgaggagtacttccagcacgcctggtcctacaccaacggcatcgacatgaacgcggtgctgaagggcttccctgagtgcctgcaggctgacatctgcctgcacctgaaccgctcactgctgcagcactgcaaacccttccgaggggccaccaagggctgccttcgggccctggccatgaagttcaagaccacacatgcaccgccaggggacacactggtgcatgctggggacctgctcaccgccctgtacttcatctcccggggctccatcgagatcctgcggggcgacgtcgtcgtggccatcctggggaagaatgacatctttggggagcctctgaacctgtatgcaaggcctggcaagtcgaacggggatgtgcgggccctcacctactgtgacctacacaagatccatcgggacgacctgctggaggtgctggacatgtaccctgagttctccgaccacttctggtccagcctggagatcaccttcaacctgcgagataccaacatgatcccgggctcccccggcagtacggagttagagggtggcttcagtcggcaacgcaagcgcaagttgtccttccgcaggcgcacggacaaggacacggagcagccaggggaggtgtcggccttggggccgggccgggcgggggcagggccgagtagccggggccggccgggggggccgtggggggagagcccgtccagtggcccctccagccctgagagcagtgaggatgagggcccaggccgcagctccagccccctccgcctggtgcccttctccagccccaggccccccggagagccgccgggtggggagcccctgatggaggactgcgagaagagcagcgacacttgcaaccccctgtcaggcgccttctcaggagtgtccaacattttcagcttctggggggacagtcggggccgccagtaccaggagctccctcgatgccccgcccccacccccagcctcctcaacatccccctctccagcccgggtcggcggccccggggcgacgtggagagcaggctggatgccctccagcgccagctcaacaggctggagacccggctgagtgcagacatggccactgtcctgcagctgctacagaggcagatgacgctggtcccgcccgcctacagtgctgtgaccaccccggggcctggccccacttccacatccccgctgttgcccgtcagccccctccccaccctcaccttggactcgctttctcaggtttcccagttcatggcgtgtgaggagctgcccccgggggccccagagcttccccaagaaggccccacacgacgcctctccctaccgggccagctgggggccctcacctcccagcccctgcacagacacggctcggacccgggcagttagtggggctgcccagtgtggacacgtggctcacccagggatcaaggcgctgctgggccgctccccttggaggccctgctcaggaggccctgaccgtggaaggggagaggaactcgaaagcacagctcctcccccagcccttgggaccatcttctcctgcagtcccctgggccccagtgagaggggcaggggcagggccggcagtaggtggggcctgtggtccccccactgccctgagggcattagctggtctaactgcccggaggcacccggccctgggccttaggcacctcaaggacttttctgctatttactgctcttattgttaaggataataattaaggatcatatgaataattaatgaagatgctgatgactatgaataataaataattatcctgaggaga

SEQ ID NO: 421 - DNA, 3884 bp, Homo sapiens
  source 1..3884: mol_type = genomic DNA
  misc_feature 1..3884: note = cDNA of KCNH2 gene SNP c.2078T>C (p.Leu693Pro)
atgccggtgcggaggggccacgtcgcgccgcagaacaccttcctggacaccatcatccgcaagtttgagggccagagccgtaagttcatcatcgccaacgctcgggtggagaactgcgccgtcatctactgcaacgacggcttctgcgagctgtgcggctactcgcgggccgaggtgatgcagcgaccctgcacctgcgacttcctgcacgggccgcgcacgcagcgccgcgctgccgcgcagatcgcgcaggcactgctgggcgccgaggagcgcaaagtggaaatcgccttctaccggaaagatgggagctgcttcctatgtctggtggatgtggtgcccgtgaagaacgaggatggggctgtcatcatgttcatcctcaatttcgaggtggtgatggagaaggacatggtggggtccccggctcatgacaccaaccaccggggcccccccaccagctggctggccccaggccgcgccaagaccttccgcctgaagctgcccgcgctgctggcgctgacggcccgggagtcgtcggtgcggtcgggcggcgcgggcggcgcgggcgccccgggggccgtggtggtggacgtggacctgacgcccgcggcacccagcagcgagtcgctggccctggacgaagtgacagccatggacaaccacgtggcagggctcgggcccgcggaggagcggcgtgcgctggtgggtcccggctctccgccccgcagcgcgcccggccagctcccatcgccccgggcgcacagcctcaaccccgacgcctcgggctccagctgcagcctggcccggacgcgctcccgagaaagctgcgccagcgtgcgccgcgcctcgtcggccgacgacatcgaggccatgcgcgccggggtgctgcccccgccaccgcgccacgccagcaccggggccatgcacccactgcgcagcggcttgctcaactccacctcggactccgacctcgtgcgctaccgcaccattagcaagattccccaaatcaccctcaactttgtggacctcaagggcgaccccttcttggcttcgcccaccagtgaccgtgagatcatagcacctaagataaaggagcgaacccacaatgtcactgagaaggtcacccaggtcctgtccctgggcgccgacgtgctgcctgagtacaagctgcaggcaccgcgcatccaccgctggaccatcctgcattacagccccttcaaggccgtgtgggactggctcatcctgctgctggtcatctacacggctgtcttcacaccctactcggctgccttcctgctgaaggagacggaagaaggcccgcctgctaccgagtgtggctacgcctgccagccgctggctgtggtggacctcatcgtggacatcatgttcattgtggacatcctcatcaacttccgcaccacctacgtcaatgccaacgaggaggtggtcagccaccccggccgcatcgccgtccactacttcaagggctggttcctcatcgacatggtggccgccatccccttcgacctgctcatcttcggctctggctctgaggagctgatcgggctgctgaagactgcgcggctgctgcggctggtgcgcgtggcgcggaagctggatcgctactcagagtacggcgcggccgtgctgttcttgctcatgtgcacctttgcgctcatcgcgcactggctagcctgcatctggtacgccatcggcaacatggagcagccacacatggactcacgcatcggctggctgcacaacctgggcgaccagataggcaaaccctacaacagcagcggcctgggcggcccctccatcaaggacaagtatgtgacggcgctctacttcaccttcagcagcctcaccagtgtgggcttcggcaacgtctctcccaacaccaactcagagaagatcttctccatctgcgtcatgctcattggctccctcatgtatgctagcatcttcggcaacgtgtcggccatcatccagcggctgtactcgggcacagcccgctaccacacacagatgctgcgggtgcgggagttcatccgcttccaccagatccccaatcccccgcgccagcgcctcgaggagtacttccagcacgcctggtcctacaccaacggcatcgacatgaacgcggtgctgaagggcttccctgagtgcctgcaggctgacatctgcctgcacctgaaccgctcactgctgcagcactgcaaacccttccgaggggccaccaagggctgccttcgggccctggccatgaagttcaagaccacacatgcaccgccaggggacacactggtgcatgctggggacctgctcaccgccctgtacttcatctcccggggctccatcgagatcctgcggggcgacgtcgtcgtggccatcctggggaagaatgacatctttggggagcctctgaacctgtatgcaaggcctggcaagtcgaacggggatgtgcgggccctcacctactgtgacctacacaagatccatcgggacgacctgctggaggtgctggacatgtaccctgagttctccgaccacttctggtccagcctggagatcaccttcaacctgcgagataccaacatgatcccgggctcccccggcagtacggagttagagggtggcttcagtcggcaacgcaagcgcaagttgtccttccgcaggcgcacggacaaggacacggagcagccaggggaggtgtcggccttggggccgggccgggcgggggcagggccgagtagccggggccggccgggggggccgtggggggagagcccgtccagtggcccctccagccctgagagcagtgaggatgagggcccaggccgcagctccagccccctccgcctggtgcccttctccagccccaggccccccggagagccgccgggtggggagcccctgatggaggactgcgagaagagcagcgacacttgcaaccccctgtcaggcgccttctcaggagtgtccaacattttcagcttctggggggacagtcggggccgccagtaccaggagctccctcgatgccccgcccccacccccagcctcctcaacatccccctctccagcccgggtcggcggccccggggcgacgtggagagcaggctggatgccctccagcgccagctcaacaggctggagacccggctgagtgcagacatggccactgtcctgcagctgctacagaggcagatgacgctggtcccgcccgcctacagtgctgtgaccaccccggggcctggccccacttccacatccccgctgttgcccgtcagccccctccccaccctcaccttggactcgctttctcaggtttcccagttcatggcgtgtgaggagctgcccccgggggccccagagcttccccaagaaggccccacacgacgcctctccctaccgggccagctgggggccctcacctcccagcccctgcacagacacggctcggacccgggcagttagtggggctgcccagtgtggacacgtggctcacccagggatcaaggcgctgctgggccgctccccttggaggccctgctcaggaggccctgaccgtggaaggggagaggaactcgaaagcacagctcctcccccagcccttgggaccatcttctcctgcagtcccctgggccccagtgagaggggcaggggcagggccggcagtaggtggggcctgtggtccccccactgccctgagggcattagctggtctaactgcccggaggcacccggccctgggccttaggcacctcaaggacttttctgctatttactgctcttattgttaaggataataattaaggatcatatgaataattaatgaagatgctgatgactatgaataataaataattatcctgaggaga

SEQ ID NO: 422 - DNA, 3884 bp, Homo sapiens
  source 1..3884: mol_type = genomic DNA
  misc_feature 1..3884: note = cDNA of KCNH2 gene SNP c.2080C>T (p.Arg694Cys)
atgccggtgcggaggggccacgtcgcgccgcagaacaccttcctggacaccatcatccgcaagtttgagggccagagccgtaagttcatcatcgccaacgctcgggtggagaactgcgccgtcatctactgcaacgacggcttctgcgagctgtgcggctactcgcgggccgaggtgatgcagcgaccctgcacctgcgacttcctgcacgggccgcgcacgcagcgccgcgctgccgcgcagatcgcgcaggcactgctgggcgccgaggagcgcaaagtggaaatcgccttctaccggaaagatgggagctgcttcctatgtctggtggatgtggtgcccgtgaagaacgaggatggggctgtcatcatgttcatcctcaatttcgaggtggtgatggagaaggacatggtggggtccccggctcatgacaccaaccaccggggcccccccaccagctggctggccccaggccgcgccaagaccttccgcctgaagctgcccgcgctgctggcgctgacggcccgggagtcgtcggtgcggtcgggcggcgcgggcggcgcgggcgccccgggggccgtggtggtggacgtggacctgacgcccgcggcacccagcagcgagtcgctggccctggacgaagtgacagccatggacaaccacgtggcagggctcgggcccgcggaggagcggcgtgcgctggtgggtcccggctctccgccccgcagcgcgcccggccagctcccatcgccccgggcgcacagcctcaaccccgacgcctcgggctccagctgcagcctggcccggacgcgctcccgagaaagctgcgccagcgtgcgccgcgcctcgtcggccgacgacatcgaggccatgcgcgccggggtgctgcccccgccaccgcgccacgccagcaccggggccatgcacccactgcgcagcggcttgctcaactccacctcggactccgacctcgtgcgctaccgcaccattagcaagattccccaaatcaccctcaactttgtggacctcaagggcgaccccttcttggcttcgcccaccagtgaccgtgagatcatagcacctaagataaaggagcgaacccacaatgtcactgagaaggtcacccaggtcctgtccctgggcgccgacgtgctgcctgagtacaagctgcaggcaccgcgcatccaccgctggaccatcctgcattacagccccttcaaggccgtgtgggactggctcatcctgctgctggtcatctacacggctgtcttcacaccctactcggctgccttcctgctgaaggagacggaagaaggcccgcctgctaccgagtgtggctacgcctgccagccgctggctgtggtggacctcatcgtggacatcatgttcattgtggacatcctcatcaacttccgcaccacctacgtcaatgccaacgaggaggtggtcagccaccccggccgcatcgccgtccactacttcaagggctggttcctcatcgacatggtggccgccatccccttcgacctgctcatcttcggctctggctctgaggagctgatcgggctgctgaagactgcgcggctgctgcggctggtgcgcgtggcgcggaagctggatcgctactcagagtacggcgcggccgtgctgttcttgctcatgtgcacctttgcgctcatcgcgcactggctagcctgcatctggtacgccatcggcaacatggagcagccacacatggactcacgcatcggctggctgcacaacctgggcgaccagataggcaaaccctacaacagcagcggcctgggcggcccctccatcaaggacaagtatgtgacggcgctctacttcaccttcagcagcctcaccagtgtgggcttcggcaacgtctctcccaacaccaactcagagaagatcttctccatctgcgtcatgctcattggctccctcatgtatgctagcatcttcggcaacgtgtcggccatcatccagcggctgtactcgggcacagcccgctaccacacacagatgctgcgggtgcgggagttcatccgcttccaccagatccccaatcccctgtgccagcgcctcgaggagtacttccagcacgcctggtcctacaccaacggcatcgacatgaacgcggtgctgaagggcttccctgagtgcctgcaggctgacatctgcctgcacctgaaccgctcactgctgcagcactgcaaacccttccgaggggccaccaagggctgccttcgggccctggccatgaagttcaagaccacacatgcaccgccaggggacacactggtgcatgctggggacctgctcaccgccctgtacttcatctcccggggctccatcgagatcctgcggggcgacgtcgtcgtggccatcctggggaagaatgacatctttggggagcctctgaacctgtatgcaaggcctggcaagtcgaacggggatgtgcgggccctcacctactgtgacctacacaagatccatcgggacgacctgctggaggtgctggacatgtaccctgagttctccgaccacttctggtccagcctggagatcaccttcaacctgcgagataccaacatgatcccgggctcccccggcagtacggagttagagggtggcttcagtcggcaacgcaagcgcaagttgtccttccgcaggcgcacggacaaggacacggagcagccaggggaggtgtcggccttggggccgggccgggcgggggcagggccgagtagccggggccggccgggggggccgtggggggagagcccgtccagtggcccctccagccctgagagcagtgaggatgagggcccaggccgcagctccagccccctccgcctggtgcccttctccagccccaggccccccggagagccgccgggtggggagcccctgatggaggactgcgagaagagcagcgacacttgcaaccccctgtcaggcgccttctcaggagtgtccaacattttcagcttctggggggacagtcggggccgccagtaccaggagctccctcgatgccccgcccccacccccagcctcctcaacatccccctctccagcccgggtcggcggccccggggcgacgtggagagcaggctggatgccctccagcgccagctcaacaggctggagacccggctgagtgcagacatggccactgtcctgcagctgctacagaggcagatgacgctggtcccgcccgcctacagtgctgtgaccaccccggggcctggccccacttccacatccccgctgttgcccgtcagccccctccccaccctcaccttggactcgctttctcaggtttcccagttcatggcgtgtgaggagctgcccccgggggccccagagcttccccaagaaggccccacacgacgcctctccctaccgggccagctgggggccctcacctcccagcccctgcacagacacggctcggacccgggcagttagtggggctgcccagtgtggacacgtggctcacccagggatcaaggcgctgctgggccgctccccttggaggccctgctcaggaggccctgaccgtggaaggggagaggaactcgaaagcacagctcctcccccagcccttgggaccatcttctcctgcagtcccctgggccccagtgagaggggcaggggcagggccggcagtaggtggggcctgtggtccccccactgccctgagggcattagctggtctaactgcccggaggcacccggccctgggccttaggcacctcaaggacttttctgctatttactgctcttattgttaaggataataattaaggatcatatgaataattaatgaagatgctgatgactatgaataataaataattatcctgaggaga

SEQ ID NO: 423 - DNA, 3884 bp, Homo sapiens
  source 1..3884: mol_type = genomic DNA
  misc_feature 1..3884: note = cDNA of KCNH2 gene SNP c.2081G>A (p.Arg694His)
atgccggtgcggaggggccacgtcgcgccgcagaacaccttcctggacaccatcatccgcaagtttgagggccagagccgtaagttcatcatcgccaacgctcgggtggagaactgcgccgtcatctactgcaacgacggcttctgcgagctgtgcggctactcgcgggccgaggtgatgcagcgaccctgcacctgcgacttcctgcacgggccgcgcacgcagcgccgcgctgccgcgcagatcgcgcaggcactgctgggcgccgaggagcgcaaagtggaaatcgccttctaccggaaagatgggagctgcttcctatgtctggtggatgtggtgcccgtgaagaacgaggatggggctgtcatcatgttcatcctcaatttcgaggtggtgatggagaaggacatggtggggtccccggctcatgacaccaaccaccggggcccccccaccagctggctggccccaggccgcgccaagaccttccgcctgaagctgcccgcgctgctggcgctgacggcccgggagtcgtcggtgcggtcgggcggcgcgggcggcgcgggcgccccgggggccgtggtggtggacgtggacctgacgcccgcggcacccagcagcgagtcgctggccctggacgaagtgacagccatggacaaccacgtggcagggctcgggcccgcggaggagcggcgtgcgctggtgggtcccggctctccgccccgcagcgcgcccggccagctcccatcgccccgggcgcacagcctcaaccccgacgcctcgggctccagctgcagcctggcccggacgcgctcccgagaaagctgcgccagcgtgcgccgcgcctcgtcggccgacgacatcgaggccatgcgcgccggggtgctgcccccgccaccgcgccacgccagcaccggggccatgcacccactgcgcagcggcttgctcaactccacctcggactccgacctcgtgcgctaccgcaccattagcaagattccccaaatcaccctcaactttgtggacctcaagggcgaccccttcttggcttcgcccaccagtgaccgtgagatcatagcacctaagataaaggagcgaacccacaatgtcactgagaaggtcacccaggtcctgtccctgggcgccgacgtgctgcctgagtacaagctgcaggcaccgcgcatccaccgctggaccatcctgcattacagccccttcaaggccgtgtgggactggctcatcctgctgctggtcatctacacggctgtcttcacaccctactcggctgccttcctgctgaaggagacggaagaaggcccgcctgctaccgagtgtggctacgcctgccagccgctggctgtggtggacctcatcgtggacatcatgttcattgtggacatcctcatcaacttccgcaccacctacgtcaatgccaacgaggaggtggtcagccaccccggccgcatcgccgtccactacttcaagggctggttcctcatcgacatggtggccgccatccccttcgacctgctcatcttcggctctggctctgaggagctgatcgggctgctgaagactgcgcggctgctgcggctggtgcgcgtggcgcggaagctggatcgctactcagagtacggcgcggccgtgctgttcttgctcatgtgcacctttgcgctcatcgcgcactggctagcctgcatctggtacgccatcggcaacatggagcagccacacatggactcacgcatcggctggctgcacaacctgggcgaccagataggcaaaccctacaacagcagcggcctgggcggcccctccatcaaggacaagtatgtgacggcgctctacttcaccttcagcagcctcaccagtgtgggcttcggcaacgtctctcccaacaccaactcagagaagatcttctccatctgcgtcatgctcattggctccctcatgtatgctagcatcttcggcaacgtgtcggccatcatccagcggctgtactcgggcacagcccgctaccacacacagatgctgcgggtgcgggagttcatccgcttccaccagatccccaatcccctgcaccagcgcctcgaggagtacttccagcacgcctggtcctacaccaacggcatcgacatgaacgcggtgctgaagggcttccctgagtgcctgcaggctgacatctgcctgcacctgaaccgctcactgctgcagcactgcaaacccttccgaggggccaccaagggctgccttcgggccctggccatgaagttcaagaccacacatgcaccgccaggggacacactggtgcatgctggggacctgctcaccgccctgtacttcatctcccggggctccatcgagatcctgcggggcgacgtcgtcgtggccatcctggggaagaatgacatctttggggagcctctgaacctgtatgcaaggcctggcaagtcgaacggggatgtgcgggccctcacctactgtgacctacacaagatccatcgggacgacctgctggaggtgctggacatgtaccctgagttctccgaccacttctggtccagcctggagatcaccttcaacctgcgagataccaacatgatcccgggctcccccggcagtacggagttagagggtggcttcagtcggcaacgcaagcgcaagttgtccttccgcaggcgcacggacaaggacacggagcagccaggggaggtgtcggccttggggccgggccgggcgggggcagggccgagtagccggggccggccgggggggccgtggggggagagcccgtccagtggcccctccagccctgagagcagtgaggatgagggcccaggccgcagctccagccccctccgcctggtgcccttctccagccccaggccccccggagagccgccgggtggggagcccctgatggaggactgcgagaagagcagcgacacttgcaaccccctgtcaggcgccttctcaggagtgtccaacattttcagcttctggggggacagtcggggccgccagtaccaggagctccctcgatgccccgcccccacccccagcctcctcaacatccccctctccagcccgggtcggcggccccggggcgacgtggagagcaggctggatgccctccagcgccagctcaacaggctggagacccggctgagtgcagacatggccactgtcctgcagctgctacagaggcagatgacgctggtcccgcccgcctacagtgctgtgaccaccccggggcctggccccacttccacatccccgctgttgcccgtcagccccctccccaccctcaccttggactcgctttctcaggtttcccagttcatggcgtgtgaggagctgcccccgggggccccagagcttccccaagaaggccccacacgacgcctctccctaccgggccagctgggggccctcacctcccagcccctgcacagacacggctcggacccgggcagttagtggggctgcccagtgtggacacgtggctcacccagggatcaaggcgctgctgggccgctccccttggaggccctgctcaggaggccctgaccgtggaaggggagaggaactcgaaagcacagctcctcccccagcccttgggaccatcttctcctgcagtcccctgggccccagtgagaggggcaggggcagggccggcagtaggtggggcctgtggtccccccactgccctgagggcattagctggtctaactgcccggaggcacccggccctgggccttaggcacctcaaggacttttctgctatttactgctcttattgttaaggataataattaaggatcatatgaataattaatgaagatgctgatgactatgaataataaataattatcctgaggaga

SEQ ID NO: 424 - DNA, 3884 bp, Homo sapiens
  source 1..3884: mol_type = genomic DNA
  misc_feature 1..3884: note = cDNA of KCNH2 gene SNP c.2083C>T (p.Gln695Ter)
atgccggtgcggaggggccacgtcgcgccgcagaacaccttcctggacaccatcatccgcaagtttgagggccagagccgtaagttcatcatcgccaacgctcgggtggagaactgcgccgtcatctactgcaacgacggcttctgcgagctgtgcggctactcgcgggccgaggtgatgcagcgaccctgcacctgcgacttcctgcacgggccgcgcacgcagcgccgcgctgccgcgcagatcgcgcaggcactgctgggcgccgaggagcgcaaagtggaaatcgccttctaccggaaagatgggagctgcttcctatgtctggtggatgtggtgcccgtgaagaacgaggatggggctgtcatcatgttcatcctcaatttcgaggtggtgatggagaaggacatggtggggtccccggctcatgacaccaaccaccggggcccccccaccagctggctggccccaggccgcgccaagaccttccgcctgaagctgcccgcgctgctggcgctgacggcccgggagtcgtcggtgcggtcgggcggcgcgggcggcgcgggcgccccgggggccgtggtggtggacgtggacctgacgcccgcggcacccagcagcgagtcgctggccctggacgaagtgacagccatggacaaccacgtggcagggctcgggcccgcggaggagcggcgtgcgctggtgggtcccggctctccgccccgcagcgcgcccggccagctcccatcgccccgggcgcacagcctcaaccccgacgcctcgggctccagctgcagcctggcccggacgcgctcccgagaaagctgcgccagcgtgcgccgcgcctcgtcggccgacgacatcgaggccatgcgcgccggggtgctgcccccgccaccgcgccacgccagcaccggggccatgcacccactgcgcagcggcttgctcaactccacctcggactccgacctcgtgcgctaccgcaccattagcaagattccccaaatcaccctcaactttgtggacctcaagggcgaccccttcttggcttcgcccaccagtgaccgtgagatcatagcacctaagataaaggagcgaacccacaatgtcactgagaaggtcacccaggtcctgtccctgggcgccgacgtgctgcctgagtacaagctgcaggcaccgcgcatccaccgctggaccatcctgcattacagccccttcaaggccgtgtgggactggctcatcctgctgctggtcatctacacggctgtcttcacaccctactcggctgccttcctgctgaaggagacggaagaaggcccgcctgctaccgagtgtggctacgcctgccagccgctggctgtggtggacctcatcgtggacatcatgttcattgtggacatcctcatcaacttccgcaccacctacgtcaatgccaacgaggaggtggtcagccaccccggccgcatcgccgtccactacttcaagggctggttcctcatcgacatggtggccgccatccccttcgacctgctcatcttcggctctggctctgaggagctgatcgggctgctgaagactgcgcggctgctgcggctggtgcgcgtggcgcggaagctggatcgctactcagagtacggcgcggccgtgctgttcttgctcatgtgcacctttgcgctcatcgcgcactggctagcctgcatctggtacgccatcggcaacatggagcagccacacatggactcacgcatcggctggctgcacaacctgggcgaccagataggcaaaccctacaacagcagcggcctgggcggcccctccatcaaggacaagtatgtgacggcgctctacttcaccttcagcagcctcaccagtgtgggcttcggcaacgtctctcccaacaccaactcagagaagatcttctccatctgcgtcatgctcattggctccctcatgtatgctagcatcttcggcaacgtgtcggccatcatccagcggctgtactcgggcacagcccgctaccacacacagatgctgcgggtgcgggagttcatccgcttccaccagatccccaatcccctgcgctagcgcctcgaggagtacttccagcacgcctggtcctacaccaacggcatcgacatgaacgcggtgctgaagggcttccctgagtgcctgcaggctgacatctgcctgcacctgaaccgctcactgctgcagcactgcaaacccttccgaggggccaccaagggctgccttcgggccctggccatgaagttcaagaccacacatgcaccgccaggggacacactggtgcatgctggggacctgctcaccgccctgtacttcatctcccggggctccatcgagatcctgcggggcgacgtcgtcgtggccatcctggggaagaatgacatctttggggagcctctgaacctgtatgcaaggcctggcaagtcgaacggggatgtgcgggccctcacctactgtgacctacacaagatccatcgggacgacctgctggaggtgctggacatgtaccctgagttctccgaccacttctggtccagcctggagatcaccttcaacctgcgagataccaacatgatcccgggctcccccggcagtacggagttagagggtggcttcagtcggcaacgcaagcgcaagttgtccttccgcaggcgcacggacaaggacacggagcagccaggggaggtgtcggccttggggccgggccgggcgggggcagggccgagtagccggggccggccgggggggccgtggggggagagcccgtccagtggcccctccagccctgagagcagtgaggatgagggcccaggccgcagctccagccccctccgcctggtgcccttctccagccccaggccccccggagagccgccgggtggggagcccctgatggaggactgcgagaagagcagcgacacttgcaaccccctgtcaggcgccttctcaggagtgtccaacattttcagcttctggggggacagtcggggccgccagtaccaggagctccctcgatgccccgcccccacccccagcctcctcaacatccccctctccagcccgggtcggcggccccggggcgacgtggagagcaggctggatgccctccagcgccagctcaacaggctggagacccggctgagtgcagacatggccactgtcctgcagctgctacagaggcagatgacgctggtcccgcccgcctacagtgctgtgaccaccccggggcctggccccacttccacatccccgctgttgcccgtcagccccctccccaccctcaccttggactcgctttctcaggtttcccagttcatggcgtgtgaggagctgcccccgggggccccagagcttccccaagaaggccccacacgacgcctctccctaccgggccagctgggggccctcacctcccagcccctgcacagacacggctcggacccgggcagttagtggggctgcccagtgtggacacgtggctcacccagggatcaaggcgctgctgggccgctccccttggaggccctgctcaggaggccctgaccgtggaaggggagaggaactcgaaagcacagctcctcccccagcccttgggaccatcttctcctgcagtcccctgggccccagtgagaggggcaggggcagggccggcagtaggtggggcctgtggtccccccactgccctgagggcattagctggtctaactgcccggaggcacccggccctgggccttaggcacctcaaggacttttctgctatttactgctcttattgttaaggataataattaaggatcatatgaataattaatgaagatgctgatgactatgaataataaataattatcctgaggaga

SEQ ID NO: 425 - DNA, 3884 bp, Homo sapiens
  source 1..3884: mol_type = genomic DNA
  misc_feature 1..3884: note = cDNA of KCNH2 gene SNP c.2086C>T (p.Arg696Cys)
atgccggtgcggaggggccacgtcgcgccgcagaacaccttcctggacaccatcatccgcaagtttgagggccagagccgtaagttcatcatcgccaacgctcgggtggagaactgcgccgtcatctactgcaacgacggcttctgcgagctgtgcggctactcgcgggccgaggtgatgcagcgaccctgcacctgcgacttcctgcacgggccgcgcacgcagcgccgcgctgccgcgcagatcgcgcaggcactgctgggcgccgaggagcgcaaagtggaaatcgccttctaccggaaagatgggagctgcttcctatgtctggtggatgtggtgcccgtgaagaacgaggatggggctgtcatcatgttcatcctcaatttcgaggtggtgatggagaaggacatggtggggtccccggctcatgacaccaaccaccggggcccccccaccagctggctggccccaggccgcgccaagaccttccgcctgaagctgcccgcgctgctggcgctgacggcccgggagtcgtcggtgcggtcgggcggcgcgggcggcgcgggcgccccgggggccgtggtggtggacgtggacctgacgcccgcggcacccagcagcgagtcgctggccctggacgaagtgacagccatggacaaccacgtggcagggctcgggcccgcggaggagcggcgtgcgctggtgggtcccggctctccgccccgcagcgcgcccggccagctcccatcgccccgggcgcacagcctcaaccccgacgcctcgggctccagctgcagcctggcccggacgcgctcccgagaaagctgcgccagcgtgcgccgcgcctcgtcggccgacgacatcgaggccatgcgcgccggggtgctgcccccgccaccgcgccacgccagcaccggggccatgcacccactgcgcagcggcttgctcaactccacctcggactccgacctcgtgcgctaccgcaccattagcaagattccccaaatcaccctcaactttgtggacctcaagggcgaccccttcttggcttcgcccaccagtgaccgtgagatcatagcacctaagataaaggagcgaacccacaatgtcactgagaaggtcacccaggtcctgtccctgggcgccgacgtgctgcctgagtacaagctgcaggcaccgcgcatccaccgctggaccatcctgcattacagccccttcaaggccgtgtgggactggctcatcctgctgctggtcatctacacggctgtcttcacaccctactcggctgccttcctgctgaaggagacggaagaaggcccgcctgctaccgagtgtggctacgcctgccagccgctggctgtggtggacctcatcgtggacatcatgttcattgtggacatcctcatcaacttccgcaccacctacgtcaatgccaacgaggaggtggtcagccaccccggccgcatcgccgtccactacttcaagggctggttcctcatcgacatggtggccgccatccccttcgacctgctcatcttcggctctggctctgaggagctgatcgggctgctgaagactgcgcggctgctgcggctggtgcgcgtggcgcggaagctggatcgctactcagagtacggcgcggccgtgctgttcttgctcatgtgcacctttgcgctcatcgcgcactggctagcctgcatctggtacgccatcggcaacatggagcagccacacatggactcacgcatcggctggctgcacaacctgggcgaccagataggcaaaccctacaacagcagcggcctgggcggcccctccatcaaggacaagtatgtgacggcgctctacttcaccttcagcagcctcaccagtgtgggcttcggcaacgtctctcccaacaccaactcagagaagatcttctccatctgcgtcatgctcattggctccctcatgtatgctagcatcttcggcaacgtgtcggccatcatccagcggctgtactcgggcacagcccgctaccacacacagatgctgcgggtgcgggagttcatccgcttccaccagatccccaatcccctgcgccagtgcctcgaggagtacttccagcacgcctggtcctacaccaacggcatcgacatgaacgcggtgctgaagggcttccctgagtgcctgcaggctgacatctgcctgcacctgaaccgctcactgctgcagcactgcaaacccttccgaggggccaccaagggctgccttcgggccctggccatgaagttcaagaccacacatgcaccgccaggggacacactggtgcatgctggggacctgctcaccgccctgtacttcatctcccggggctccatcgagatcctgcggggcgacgtcgtcgtggccatcctggggaagaatgacatctttggggagcctctgaacctgtatgcaaggcctggcaagtcgaacggggatgtgcgggccctcacctactgtgacctacacaagatccatcgggacgacctgctggaggtgctggacatgtaccctgagttctccgaccacttctggtccagcctggagatcaccttcaacctgcgagataccaacatgatcccgggctcccccggcagtacggagttagagggtggcttcagtcggcaacgcaagcgcaagttgtccttccgcaggcgcacggacaaggacacggagcagccaggggaggtgtcggccttggggccgggccgggcgggggcagggccgagtagccggggccggccgggggggccgtggggggagagcccgtccagtggcccctccagccctgagagcagtgaggatgagggcccaggccgcagctccagccccctccgcctggtgcccttctccagccccaggccccccggagagccgccgggtggggagcccctgatggaggactgcgagaagagcagcgacacttgcaaccccctgtcaggcgccttctcaggagtgtccaacattttcagcttctggggggacagtcggggccgccagtaccaggagctccctcgatgccccgcccccacccccagcctcctcaacatccccctctccagcccgggtcggcggccccggggcgacgtggagagcaggctggatgccctccagcgccagctcaacaggctggagacccggctgagtgcagacatggccactgtcctgcagctgctacagaggcagatgacgctggtcccgcccgcctacagtgctgtgaccaccccggggcctggccccacttccacatccccgctgttgcccgtcagccccctccccaccctcaccttggactcgctttctcaggtttcccagttcatggcgtgtgaggagctgcccccgggggccccagagcttccccaagaaggccccacacgacgcctctccctaccgggccagctgggggccctcacctcccagcccctgcacagacacggctcggacccgggcagttagtggggctgcccagtgtggacacgtggctcacccagggatcaaggcgctgctgggccgctccccttggaggccctgctcaggaggccctgaccgtggaaggggagaggaactcgaaagcacagctcctcccccagcccttgggaccatcttctcctgcagtcccctgggccccagtgagaggggcaggggcagggccggcagtaggtggggcctgtggtccccccactgccctgagggcattagctggtctaactgcccggaggcacccggccctgggccttaggcacctcaaggacttttctgctatttactgctcttattgttaaggataataattaaggatcatatgaataattaatgaagatgctgatgactatgaataataaataattatcctgaggaga

SEQ ID NO: 426 - DNA, 3884 bp, Homo sapiens
  source 1..3884: mol_type = genomic DNA
  misc_feature 1..3884: note = cDNA of KCNH2 gene SNP c.2087G>C (p.Arg696Pro)
atgccggtgcggaggggccacgtcgcgccgcagaacaccttcctggacaccatcatccgcaagtttgagggccagagccgtaagttcatcatcgccaacgctcgggtggagaactgcgccgtcatctactgcaacgacggcttctgcgagctgtgcggctactcgcgggccgaggtgatgcagcgaccctgcacctgcgacttcctgcacgggccgcgcacgcagcgccgcgctgccgcgcagatcgcgcaggcactgctgggcgccgaggagcgcaaagtggaaatcgccttctaccggaaagatgggagctgcttcctatgtctggtggatgtggtgcccgtgaagaacgaggatggggctgtcatcatgttcatcctcaatttcgaggtggtgatggagaaggacatggtggggtccccggctcatgacaccaaccaccggggcccccccaccagctggctggccccaggccgcgccaagaccttccgcctgaagctgcccgcgctgctggcgctgacggcccgggagtcgtcggtgcggtcgggcggcgcgggcggcgcgggcgccccgggggccgtggtggtggacgtggacctgacgcccgcggcacccagcagcgagtcgctggccctggacgaagtgacagccatggacaaccacgtggcagggctcgggcccgcggaggagcggcgtgcgctggtgggtcccggctctccgccccgcagcgcgcccggccagctcccatcgccccgggcgcacagcctcaaccccgacgcctcgggctccagctgcagcctggcccggacgcgctcccgagaaagctgcgccagcgtgcgccgcgcctcgtcggccgacgacatcgaggccatgcgcgccggggtgctgcccccgccaccgcgccacgccagcaccggggccatgcacccactgcgcagcggcttgctcaactccacctcggactccgacctcgtgcgctaccgcaccattagcaagattccccaaatcaccctcaactttgtggacctcaagggcgaccccttcttggcttcgcccaccagtgaccgtgagatcatagcacctaagataaaggagcgaacccacaatgtcactgagaaggtcacccaggtcctgtccctgggcgccgacgtgctgcctgagtacaagctgcaggcaccgcgcatccaccgctggaccatcctgcattacagccccttcaaggccgtgtgggactggctcatcctgctgctggtcatctacacggctgtcttcacaccctactcggctgccttcctgctgaaggagacggaagaaggcccgcctgctaccgagtgtggctacgcctgccagccgctggctgtggtggacctcatcgtggacatcatgttcattgtggacatcctcatcaacttccgcaccacctacgtcaatgccaacgaggaggtggtcagccaccccggccgcatcgccgtccactacttcaagggctggttcctcatcgacatggtggccgccatccccttcgacctgctcatcttcggctctggctctgaggagctgatcgggctgctgaagactgcgcggctgctgcggctggtgcgcgtggcgcggaagctggatcgctactcagagtacggcgcggccgtgctgttcttgctcatgtgcacctttgcgctcatcgcgcactggctagcctgcatctggtacgccatcggcaacatggagcagccacacatggactcacgcatcggctggctgcacaacctgggcgaccagataggcaaaccctacaacagcagcggcctgggcggcccctccatcaaggacaagtatgtgacggcgctctacttcaccttcagcagcctcaccagtgtgggcttcggcaacgtctctcccaacaccaactcagagaagatcttctccatctgcgtcatgctcattggctccctcatgtatgctagcatcttcggcaacgtgtcggccatcatccagcggctgtactcgggcacagcccgctaccacacacagatgctgcgggtgcgggagttcatccgcttccaccagatccccaatcccctgcgccagcccctcgaggagtacttccagcacgcctggtcctacaccaacggcatcgacatgaacgcggtgctgaagggcttccctgagtgcctgcaggctgacatctgcctgcacctgaaccgctcactgctgcagcactgcaaacccttccgaggggccaccaagggctgccttcgggccctggccatgaagttcaagaccacacatgcaccgccaggggacacactggtgcatgctggggacctgctcaccgccctgtacttcatctcccggggctccatcgagatcctgcggggcgacgtcgtcgtggccatcctggggaagaatgacatctttggggagcctctgaacctgtatgcaaggcctggcaagtcgaacggggatgtgcgggccctcacctactgtgacctacacaagatccatcgggacgacctgctggaggtgctggacatgtaccctgagttctccgaccacttctggtccagcctggagatcaccttcaacctgcgagataccaacatgatcccgggctcccccggcagtacggagttagagggtggcttcagtcggcaacgcaagcgcaagttgtccttccgcaggcgcacggacaaggacacggagcagccaggggaggtgtcggccttggggccgggccgggcgggggcagggccgagtagccggggccggccgggggggccgtggggggagagcccgtccagtggcccctccagccctgagagcagtgaggatgagggcccaggccgcagctccagccccctccgcctggtgcccttctccagccccaggccccccggagagccgccgggtggggagcccctgatggaggactgcgagaagagcagcgacacttgcaaccccctgtcaggcgccttctcaggagtgtccaacattttcagcttctggggggacagtcggggccgccagtaccaggagctccctcgatgccccgcccccacccccagcctcctcaacatccccctctccagcccgggtcggcggccccggggcgacgtggagagcaggctggatgccctccagcgccagctcaacaggctggagacccggctgagtgcagacatggccactgtcctgcagctgctacagaggcagatgacgctggtcccgcccgcctacagtgctgtgaccaccccggggcctggccccacttccacatccccgctgttgcccgtcagccccctccccaccctcaccttggactcgctttctcaggtttcccagttcatggcgtgtgaggagctgcccccgggggccccagagcttccccaagaaggccccacacgacgcctctccctaccgggccagctgggggccctcacctcccagcccctgcacagacacggctcggacccgggcagttagtggggctgcccagtgtggacacgtggctcacccagggatcaaggcgctgctgggccgctccccttggaggccctgctcaggaggccctgaccgtggaaggggagaggaactcgaaagcacagctcctcccccagcccttgggaccatcttctcctgcagtcccctgggccccagtgagaggggcaggggcagggccggcagtaggtggggcctgtggtccccccactgccctgagggcattagctggtctaactgcccggaggcacccggccctgggccttaggcacctcaaggacttttctgctatttactgctcttattgttaaggataataattaaggatcatatgaataattaatgaagatgctgatgactatgaataataaataattatcctgaggaga

SEQ ID NO: 427 - DNA, 3884 bp, Homo sapiens
  source 1..3884: mol_type = genomic DNA
  misc_feature 1..3884: note = cDNA of KCNH2 gene SNP c.208C>A (p.His70Asn)
atgccggtgcggaggggccacgtcgcgccgcagaacaccttcctggacaccatcatccgcaagtttgagggccagagccgtaagttcatcatcgccaacgctcgggtggagaactgcgccgtcatctactgcaacgacggcttctgcgagctgtgcggctactcgcgggccgaggtgatgcagcgaccctgcacctgcgacttcctgaacgggccgcgcacgcagcgccgcgctgccgcgcagatcgcgcaggcactgctgggcgccgaggagcgcaaagtggaaatcgccttctaccggaaagatgggagctgcttcctatgtctggtggatgtggtgcccgtgaagaacgaggatggggctgtcatcatgttcatcctcaatttcgaggtggtgatggagaaggacatggtggggtccccggctcatgacaccaaccaccggggcccccccaccagctggctggccccaggccgcgccaagaccttccgcctgaagctgcccgcgctgctggcgctgacggcccgggagtcgtcggtgcggtcgggcggcgcgggcggcgcgggcgccccgggggccgtggtggtggacgtggacctgacgcccgcggcacccagcagcgagtcgctggccctggacgaagtgacagccatggacaaccacgtggcagggctcgggcccgcggaggagcggcgtgcgctggtgggtcccggctctccgccccgcagcgcgcccggccagctcccatcgccccgggcgcacagcctcaaccccgacgcctcgggctccagctgcagcctggcccggacgcgctcccgagaaagctgcgccagcgtgcgccgcgcctcgtcggccgacgacatcgaggccatgcgcgccggggtgctgcccccgccaccgcgccacgccagcaccggggccatgcacccactgcgcagcggcttgctcaactccacctcggactccgacctcgtgcgctaccgcaccattagcaagattccccaaatcaccctcaactttgtggacctcaagggcgaccccttcttggcttcgcccaccagtgaccgtgagatcatagcacctaagataaaggagcgaacccacaatgtcactgagaaggtcacccaggtcctgtccctgggcgccgacgtgctgcctgagtacaagctgcaggcaccgcgcatccaccgctggaccatcctgcattacagccccttcaaggccgtgtgggactggctcatcctgctgctggtcatctacacggctgtcttcacaccctactcggctgccttcctgctgaaggagacggaagaaggcccgcctgctaccgagtgtggctacgcctgccagccgctggctgtggtggacctcatcgtggacatcatgttcattgtggacatcctcatcaacttccgcaccacctacgtcaatgccaacgaggaggtggtcagccaccccggccgcatcgccgtccactacttcaagggctggttcctcatcgacatggtggccgccatccccttcgacctgctcatcttcggctctggctctgaggagctgatcgggctgctgaagactgcgcggctgctgcggctggtgcgcgtggcgcggaagctggatcgctactcagagtacggcgcggccgtgctgttcttgctcatgtgcacctttgcgctcatcgcgcactggctagcctgcatctggtacgccatcggcaacatggagcagccacacatggactcacgcatcggctggctgcacaacctgggcgaccagataggcaaaccctacaacagcagcggcctgggcggcccctccatcaaggacaagtatgtgacggcgctctacttcaccttcagcagcctcaccagtgtgggcttcggcaacgtctctcccaacaccaactcagagaagatcttctccatctgcgtcatgctcattggctccctcatgtatgctagcatcttcggcaacgtgtcggccatcatccagcggctgtactcgggcacagcccgctaccacacacagatgctgcgggtgcgggagttcatccgcttccaccagatccccaatcccctgcgccagcgcctcgaggagtacttccagcacgcctggtcctacaccaacggcatcgacatgaacgcggtgctgaagggcttccctgagtgcctgcaggctgacatctgcctgcacctgaaccgctcactgctgcagcactgcaaacccttccgaggggccaccaagggctgccttcgggccctggccatgaagttcaagaccacacatgcaccgccaggggacacactggtgcatgctggggacctgctcaccgccctgtacttcatctcccggggctccatcgagatcctgcggggcgacgtcgtcgtggccatcctggggaagaatgacatctttggggagcctctgaacctgtatgcaaggcctggcaagtcgaacggggatgtgcgggccctcacctactgtgacctacacaagatccatcgggacgacctgctggaggtgctggacatgtaccctgagttctccgaccacttctggtccagcctggagatcaccttcaacctgcgagataccaacatgatcccgggctcccccggcagtacggagttagagggtggcttcagtcggcaacgcaagcgcaagttgtccttccgcaggcgcacggacaaggacacggagcagccaggggaggtgtcggccttggggccgggccgggcgggggcagggccgagtagccggggccggccgggggggccgtggggggagagcccgtccagtggcccctccagccctgagagcagtgaggatgagggcccaggccgcagctccagccccctccgcctggtgcccttctccagccccaggccccccggagagccgccgggtggggagcccctgatggaggactgcgagaagagcagcgacacttgcaaccccctgtcaggcgccttctcaggagtgtccaacattttcagcttctggggggacagtcggggccgccagtaccaggagctccctcgatgccccgcccccacccccagcctcctcaacatccccctctccagcccgggtcggcggccccggggcgacgtggagagcaggctggatgccctccagcgccagctcaacaggctggagacccggctgagtgcagacatggccactgtcctgcagctgctacagaggcagatgacgctggtcccgcccgcctacagtgctgtgaccaccccggggcctggccccacttccacatccccgctgttgcccgtcagccccctccccaccctcaccttggactcgctttctcaggtttcccagttcatggcgtgtgaggagctgcccccgggggccccagagcttccccaagaaggccccacacgacgcctctccctaccgggccagctgggggccctcacctcccagcccctgcacagacacggctcggacccgggcagttagtggggctgcccagtgtggacacgtggctcacccagggatcaaggcgctgctgggccgctccccttggaggccctgctcaggaggccctgaccgtggaaggggagaggaactcgaaagcacagctcctcccccagcccttgggaccatcttctcctgcagtcccctgggccccagtgagaggggcaggggcagggccggcagtaggtggggcctgtggtccccccactgccctgagggcattagctggtctaactgcccggaggcacccggccctgggccttaggcacctcaaggacttttctgctatttactgctcttattgttaaggataataattaaggatcatatgaataattaatgaagatgctgatgactatgaataataaataattatcctgaggaga

SEQ ID NO: 428 - DNA, 3884 bp, Homo sapiens
  source 1..3884: mol_type = genomic DNA
  misc_feature 1..3884: note = cDNA of KCNH2 gene SNP c.2092G>A (p.Glu698Lys)
atgccggtgcggaggggccacgtcgcgccgcagaacaccttcctggacaccatcatccgcaagtttgagggccagagccgtaagttcatcatcgccaacgctcgggtggagaactgcgccgtcatctactgcaacgacggcttctgcgagctgtgcggctactcgcgggccgaggtgatgcagcgaccctgcacctgcgacttcctgcacgggccgcgcacgcagcgccgcgctgccgcgcagatcgcgcaggcactgctgggcgccgaggagcgcaaagtggaaatcgccttctaccggaaagatgggagctgcttcctatgtctggtggatgtggtgcccgtgaagaacgaggatggggctgtcatcatgttcatcctcaatttcgaggtggtgatggagaaggacatggtggggtccccggctcatgacaccaaccaccggggcccccccaccagctggctggccccaggccgcgccaagaccttccgcctgaagctgcccgcgctgctggcgctgacggcccgggagtcgtcggtgcggtcgggcggcgcgggcggcgcgggcgccccgggggccgtggtggtggacgtggacctgacgcccgcggcacccagcagcgagtcgctggccctggacgaagtgacagccatggacaaccacgtggcagggctcgggcccgcggaggagcggcgtgcgctggtgggtcccggctctccgccccgcagcgcgcccggccagctcccatcgccccgggcgcacagcctcaaccccgacgcctcgggctccagctgcagcctggcccggacgcgctcccgagaaagctgcgccagcgtgcgccgcgcctcgtcggccgacgacatcgaggccatgcgcgccggggtgctgcccccgccaccgcgccacgccagcaccggggccatgcacccactgcgcagcggcttgctcaactccacctcggactccgacctcgtgcgctaccgcaccattagcaagattccccaaatcaccctcaactttgtggacctcaagggcgaccccttcttggcttcgcccaccagtgaccgtgagatcatagcacctaagataaaggagcgaacccacaatgtcactgagaaggtcacccaggtcctgtccctgggcgccgacgtgctgcctgagtacaagctgcaggcaccgcgcatccaccgctggaccatcctgcattacagccccttcaaggccgtgtgggactggctcatcctgctgctggtcatctacacggctgtcttcacaccctactcggctgccttcctgctgaaggagacggaagaaggcccgcctgctaccgagtgtggctacgcctgccagccgctggctgtggtggacctcatcgtggacatcatgttcattgtggacatcctcatcaacttccgcaccacctacgtcaatgccaacgaggaggtggtcagccaccccggccgcatcgccgtccactacttcaagggctggttcctcatcgacatggtggccgccatccccttcgacctgctcatcttcggctctggctctgaggagctgatcgggctgctgaagactgcgcggctgctgcggctggtgcgcgtggcgcggaagctggatcgctactcagagtacggcgcggccgtgctgttcttgctcatgtgcacctttgcgctcatcgcgcactggctagcctgcatctggtacgccatcggcaacatggagcagccacacatggactcacgcatcggctggctgcacaacctgggcgaccagataggcaaaccctacaacagcagcggcctgggcggcccctccatcaaggacaagtatgtgacggcgctctacttcaccttcagcagcctcaccagtgtgggcttcggcaacgtctctcccaacaccaactcagagaagatcttctccatctgcgtcatgctcattggctccctcatgtatgctagcatcttcggcaacgtgtcggccatcatccagcggctgtactcgggcacagcccgctaccacacacagatgctgcgggtgcgggagttcatccgcttccaccagatccccaatcccctgcgccagcgcctcaaggagtacttccagcacgcctggtcctacaccaacggcatcgacatgaacgcggtgctgaagggcttccctgagtgcctgcaggctgacatctgcctgcacctgaaccgctcactgctgcagcactgcaaacccttccgaggggccaccaagggctgccttcgggccctggccatgaagttcaagaccacacatgcaccgccaggggacacactggtgcatgctggggacctgctcaccgccctgtacttcatctcccggggctccatcgagatcctgcggggcgacgtcgtcgtggccatcctggggaagaatgacatctttggggagcctctgaacctgtatgcaaggcctggcaagtcgaacggggatgtgcgggccctcacctactgtgacctacacaagatccatcgggacgacctgctggaggtgctggacatgtaccctgagttctccgaccacttctggtccagcctggagatcaccttcaacctgcgagataccaacatgatcccgggctcccccggcagtacggagttagagggtggcttcagtcggcaacgcaagcgcaagttgtccttccgcaggcgcacggacaaggacacggagcagccaggggaggtgtcggccttggggccgggccgggcgggggcagggccgagtagccggggccggccgggggggccgtggggggagagcccgtccagtggcccctccagccctgagagcagtgaggatgagggcccaggccgcagctccagccccctccgcctggtgcccttctccagccccaggccccccggagagccgccgggtggggagcccctgatggaggactgcgagaagagcagcgacacttgcaaccccctgtcaggcgccttctcaggagtgtccaacattttcagcttctggggggacagtcggggccgccagtaccaggagctccctcgatgccccgcccccacccccagcctcctcaacatccccctctccagcccgggtcggcggccccggggcgacgtggagagcaggctggatgccctccagcgccagctcaacaggctggagacccggctgagtgcagacatggccactgtcctgcagctgctacagaggcagatgacgctggtcccgcccgcctacagtgctgtgaccaccccggggcctggccccacttccacatccccgctgttgcccgtcagccccctccccaccctcaccttggactcgctttctcaggtttcccagttcatggcgtgtgaggagctgcccccgggggccccagagcttccccaagaaggccccacacgacgcctctccctaccgggccagctgggggccctcacctcccagcccctgcacagacacggctcggacccgggcagttagtggggctgcccagtgtggacacgtggctcacccagggatcaaggcgctgctgggccgctccccttggaggccctgctcaggaggccctgaccgtggaaggggagaggaactcgaaagcacagctcctcccccagcccttgggaccatcttctcctgcagtcccctgggccccagtgagaggggcaggggcagggccggcagtaggtggggcctgtggtccccccactgccctgagggcattagctggtctaactgcccggaggcacccggccctgggccttaggcacctcaaggacttttctgctatttactgctcttattgttaaggataataattaaggatcatatgaataattaatgaagatgctgatgactatgaataataaataattatcctgaggaga

SEQ ID NO: 429 - DNA, 3884 bp, Homo sapiens
  source 1..3884: mol_type = genomic DNA
  misc_feature 1..3884: note = cDNA of KCNH2 gene SNP c.2094G>T (p.Glu698Asp)
atgccggtgcggaggggccacgtcgcgccgcagaacaccttcctggacaccatcatccgcaagtttgagggccagagccgtaagttcatcatcgccaacgctcgggtggagaactgcgccgtcatctactgcaacgacggcttctgcgagctgtgcggctactcgcgggccgaggtgatgcagcgaccctgcacctgcgacttcctgcacgggccgcgcacgcagcgccgcgctgccgcgcagatcgcgcaggcactgctgggcgccgaggagcgcaaagtggaaatcgccttctaccggaaagatgggagctgcttcctatgtctggtggatgtggtgcccgtgaagaacgaggatggggctgtcatcatgttcatcctcaatttcgaggtggtgatggagaaggacatggtggggtccccggctcatgacaccaaccaccggggcccccccaccagctggctggccccaggccgcgccaagaccttccgcctgaagctgcccgcgctgctggcgctgacggcccgggagtcgtcggtgcggtcgggcggcgcgggcggcgcgggcgccccgggggccgtggtggtggacgtggacctgacgcccgcggcacccagcagcgagtcgctggccctggacgaagtgacagccatggacaaccacgtggcagggctcgggcccgcggaggagcggcgtgcgctggtgggtcccggctctccgccccgcagcgcgcccggccagctcccatcgccccgggcgcacagcctcaaccccgacgcctcgggctccagctgcagcctggcccggacgcgctcccgagaaagctgcgccagcgtgcgccgcgcctcgtcggccgacgacatcgaggccatgcgcgccggggtgctgcccccgccaccgcgccacgccagcaccggggccatgcacccactgcgcagcggcttgctcaactccacctcggactccgacctcgtgcgctaccgcaccattagcaagattccccaaatcaccctcaactttgtggacctcaagggcgaccccttcttggcttcgcccaccagtgaccgtgagatcatagcacctaagataaaggagcgaacccacaatgtcactgagaaggtcacccaggtcctgtccctgggcgccgacgtgctgcctgagtacaagctgcaggcaccgcgcatccaccgctggaccatcctgcattacagccccttcaaggccgtgtgggactggctcatcctgctgctggtcatctacacggctgtcttcacaccctactcggctgccttcctgctgaaggagacggaagaaggcccgcctgctaccgagtgtggctacgcctgccagccgctggctgtggtggacctcatcgtggacatcatgttcattgtggacatcctcatcaacttccgcaccacctacgtcaatgccaacgaggaggtggtcagccaccccggccgcatcgccgtccactacttcaagggctggttcctcatcgacatggtggccgccatccccttcgacctgctcatcttcggctctggctctgaggagctgatcgggctgctgaagactgcgcggctgctgcggctggtgcgcgtggcgcggaagctggatcgctactcagagtacggcgcggccgtgctgttcttgctcatgtgcacctttgcgctcatcgcgcactggctagcctgcatctggtacgccatcggcaacatggagcagccacacatggactcacgcatcggctggctgcacaacctgggcgaccagataggcaaaccctacaacagcagcggcctgggcggcccctccatcaaggacaagtatgtgacggcgctctacttcaccttcagcagcctcaccagtgtgggcttcggcaacgtctctcccaacaccaactcagagaagatcttctccatctgcgtcatgctcattggctccctcatgtatgctagcatcttcggcaacgtgtcggccatcatccagcggctgtactcgggcacagcccgctaccacacacagatgctgcgggtgcgggagttcatccgcttccaccagatccccaatcccctgcgccagcgcctcgatgagtacttccagcacgcctggtcctacaccaacggcatcgacatgaacgcggtgctgaagggcttccctgagtgcctgcaggctgacatctgcctgcacctgaaccgctcactgctgcagcactgcaaacccttccgaggggccaccaagggctgccttcgggccctggccatgaagttcaagaccacacatgcaccgccaggggacacactggtgcatgctggggacctgctcaccgccctgtacttcatctcccggggctccatcgagatcctgcggggcgacgtcgtcgtggccatcctggggaagaatgacatctttggggagcctctgaacctgtatgcaaggcctggcaagtcgaacggggatgtgcgggccctcacctactgtgacctacacaagatccatcgggacgacctgctggaggtgctggacatgtaccctgagttctccgaccacttctggtccagcctggagatcaccttcaacctgcgagataccaacatgatcccgggctcccccggcagtacggagttagagggtggcttcagtcggcaacgcaagcgcaagttgtccttccgcaggcgcacggacaaggacacggagcagccaggggaggtgtcggccttggggccgggccgggcgggggcagggccgagtagccggggccggccgggggggccgtggggggagagcccgtccagtggcccctccagccctgagagcagtgaggatgagggcccaggccgcagctccagccccctccgcctggtgcccttctccagccccaggccccccggagagccgccgggtggggagcccctgatggaggactgcgagaagagcagcgacacttgcaaccccctgtcaggcgccttctcaggagtgtccaacattttcagcttctggggggacagtcggggccgccagtaccaggagctccctcgatgccccgcccccacccccagcctcctcaacatccccctctccagcccgggtcggcggccccggggcgacgtggagagcaggctggatgccctccagcgccagctcaacaggctggagacccggctgagtgcagacatggccactgtcctgcagctgctacagaggcagatgacgctggtcccgcccgcctacagtgctgtgaccaccccggggcctggccccacttccacatccccgctgttgcccgtcagccccctccccaccctcaccttggactcgctttctcaggtttcccagttcatggcgtgtgaggagctgcccccgggggccccagagcttccccaagaaggccccacacgacgcctctccctaccgggccagctgggggccctcacctcccagcccctgcacagacacggctcggacccgggcagttagtggggctgcccagtgtggacacgtggctcacccagggatcaaggcgctgctgggccgctccccttggaggccctgctcaggaggccctgaccgtggaaggggagaggaactcgaaagcacagctcctcccccagcccttgggaccatcttctcctgcagtcccctgggccccagtgagaggggcaggggcagggccggcagtaggtggggcctgtggtccccccactgccctgagggcattagctggtctaactgcccggaggcacccggccctgggccttaggcacctcaaggacttttctgctatttactgctcttattgttaaggataataattaaggatcatatgaataattaatgaagatgctgatgactatgaataataaataattatcctgaggaga

SEQ ID NO: 430 - DNA, 3884 bp, Homo sapiens
  source 1..3884: mol_type = genomic DNA
  misc_feature 1..3884: note = cDNA of KCNH2 gene SNP c.2097G>T (p.Glu699Asp)
atgccggtgcggaggggccacgtcgcgccgcagaacaccttcctggacaccatcatccgcaagtttgagggccagagccgtaagttcatcatcgccaacgctcgggtggagaactgcgccgtcatctactgcaacgacggcttctgcgagctgtgcggctactcgcgggccgaggtgatgcagcgaccctgcacctgcgacttcctgcacgggccgcgcacgcagcgccgcgctgccgcgcagatcgcgcaggcactgctgggcgccgaggagcgcaaagtggaaatcgccttctaccggaaagatgggagctgcttcctatgtctggtggatgtggtgcccgtgaagaacgaggatggggctgtcatcatgttcatcctcaatttcgaggtggtgatggagaaggacatggtggggtccccggctcatgacaccaaccaccggggcccccccaccagctggctggccccaggccgcgccaagaccttccgcctgaagctgcccgcgctgctggcgctgacggcccgggagtcgtcggtgcggtcgggcggcgcgggcggcgcgggcgccccgggggccgtggtggtggacgtggacctgacgcccgcggcacccagcagcgagtcgctggccctggacgaagtgacagccatggacaaccacgtggcagggctcgggcccgcggaggagcggcgtgcgctggtgggtcccggctctccgccccgcagcgcgcccggccagctcccatcgccccgggcgcacagcctcaaccccgacgcctcgggctccagctgcagcctggcccggacgcgctcccgagaaagctgcgccagcgtgcgccgcgcctcgtcggccgacgacatcgaggccatgcgcgccggggtgctgcccccgccaccgcgccacgccagcaccggggccatgcacccactgcgcagcggcttgctcaactccacctcggactccgacctcgtgcgctaccgcaccattagcaagattccccaaatcaccctcaactttgtggacctcaagggcgaccccttcttggcttcgcccaccagtgaccgtgagatcatagcacctaagataaaggagcgaacccacaatgtcactgagaaggtcacccaggtcctgtccctgggcgccgacgtgctgcctgagtacaagctgcaggcaccgcgcatccaccgctggaccatcctgcattacagccccttcaaggccgtgtgggactggctcatcctgctgctggtcatctacacggctgtcttcacaccctactcggctgccttcctgctgaaggagacggaagaaggcccgcctgctaccgagtgtggctacgcctgccagccgctggctgtggtggacctcatcgtggacatcatgttcattgtggacatcctcatcaacttccgcaccacctacgtcaatgccaacgaggaggtggtcagccaccccggccgcatcgccgtccactacttcaagggctggttcctcatcgacatggtggccgccatccccttcgacctgctcatcttcggctctggctctgaggagctgatcgggctgctgaagactgcgcggctgctgcggctggtgcgcgtggcgcggaagctggatcgctactcagagtacggcgcggccgtgctgttcttgctcatgtgcacctttgcgctcatcgcgcactggctagcctgcatctggtacgccatcggcaacatggagcagccacacatggactcacgcatcggctggctgcacaacctgggcgaccagataggcaaaccctacaacagcagcggcctgggcggcccctccatcaaggacaagtatgtgacggcgctctacttcaccttcagcagcctcaccagtgtgggcttcggcaacgtctctcccaacaccaactcagagaagatcttctccatctgcgtcatgctcattggctccctcatgtatgctagcatcttcggcaacgtgtcggccatcatccagcggctgtactcgggcacagcccgctaccacacacagatgctgcgggtgcgggagttcatccgcttccaccagatccccaatcccctgcgccagcgcctcgaggattacttccagcacgcctggtcctacaccaacggcatcgacatgaacgcggtgctgaagggcttccctgagtgcctgcaggctgacatctgcctgcacctgaaccgctcactgctgcagcactgcaaacccttccgaggggccaccaagggctgccttcgggccctggccatgaagttcaagaccacacatgcaccgccaggggacacactggtgcatgctggggacctgctcaccgccctgtacttcatctcccggggctccatcgagatcctgcggggcgacgtcgtcgtggccatcctggggaagaatgacatctttggggagcctctgaacctgtatgcaaggcctggcaagtcgaacggggatgtgcgggccctcacctactgtgacctacacaagatccatcgggacgacctgctggaggtgctggacatgtaccctgagttctccgaccacttctggtccagcctggagatcaccttcaacctgcgagataccaacatgatcccgggctcccccggcagtacggagttagagggtggcttcagtcggcaacgcaagcgcaagttgtccttccgcaggcgcacggacaaggacacggagcagccaggggaggtgtcggccttggggccgggccgggcgggggcagggccgagtagccggggccggccgggggggccgtggggggagagcccgtccagtggcccctccagccctgagagcagtgaggatgagggcccaggccgcagctccagccccctccgcctggtgcccttctccagccccaggccccccggagagccgccgggtggggagcccctgatggaggactgcgagaagagcagcgacacttgcaaccccctgtcaggcgccttctcaggagtgtccaacattttcagcttctggggggacagtcggggccgccagtaccaggagctccctcgatgccccgcccccacccccagcctcctcaacatccccctctccagcccgggtcggcggccccggggcgacgtggagagcaggctggatgccctccagcgccagctcaacaggctggagacccggctgagtgcagacatggccactgtcctgcagctgctacagaggcagatgacgctggtcccgcccgcctacagtgctgtgaccaccccggggcctggccccacttccacatccccgctgttgcccgtcagccccctccccaccctcaccttggactcgctttctcaggtttcccagttcatggcgtgtgaggagctgcccccgggggccccagagcttccccaagaaggccccacacgacgcctctccctaccgggccagctgggggccctcacctcccagcccctgcacagacacggctcggacccgggcagttagtggggctgcccagtgtggacacgtggctcacccagggatcaaggcgctgctgggccgctccccttggaggccctgctcaggaggccctgaccgtggaaggggagaggaactcgaaagcacagctcctcccccagcccttgggaccatcttctcctgcagtcccctgggccccagtgagaggggcaggggcagggccggcagtaggtggggcctgtggtccccccactgccctgagggcattagctggtctaactgcccggaggcacccggccctgggccttaggcacctcaaggacttttctgctatttactgctcttattgttaaggataataattaaggatcatatgaataattaatgaagatgctgatgactatgaataataaataattatcctgaggaga

SEQ ID NO: 431 - DNA, 3884 bp, Homo sapiens
  source 1..3884: mol_type = genomic DNA
  misc_feature 1..3884: note = cDNA of KCNH2 gene SNP c.209A>G (p.His70Arg)
atgccggtgcggaggggccacgtcgcgccgcagaacaccttcctggacaccatcatccgcaagtttgagggccagagccgtaagttcatcatcgccaacgctcgggtggagaactgcgccgtcatctactgcaacgacggcttctgcgagctgtgcggctactcgcgggccgaggtgatgcagcgaccctgcacctgcgacttcctgcgcgggccgcgcacgcagcgccgcgctgccgcgcagatcgcgcaggcactgctgggcgccgaggagcgcaaagtggaaatcgccttctaccggaaagatgggagctgcttcctatgtctggtggatgtggtgcccgtgaagaacgaggatggggctgtcatcatgttcatcctcaatttcgaggtggtgatggagaaggacatggtggggtccccggctcatgacaccaaccaccggggcccccccaccagctggctggccccaggccgcgccaagaccttccgcctgaagctgcccgcgctgctggcgctgacggcccgggagtcgtcggtgcggtcgggcggcgcgggcggcgcgggcgccccgggggccgtggtggtggacgtggacctgacgcccgcggcacccagcagcgagtcgctggccctggacgaagtgacagccatggacaaccacgtggcagggctcgggcccgcggaggagcggcgtgcgctggtgggtcccggctctccgccccgcagcgcgcccggccagctcccatcgccccgggcgcacagcctcaaccccgacgcctcgggctccagctgcagcctggcccggacgcgctcccgagaaagctgcgccagcgtgcgccgcgcctcgtcggccgacgacatcgaggccatgcgcgccggggtgctgcccccgccaccgcgccacgccagcaccggggccatgcacccactgcgcagcggcttgctcaactccacctcggactccgacctcgtgcgctaccgcaccattagcaagattccccaaatcaccctcaactttgtggacctcaagggcgaccccttcttggcttcgcccaccagtgaccgtgagatcatagcacctaagataaaggagcgaacccacaatgtcactgagaaggtcacccaggtcctgtccctgggcgccgacgtgctgcctgagtacaagctgcaggcaccgcgcatccaccgctggaccatcctgcattacagccccttcaaggccgtgtgggactggctcatcctgctgctggtcatctacacggctgtcttcacaccctactcggctgccttcctgctgaaggagacggaagaaggcccgcctgctaccgagtgtggctacgcctgccagccgctggctgtggtggacctcatcgtggacatcatgttcattgtggacatcctcatcaacttccgcaccacctacgtcaatgccaacgaggaggtggtcagccaccccggccgcatcgccgtccactacttcaagggctggttcctcatcgacatggtggccgccatccccttcgacctgctcatcttcggctctggctctgaggagctgatcgggctgctgaagactgcgcggctgctgcggctggtgcgcgtggcgcggaagctggatcgctactcagagtacggcgcggccgtgctgttcttgctcatgtgcacctttgcgctcatcgcgcactggctagcctgcatctggtacgccatcggcaacatggagcagccacacatggactcacgcatcggctggctgcacaacctgggcgaccagataggcaaaccctacaacagcagcggcctgggcggcccctccatcaaggacaagtatgtgacggcgctctacttcaccttcagcagcctcaccagtgtgggcttcggcaacgtctctcccaacaccaactcagagaagatcttctccatctgcgtcatgctcattggctccctcatgtatgctagcatcttcggcaacgtgtcggccatcatccagcggctgtactcgggcacagcccgctaccacacacagatgctgcgggtgcgggagttcatccgcttccaccagatccccaatcccctgcgccagcgcctcgaggagtacttccagcacgcctggtcctacaccaacggcatcgacatgaacgcggtgctgaagggcttccctgagtgcctgcaggctgacatctgcctgcacctgaaccgctcactgctgcagcactgcaaacccttccgaggggccaccaagggctgccttcgggccctggccatgaagttcaagaccacacatgcaccgccaggggacacactggtgcatgctggggacctgctcaccgccctgtacttcatctcccggggctccatcgagatcctgcggggcgacgtcgtcgtggccatcctggggaagaatgacatctttggggagcctctgaacctgtatgcaaggcctggcaagtcgaacggggatgtgcgggccctcacctactgtgacctacacaagatccatcgggacgacctgctggaggtgctggacatgtaccctgagttctccgaccacttctggtccagcctggagatcaccttcaacctgcgagataccaacatgatcccgggctcccccggcagtacggagttagagggtggcttcagtcggcaacgcaagcgcaagttgtccttccgcaggcgcacggacaaggacacggagcagccaggggaggtgtcggccttggggccgggccgggcgggggcagggccgagtagccggggccggccgggggggccgtggggggagagcccgtccagtggcccctccagccctgagagcagtgaggatgagggcccaggccgcagctccagccccctccgcctggtgcccttctccagccccaggccccccggagagccgccgggtggggagcccctgatggaggactgcgagaagagcagcgacacttgcaaccccctgtcaggcgccttctcaggagtgtccaacattttcagcttctggggggacagtcggggccgccagtaccaggagctccctcgatgccccgcccccacccccagcctcctcaacatccccctctccagcccgggtcggcggccccggggcgacgtggagagcaggctggatgccctccagcgccagctcaacaggctggagacccggctgagtgcagacatggccactgtcctgcagctgctacagaggcagatgacgctggtcccgcccgcctacagtgctgtgaccaccccggggcctggccccacttccacatccccgctgttgcccgtcagccccctccccaccctcaccttggactcgctttctcaggtttcccagttcatggcgtgtgaggagctgcccccgggggccccagagcttccccaagaaggccccacacgacgcctctccctaccgggccagctgggggccctcacctcccagcccctgcacagacacggctcggacccgggcagttagtggggctgcccagtgtggacacgtggctcacccagggatcaaggcgctgctgggccgctccccttggaggccctgctcaggaggccctgaccgtggaaggggagaggaactcgaaagcacagctcctcccccagcccttgggaccatcttctcctgcagtcccctgggccccagtgagaggggcaggggcagggccggcagtaggtggggcctgtggtccccccactgccctgagggcattagctggtctaactgcccggaggcacccggccctgggccttaggcacctcaaggacttttctgctatttactgctcttattgttaaggataataattaaggatcatatgaataattaatgaagatgctgatgactatgaataataaataattatcctgaggaga

SEQ ID NO: 432 - DNA, 3884 bp, Homo sapiens
  source 1..3884: mol_type = genomic DNA
  misc_feature 1..3884: note = cDNA of KCNH2 gene SNP c.2104C>T (p.Gln702Ter)
atgccggtgcggaggggccacgtcgcgccgcagaacaccttcctggacaccatcatccgcaagtttgagggccagagccgtaagttcatcatcgccaacgctcgggtggagaactgcgccgtcatctactgcaacgacggcttctgcgagctgtgcggctactcgcgggccgaggtgatgcagcgaccctgcacctgcgacttcctgcacgggccgcgcacgcagcgccgcgctgccgcgcagatcgcgcaggcactgctgggcgccgaggagcgcaaagtggaaatcgccttctaccggaaagatgggagctgcttcctatgtctggtggatgtggtgcccgtgaagaacgaggatggggctgtcatcatgttcatcctcaatttcgaggtggtgatggagaaggacatggtggggtccccggctcatgacaccaaccaccggggcccccccaccagctggctggccccaggccgcgccaagaccttccgcctgaagctgcccgcgctgctggcgctgacggcccgggagtcgtcggtgcggtcgggcggcgcgggcggcgcgggcgccccgggggccgtggtggtggacgtggacctgacgcccgcggcacccagcagcgagtcgctggccctggacgaagtgacagccatggacaaccacgtggcagggctcgggcccgcggaggagcggcgtgcgctggtgggtcccggctctccgccccgcagcgcgcccggccagctcccatcgccccgggcgcacagcctcaaccccgacgcctcgggctccagctgcagcctggcccggacgcgctcccgagaaagctgcgccagcgtgcgccgcgcctcgtcggccgacgacatcgaggccatgcgcgccggggtgctgcccccgccaccgcgccacgccagcaccggggccatgcacccactgcgcagcggcttgctcaactccacctcggactccgacctcgtgcgctaccgcaccattagcaagattccccaaatcaccctcaactttgtggacctcaagggcgaccccttcttggcttcgcccaccagtgaccgtgagatcatagcacctaagataaaggagcgaacccacaatgtcactgagaaggtcacccaggtcctgtccctgggcgccgacgtgctgcctgagtacaagctgcaggcaccgcgcatccaccgctggaccatcctgcattacagccccttcaaggccgtgtgggactggctcatcctgctgctggtcatctacacggctgtcttcacaccctactcggctgccttcctgctgaaggagacggaagaaggcccgcctgctaccgagtgtggctacgcctgccagccgctggctgtggtggacctcatcgtggacatcatgttcattgtggacatcctcatcaacttccgcaccacctacgtcaatgccaacgaggaggtggtcagccaccccggccgcatcgccgtccactacttcaagggctggttcctcatcgacatggtggccgccatccccttcgacctgctcatcttcggctctggctctgaggagctgatcgggctgctgaagactgcgcggctgctgcggctggtgcgcgtggcgcggaagctggatcgctactcagagtacggcgcggccgtgctgttcttgctcatgtgcacctttgcgctcatcgcgcactggctagcctgcatctggtacgccatcggcaacatggagcagccacacatggactcacgcatcggctggctgcacaacctgggcgaccagataggcaaaccctacaacagcagcggcctgggcggcccctccatcaaggacaagtatgtgacggcgctctacttcaccttcagcagcctcaccagtgtgggcttcggcaacgtctctcccaacaccaactcagagaagatcttctccatctgcgtcatgctcattggctccctcatgtatgctagcatcttcggcaacgtgtcggccatcatccagcggctgtactcgggcacagcccgctaccacacacagatgctgcgggtgcgggagttcatccgcttccaccagatccccaatcccctgcgccagcgcctcgaggagtacttctagcacgcctggtcctacaccaacggcatcgacatgaacgcggtgctgaagggcttccctgagtgcctgcaggctgacatctgcctgcacctgaaccgctcactgctgcagcactgcaaacccttccgaggggccaccaagggctgccttcgggccctggccatgaagttcaagaccacacatgcaccgccaggggacacactggtgcatgctggggacctgctcaccgccctgtacttcatctcccggggctccatcgagatcctgcggggcgacgtcgtcgtggccatcctggggaagaatgacatctttggggagcctctgaacctgtatgcaaggcctggcaagtcgaacggggatgtgcgggccctcacctactgtgacctacacaagatccatcgggacgacctgctggaggtgctggacatgtaccctgagttctccgaccacttctggtccagcctggagatcaccttcaacctgcgagataccaacatgatcccgggctcccccggcagtacggagttagagggtggcttcagtcggcaacgcaagcgcaagttgtccttccgcaggcgcacggacaaggacacggagcagccaggggaggtgtcggccttggggccgggccgggcgggggcagggccgagtagccggggccggccgggggggccgtggggggagagcccgtccagtggcccctccagccctgagagcagtgaggatgagggcccaggccgcagctccagccccctccgcctggtgcccttctccagccccaggccccccggagagccgccgggtggggagcccctgatggaggactgcgagaagagcagcgacacttgcaaccccctgtcaggcgccttctcaggagtgtccaacattttcagcttctggggggacagtcggggccgccagtaccaggagctccctcgatgccccgcccccacccccagcctcctcaacatccccctctccagcccgggtcggcggccccggggcgacgtggagagcaggctggatgccctccagcgccagctcaacaggctggagacccggctgagtgcagacatggccactgtcctgcagctgctacagaggcagatgacgctggtcccgcccgcctacagtgctgtgaccaccccggggcctggccccacttccacatccccgctgttgcccgtcagccccctccccaccctcaccttggactcgctttctcaggtttcccagttcatggcgtgtgaggagctgcccccgggggccccagagcttccccaagaaggccccacacgacgcctctccctaccgggccagctgggggccctcacctcccagcccctgcacagacacggctcggacccgggcagttagtggggctgcccagtgtggacacgtggctcacccagggatcaaggcgctgctgggccgctccccttggaggccctgctcaggaggccctgaccgtggaaggggagaggaactcgaaagcacagctcctcccccagcccttgggaccatcttctcctgcagtcccctgggccccagtgagaggggcaggggcagggccggcagtaggtggggcctgtggtccccccactgccctgagggcattagctggtctaactgcccggaggcacccggccctgggccttaggcacctcaaggacttttctgctatttactgctcttattgttaaggataataattaaggatcatatgaataattaatgaagatgctgatgactatgaataataaataattatcctgaggaga

SEQ ID NO: 433 - DNA, 3884 bp, Homo sapiens
  source 1..3884: mol_type = genomic DNA
  misc_feature 1..3884: note = cDNA of KCNH2 gene SNP c.2117C>G (p.Ser706Cys)
atgccggtgcggaggggccacgtcgcgccgcagaacaccttcctggacaccatcatccgcaagtttgagggccagagccgtaagttcatcatcgccaacgctcgggtggagaactgcgccgtcatctactgcaacgacggcttctgcgagctgtgcggctactcgcgggccgaggtgatgcagcgaccctgcacctgcgacttcctgcacgggccgcgcacgcagcgccgcgctgccgcgcagatcgcgcaggcactgctgggcgccgaggagcgcaaagtggaaatcgccttctaccggaaagatgggagctgcttcctatgtctggtggatgtggtgcccgtgaagaacgaggatggggctgtcatcatgttcatcctcaatttcgaggtggtgatggagaaggacatggtggggtccccggctcatgacaccaaccaccggggcccccccaccagctggctggccccaggccgcgccaagaccttccgcctgaagctgcccgcgctgctggcgctgacggcccgggagtcgtcggtgcggtcgggcggcgcgggcggcgcgggcgccccgggggccgtggtggtggacgtggacctgacgcccgcggcacccagcagcgagtcgctggccctggacgaagtgacagccatggacaaccacgtggcagggctcgggcccgcggaggagcggcgtgcgctggtgggtcccggctctccgccccgcagcgcgcccggccagctcccatcgccccgggcgcacagcctcaaccccgacgcctcgggctccagctgcagcctggcccggacgcgctcccgagaaagctgcgccagcgtgcgccgcgcctcgtcggccgacgacatcgaggccatgcgcgccggggtgctgcccccgccaccgcgccacgccagcaccggggccatgcacccactgcgcagcggcttgctcaactccacctcggactccgacctcgtgcgctaccgcaccattagcaagattccccaaatcaccctcaactttgtggacctcaagggcgaccccttcttggcttcgcccaccagtgaccgtgagatcatagcacctaagataaaggagcgaacccacaatgtcactgagaaggtcacccaggtcctgtccctgggcgccgacgtgctgcctgagtacaagctgcaggcaccgcgcatccaccgctggaccatcctgcattacagccccttcaaggccgtgtgggactggctcatcctgctgctggtcatctacacggctgtcttcacaccctactcggctgccttcctgctgaaggagacggaagaaggcccgcctgctaccgagtgtggctacgcctgccagccgctggctgtggtggacctcatcgtggacatcatgttcattgtggacatcctcatcaacttccgcaccacctacgtcaatgccaacgaggaggtggtcagccaccccggccgcatcgccgtccactacttcaagggctggttcctcatcgacatggtggccgccatccccttcgacctgctcatcttcggctctggctctgaggagctgatcgggctgctgaagactgcgcggctgctgcggctggtgcgcgtggcgcggaagctggatcgctactcagagtacggcgcggccgtgctgttcttgctcatgtgcacctttgcgctcatcgcgcactggctagcctgcatctggtacgccatcggcaacatggagcagccacacatggactcacgcatcggctggctgcacaacctgggcgaccagataggcaaaccctacaacagcagcggcctgggcggcccctccatcaaggacaagtatgtgacggcgctctacttcaccttcagcagcctcaccagtgtgggcttcggcaacgtctctcccaacaccaactcagagaagatcttctccatctgcgtcatgctcattggctccctcatgtatgctagcatcttcggcaacgtgtcggccatcatccagcggctgtactcgggcacagcccgctaccacacacagatgctgcgggtgcgggagttcatccgcttccaccagatccccaatcccctgcgccagcgcctcgaggagtacttccagcacgcctggtgctacaccaacggcatcgacatgaacgcggtgctgaagggcttccctgagtgcctgcaggctgacatctgcctgcacctgaaccgctcactgctgcagcactgcaaacccttccgaggggccaccaagggctgccttcgggccctggccatgaagttcaagaccacacatgcaccgccaggggacacactggtgcatgctggggacctgctcaccgccctgtacttcatctcccggggctccatcgagatcctgcggggcgacgtcgtcgtggccatcctggggaagaatgacatctttggggagcctctgaacctgtatgcaaggcctggcaagtcgaacggggatgtgcgggccctcacctactgtgacctacacaagatccatcgggacgacctgctggaggtgctggacatgtaccctgagttctccgaccacttctggtccagcctggagatcaccttcaacctgcgagataccaacatgatcccgggctcccccggcagtacggagttagagggtggcttcagtcggcaacgcaagcgcaagttgtccttccgcaggcgcacggacaaggacacggagcagccaggggaggtgtcggccttggggccgggccgggcgggggcagggccgagtagccggggccggccgggggggccgtggggggagagcccgtccagtggcccctccagccctgagagcagtgaggatgagggcccaggccgcagctccagccccctccgcctggtgcccttctccagccccaggccccccggagagccgccgggtggggagcccctgatggaggactgcgagaagagcagcgacacttgcaaccccctgtcaggcgccttctcaggagtgtccaacattttcagcttctggggggacagtcggggccgccagtaccaggagctccctcgatgccccgcccccacccccagcctcctcaacatccccctctccagcccgggtcggcggccccggggcgacgtggagagcaggctggatgccctccagcgccagctcaacaggctggagacccggctgagtgcagacatggccactgtcctgcagctgctacagaggcagatgacgctggtcccgcccgcctacagtgctgtgaccaccccggggcctggccccacttccacatccccgctgttgcccgtcagccccctccccaccctcaccttggactcgctttctcaggtttcccagttcatggcgtgtgaggagctgcccccgggggccccagagcttccccaagaaggccccacacgacgcctctccctaccgggccagctgggggccctcacctcccagcccctgcacagacacggctcggacccgggcagttagtggggctgcccagtgtggacacgtggctcacccagggatcaaggcgctgctgggccgctccccttggaggccctgctcaggaggccctgaccgtggaaggggagaggaactcgaaagcacagctcctcccccagcccttgggaccatcttctcctgcagtcccctgggccccagtgagaggggcaggggcagggccggcagtaggtggggcctgtggtccccccactgccctgagggcattagctggtctaactgcccggaggcacccggccctgggccttaggcacctcaaggacttttctgctatttactgctcttattgttaaggataataattaaggatcatatgaataattaatgaagatgctgatgactatgaataataaataattatcctgaggaga

SEQ ID NO: 434 - DNA, 3884 bp, Homo sapiens
  source 1..3884: mol_type = genomic DNA
  misc_feature 1..3884: note = cDNA of KCNH2 gene SNP c.2117C>T (p.Ser706Phe)
atgccggtgcggaggggccacgtcgcgccgcagaacaccttcctggacaccatcatccgcaagtttgagggccagagccgtaagttcatcatcgccaacgctcgggtggagaactgcgccgtcatctactgcaacgacggcttctgcgagctgtgcggctactcgcgggccgaggtgatgcagcgaccctgcacctgcgacttcctgcacgggccgcgcacgcagcgccgcgctgccgcgcagatcgcgcaggcactgctgggcgccgaggagcgcaaagtggaaatcgccttctaccggaaagatgggagctgcttcctatgtctggtggatgtggtgcccgtgaagaacgaggatggggctgtcatcatgttcatcctcaatttcgaggtggtgatggagaaggacatggtggggtccccggctcatgacaccaaccaccggggcccccccaccagctggctggccccaggccgcgccaagaccttccgcctgaagctgcccgcgctgctggcgctgacggcccgggagtcgtcggtgcggtcgggcggcgcgggcggcgcgggcgccccgggggccgtggtggtggacgtggacctgacgcccgcggcacccagcagcgagtcgctggccctggacgaagtgacagccatggacaaccacgtggcagggctcgggcccgcggaggagcggcgtgcgctggtgggtcccggctctccgccccgcagcgcgcccggccagctcccatcgccccgggcgcacagcctcaaccccgacgcctcgggctccagctgcagcctggcccggacgcgctcccgagaaagctgcgccagcgtgcgccgcgcctcgtcggccgacgacatcgaggccatgcgcgccggggtgctgcccccgccaccgcgccacgccagcaccggggccatgcacccactgcgcagcggcttgctcaactccacctcggactccgacctcgtgcgctaccgcaccattagcaagattccccaaatcaccctcaactttgtggacctcaagggcgaccccttcttggcttcgcccaccagtgaccgtgagatcatagcacctaagataaaggagcgaacccacaatgtcactgagaaggtcacccaggtcctgtccctgggcgccgacgtgctgcctgagtacaagctgcaggcaccgcgcatccaccgctggaccatcctgcattacagccccttcaaggccgtgtgggactggctcatcctgctgctggtcatctacacggctgtcttcacaccctactcggctgccttcctgctgaaggagacggaagaaggcccgcctgctaccgagtgtggctacgcctgccagccgctggctgtggtggacctcatcgtggacatcatgttcattgtggacatcctcatcaacttccgcaccacctacgtcaatgccaacgaggaggtggtcagccaccccggccgcatcgccgtccactacttcaagggctggttcctcatcgacatggtggccgccatccccttcgacctgctcatcttcggctctggctctgaggagctgatcgggctgctgaagactgcgcggctgctgcggctggtgcgcgtggcgcggaagctggatcgctactcagagtacggcgcggccgtgctgttcttgctcatgtgcacctttgcgctcatcgcgcactggctagcctgcatctggtacgccatcggcaacatggagcagccacacatggactcacgcatcggctggctgcacaacctgggcgaccagataggcaaaccctacaacagcagcggcctgggcggcccctccatcaaggacaagtatgtgacggcgctctacttcaccttcagcagcctcaccagtgtgggcttcggcaacgtctctcccaacaccaactcagagaagatcttctccatctgcgtcatgctcattggctccctcatgtatgctagcatcttcggcaacgtgtcggccatcatccagcggctgtactcgggcacagcccgctaccacacacagatgctgcgggtgcgggagttcatccgcttccaccagatccccaatcccctgcgccagcgcctcgaggagtacttccagcacgcctggttctacaccaacggcatcgacatgaacgcggtgctgaagggcttccctgagtgcctgcaggctgacatctgcctgcacctgaaccgctcactgctgcagcactgcaaacccttccgaggggccaccaagggctgccttcgggccctggccatgaagttcaagaccacacatgcaccgccaggggacacactggtgcatgctggggacctgctcaccgccctgtacttcatctcccggggctccatcgagatcctgcggggcgacgtcgtcgtggccatcctggggaagaatgacatctttggggagcctctgaacctgtatgcaaggcctggcaagtcgaacggggatgtgcgggccctcacctactgtgacctacacaagatccatcgggacgacctgctggaggtgctggacatgtaccctgagttctccgaccacttctggtccagcctggagatcaccttcaacctgcgagataccaacatgatcccgggctcccccggcagtacggagttagagggtggcttcagtcggcaacgcaagcgcaagttgtccttccgcaggcgcacggacaaggacacggagcagccaggggaggtgtcggccttggggccgggccgggcgggggcagggccgagtagccggggccggccgggggggccgtggggggagagcccgtccagtggcccctccagccctgagagcagtgaggatgagggcccaggccgcagctccagccccctccgcctggtgcccttctccagccccaggccccccggagagccgccgggtggggagcccctgatggaggactgcgagaagagcagcgacacttgcaaccccctgtcaggcgccttctcaggagtgtccaacattttcagcttctggggggacagtcggggccgccagtaccaggagctccctcgatgccccgcccccacccccagcctcctcaacatccccctctccagcccgggtcggcggccccggggcgacgtggagagcaggctggatgccctccagcgccagctcaacaggctggagacccggctgagtgcagacatggccactgtcctgcagctgctacagaggcagatgacgctggtcccgcccgcctacagtgctgtgaccaccccggggcctggccccacttccacatccccgctgttgcccgtcagccccctccccaccctcaccttggactcgctttctcaggtttcccagttcatggcgtgtgaggagctgcccccgggggccccagagcttccccaagaaggccccacacgacgcctctccctaccgggccagctgggggccctcacctcccagcccctgcacagacacggctcggacccgggcagttagtggggctgcccagtgtggacacgtggctcacccagggatcaaggcgctgctgggccgctccccttggaggccctgctcaggaggccctgaccgtggaaggggagaggaactcgaaagcacagctcctcccccagcccttgggaccatcttctcctgcagtcccctgggccccagtgagaggggcaggggcagggccggcagtaggtggggcctgtggtccccccactgccctgagggcattagctggtctaactgcccggaggcacccggccctgggccttaggcacctcaaggacttttctgctatttactgctcttattgttaaggataataattaaggatcatatgaataattaatgaagatgctgatgactatgaataataaataattatcctgaggaga

SEQ ID NO: 435 - DNA, 3884 bp, Homo sapiens
  source 1..3884: mol_type = genomic DNA
  misc_feature 1..3884: note = cDNA of KCNH2 gene SNP c.211G>A (p.Gly71Arg)
atgccggtgcggaggggccacgtcgcgccgcagaacaccttcctggacaccatcatccgcaagtttgagggccagagccgtaagttcatcatcgccaacgctcgggtggagaactgcgccgtcatctactgcaacgacggcttctgcgagctgtgcggctactcgcgggccgaggtgatgcagcgaccctgcacctgcgacttcctgcacaggccgcgcacgcagcgccgcgctgccgcgcagatcgcgcaggcactgctgggcgccgaggagcgcaaagtggaaatcgccttctaccggaaagatgggagctgcttcctatgtctggtggatgtggtgcccgtgaagaacgaggatggggctgtcatcatgttcatcctcaatttcgaggtggtgatggagaaggacatggtggggtccccggctcatgacaccaaccaccggggcccccccaccagctggctggccccaggccgcgccaagaccttccgcctgaagctgcccgcgctgctggcgctgacggcccgggagtcgtcggtgcggtcgggcggcgcgggcggcgcgggcgccccgggggccgtggtggtggacgtggacctgacgcccgcggcacccagcagcgagtcgctggccctggacgaagtgacagccatggacaaccacgtggcagggctcgggcccgcggaggagcggcgtgcgctggtgggtcccggctctccgccccgcagcgcgcccggccagctcccatcgccccgggcgcacagcctcaaccccgacgcctcgggctccagctgcagcctggcccggacgcgctcccgagaaagctgcgccagcgtgcgccgcgcctcgtcggccgacgacatcgaggccatgcgcgccggggtgctgcccccgccaccgcgccacgccagcaccggggccatgcacccactgcgcagcggcttgctcaactccacctcggactccgacctcgtgcgctaccgcaccattagcaagattccccaaatcaccctcaactttgtggacctcaagggcgaccccttcttggcttcgcccaccagtgaccgtgagatcatagcacctaagataaaggagcgaacccacaatgtcactgagaaggtcacccaggtcctgtccctgggcgccgacgtgctgcctgagtacaagctgcaggcaccgcgcatccaccgctggaccatcctgcattacagccccttcaaggccgtgtgggactggctcatcctgctgctggtcatctacacggctgtcttcacaccctactcggctgccttcctgctgaaggagacggaagaaggcccgcctgctaccgagtgtggctacgcctgccagccgctggctgtggtggacctcatcgtggacatcatgttcattgtggacatcctcatcaacttccgcaccacctacgtcaatgccaacgaggaggtggtcagccaccccggccgcatcgccgtccactacttcaagggctggttcctcatcgacatggtggccgccatccccttcgacctgctcatcttcggctctggctctgaggagctgatcgggctgctgaagactgcgcggctgctgcggctggtgcgcgtggcgcggaagctggatcgctactcagagtacggcgcggccgtgctgttcttgctcatgtgcacctttgcgctcatcgcgcactggctagcctgcatctggtacgccatcggcaacatggagcagccacacatggactcacgcatcggctggctgcacaacctgggcgaccagataggcaaaccctacaacagcagcggcctgggcggcccctccatcaaggacaagtatgtgacggcgctctacttcaccttcagcagcctcaccagtgtgggcttcggcaacgtctctcccaacaccaactcagagaagatcttctccatctgcgtcatgctcattggctccctcatgtatgctagcatcttcggcaacgtgtcggccatcatccagcggctgtactcgggcacagcccgctaccacacacagatgctgcgggtgcgggagttcatccgcttccaccagatccccaatcccctgcgccagcgcctcgaggagtacttccagcacgcctggtcctacaccaacggcatcgacatgaacgcggtgctgaagggcttccctgagtgcctgcaggctgacatctgcctgcacctgaaccgctcactgctgcagcactgcaaacccttccgaggggccaccaagggctgccttcgggccctggccatgaagttcaagaccacacatgcaccgccaggggacacactggtgcatgctggggacctgctcaccgccctgtacttcatctcccggggctccatcgagatcctgcggggcgacgtcgtcgtggccatcctggggaagaatgacatctttggggagcctctgaacctgtatgcaaggcctggcaagtcgaacggggatgtgcgggccctcacctactgtgacctacacaagatccatcgggacgacctgctggaggtgctggacatgtaccctgagttctccgaccacttctggtccagcctggagatcaccttcaacctgcgagataccaacatgatcccgggctcccccggcagtacggagttagagggtggcttcagtcggcaacgcaagcgcaagttgtccttccgcaggcgcacggacaaggacacggagcagccaggggaggtgtcggccttggggccgggccgggcgggggcagggccgagtagccggggccggccgggggggccgtggggggagagcccgtccagtggcccctccagccctgagagcagtgaggatgagggcccaggccgcagctccagccccctccgcctggtgcccttctccagccccaggccccccggagagccgccgggtggggagcccctgatggaggactgcgagaagagcagcgacacttgcaaccccctgtcaggcgccttctcaggagtgtccaacattttcagcttctggggggacagtcggggccgccagtaccaggagctccctcgatgccccgcccccacccccagcctcctcaacatccccctctccagcccgggtcggcggccccggggcgacgtggagagcaggctggatgccctccagcgccagctcaacaggctggagacccggctgagtgcagacatggccactgtcctgcagctgctacagaggcagatgacgctggtcccgcccgcctacagtgctgtgaccaccccggggcctggccccacttccacatccccgctgttgcccgtcagccccctccccaccctcaccttggactcgctttctcaggtttcccagttcatggcgtgtgaggagctgcccccgggggccccagagcttccccaagaaggccccacacgacgcctctccctaccgggccagctgggggccctcacctcccagcccctgcacagacacggctcggacccgggcagttagtggggctgcccagtgtggacacgtggctcacccagggatcaaggcgctgctgggccgctccccttggaggccctgctcaggaggccctgaccgtggaaggggagaggaactcgaaagcacagctcctcccccagcccttgggaccatcttctcctgcagtcccctgggccccagtgagaggggcaggggcagggccggcagtaggtggggcctgtggtccccccactgccctgagggcattagctggtctaactgcccggaggcacccggccctgggccttaggcacctcaaggacttttctgctatttactgctcttattgttaaggataataattaaggatcatatgaataattaatgaagatgctgatgactatgaataataaataattatcctgaggaga

SEQ ID NO: 436 - DNA, 3884 bp, Homo sapiens
  source 1..3884: mol_type = genomic DNA
  misc_feature 1..3884: note = cDNA of KCNH2 gene SNP c.211G>C (p.Gly71Arg)
atgccggtgcggaggggccacgtcgcgccgcagaacaccttcctggacaccatcatccgcaagtttgagggccagagccgtaagttcatcatcgccaacgctcgggtggagaactgcgccgtcatctactgcaacgacggcttctgcgagctgtgcggctactcgcgggccgaggtgatgcagcgaccctgcacctgcgacttcctgcaccggccgcgcacgcagcgccgcgctgccgcgcagatcgcgcaggcactgctgggcgccgaggagcgcaaagtggaaatcgccttctaccggaaagatgggagctgcttcctatgtctggtggatgtggtgcccgtgaagaacgaggatggggctgtcatcatgttcatcctcaatttcgaggtggtgatggagaaggacatggtggggtccccggctcatgacaccaaccaccggggcccccccaccagctggctggccccaggccgcgccaagaccttccgcctgaagctgcccgcgctgctggcgctgacggcccgggagtcgtcggtgcggtcgggcggcgcgggcggcgcgggcgccccgggggccgtggtggtggacgtggacctgacgcccgcggcacccagcagcgagtcgctggccctggacgaagtgacagccatggacaaccacgtggcagggctcgggcccgcggaggagcggcgtgcgctggtgggtcccggctctccgccccgcagcgcgcccggccagctcccatcgccccgggcgcacagcctcaaccccgacgcctcgggctccagctgcagcctggcccggacgcgctcccgagaaagctgcgccagcgtgcgccgcgcctcgtcggccgacgacatcgaggccatgcgcgccggggtgctgcccccgccaccgcgccacgccagcaccggggccatgcacccactgcgcagcggcttgctcaactccacctcggactccgacctcgtgcgctaccgcaccattagcaagattccccaaatcaccctcaactttgtggacctcaagggcgaccccttcttggcttcgcccaccagtgaccgtgagatcatagcacctaagataaaggagcgaacccacaatgtcactgagaaggtcacccaggtcctgtccctgggcgccgacgtgctgcctgagtacaagctgcaggcaccgcgcatccaccgctggaccatcctgcattacagccccttcaaggccgtgtgggactggctcatcctgctgctggtcatctacacggctgtcttcacaccctactcggctgccttcctgctgaaggagacggaagaaggcccgcctgctaccgagtgtggctacgcctgccagccgctggctgtggtggacctcatcgtggacatcatgttcattgtggacatcctcatcaacttccgcaccacctacgtcaatgccaacgaggaggtggtcagccaccccggccgcatcgccgtccactacttcaagggctggttcctcatcgacatggtggccgccatccccttcgacctgctcatcttcggctctggctctgaggagctgatcgggctgctgaagactgcgcggctgctgcggctggtgcgcgtggcgcggaagctggatcgctactcagagtacggcgcggccgtgctgttcttgctcatgtgcacctttgcgctcatcgcgcactggctagcctgcatctggtacgccatcggcaacatggagcagccacacatggactcacgcatcggctggctgcacaacctgggcgaccagataggcaaaccctacaacagcagcggcctgggcggcccctccatcaaggacaagtatgtgacggcgctctacttcaccttcagcagcctcaccagtgtgggcttcggcaacgtctctcccaacaccaactcagagaagatcttctccatctgcgtcatgctcattggctccctcatgtatgctagcatcttcggcaacgtgtcggccatcatccagcggctgtactcgggcacagcccgctaccacacacagatgctgcgggtgcgggagttcatccgcttccaccagatccccaatcccctgcgccagcgcctcgaggagtacttccagcacgcctggtcctacaccaacggcatcgacatgaacgcggtgctgaagggcttccctgagtgcctgcaggctgacatctgcctgcacctgaaccgctcactgctgcagcactgcaaacccttccgaggggccaccaagggctgccttcgggccctggccatgaagttcaagaccacacatgcaccgccaggggacacactggtgcatgctggggacctgctcaccgccctgtacttcatctcccggggctccatcgagatcctgcggggcgacgtcgtcgtggccatcctggggaagaatgacatctttggggagcctctgaacctgtatgcaaggcctggcaagtcgaacggggatgtgcgggccctcacctactgtgacctacacaagatccatcgggacgacctgctggaggtgctggacatgtaccctgagttctccgaccacttctggtccagcctggagatcaccttcaacctgcgagataccaacatgatcccgggctcccccggcagtacggagttagagggtggcttcagtcggcaacgcaagcgcaagttgtccttccgcaggcgcacggacaaggacacggagcagccaggggaggtgtcggccttggggccgggccgggcgggggcagggccgagtagccggggccggccgggggggccgtggggggagagcccgtccagtggcccctccagccctgagagcagtgaggatgagggcccaggccgcagctccagccccctccgcctggtgcccttctccagccccaggccccccggagagccgccgggtggggagcccctgatggaggactgcgagaagagcagcgacacttgcaaccccctgtcaggcgccttctcaggagtgtccaacattttcagcttctggggggacagtcggggccgccagtaccaggagctccctcgatgccccgcccccacccccagcctcctcaacatccccctctccagcccgggtcggcggccccggggcgacgtggagagcaggctggatgccctccagcgccagctcaacaggctggagacccggctgagtgcagacatggccactgtcctgcagctgctacagaggcagatgacgctggtcccgcccgcctacagtgctgtgaccaccccggggcctggccccacttccacatccccgctgttgcccgtcagccccctccccaccctcaccttggactcgctttctcaggtttcccagttcatggcgtgtgaggagctgcccccgggggccccagagcttccccaagaaggccccacacgacgcctctccctaccgggccagctgggggccctcacctcccagcccctgcacagacacggctcggacccgggcagttagtggggctgcccagtgtggacacgtggctcacccagggatcaaggcgctgctgggccgctccccttggaggccctgctcaggaggccctgaccgtggaaggggagaggaactcgaaagcacagctcctcccccagcccttgggaccatcttctcctgcagtcccctgggccccagtgagaggggcaggggcagggccggcagtaggtggggcctgtggtccccccactgccctgagggcattagctggtctaactgcccggaggcacccggccctgggccttaggcacctcaaggacttttctgctatttactgctcttattgttaaggataataattaaggatcatatgaataattaatgaagatgctgatgactatgaataataaataattatcctgaggaga

SEQ ID NO: 437 - DNA, 3884 bp, Homo sapiens
  source 1..3884: mol_type = genomic DNA
  misc_feature 1..3884: note = cDNA of KCNH2 gene SNP c.211G>T (p.Gly71Trp)
atgccggtgcggaggggccacgtcgcgccgcagaacaccttcctggacaccatcatccgcaagtttgagggccagagccgtaagttcatcatcgccaacgctcgggtggagaactgcgccgtcatctactgcaacgacggcttctgcgagctgtgcggctactcgcgggccgaggtgatgcagcgaccctgcacctgcgacttcctgcactggccgcgcacgcagcgccgcgctgccgcgcagatcgcgcaggcactgctgggcgccgaggagcgcaaagtggaaatcgccttctaccggaaagatgggagctgcttcctatgtctggtggatgtggtgcccgtgaagaacgaggatggggctgtcatcatgttcatcctcaatttcgaggtggtgatggagaaggacatggtggggtccccggctcatgacaccaaccaccggggcccccccaccagctggctggccccaggccgcgccaagaccttccgcctgaagctgcccgcgctgctggcgctgacggcccgggagtcgtcggtgcggtcgggcggcgcgggcggcgcgggcgccccgggggccgtggtggtggacgtggacctgacgcccgcggcacccagcagcgagtcgctggccctggacgaagtgacagccatggacaaccacgtggcagggctcgggcccgcggaggagcggcgtgcgctggtgggtcccggctctccgccccgcagcgcgcccggccagctcccatcgccccgggcgcacagcctcaaccccgacgcctcgggctccagctgcagcctggcccggacgcgctcccgagaaagctgcgccagcgtgcgccgcgcctcgtcggccgacgacatcgaggccatgcgcgccggggtgctgcccccgccaccgcgccacgccagcaccggggccatgcacccactgcgcagcggcttgctcaactccacctcggactccgacctcgtgcgctaccgcaccattagcaagattccccaaatcaccctcaactttgtggacctcaagggcgaccccttcttggcttcgcccaccagtgaccgtgagatcatagcacctaagataaaggagcgaacccacaatgtcactgagaaggtcacccaggtcctgtccctgggcgccgacgtgctgcctgagtacaagctgcaggcaccgcgcatccaccgctggaccatcctgcattacagccccttcaaggccgtgtgggactggctcatcctgctgctggtcatctacacggctgtcttcacaccctactcggctgccttcctgctgaaggagacggaagaaggcccgcctgctaccgagtgtggctacgcctgccagccgctggctgtggtggacctcatcgtggacatcatgttcattgtggacatcctcatcaacttccgcaccacctacgtcaatgccaacgaggaggtggtcagccaccccggccgcatcgccgtccactacttcaagggctggttcctcatcgacatggtggccgccatccccttcgacctgctcatcttcggctctggctctgaggagctgatcgggctgctgaagactgcgcggctgctgcggctggtgcgcgtggcgcggaagctggatcgctactcagagtacggcgcggccgtgctgttcttgctcatgtgcacctttgcgctcatcgcgcactggctagcctgcatctggtacgccatcggcaacatggagcagccacacatggactcacgcatcggctggctgcacaacctgggcgaccagataggcaaaccctacaacagcagcggcctgggcggcccctccatcaaggacaagtatgtgacggcgctctacttcaccttcagcagcctcaccagtgtgggcttcggcaacgtctctcccaacaccaactcagagaagatcttctccatctgcgtcatgctcattggctccctcatgtatgctagcatcttcggcaacgtgtcggccatcatccagcggctgtactcgggcacagcccgctaccacacacagatgctgcgggtgcgggagttcatccgcttccaccagatccccaatcccctgcgccagcgcctcgaggagtacttccagcacgcctggtcctacaccaacggcatcgacatgaacgcggtgctgaagggcttccctgagtgcctgcaggctgacatctgcctgcacctgaaccgctcactgctgcagcactgcaaacccttccgaggggccaccaagggctgccttcgggccctggccatgaagttcaagaccacacatgcaccgccaggggacacactggtgcatgctggggacctgctcaccgccctgtacttcatctcccggggctccatcgagatcctgcggggcgacgtcgtcgtggccatcctggggaagaatgacatctttggggagcctctgaacctgtatgcaaggcctggcaagtcgaacggggatgtgcgggccctcacctactgtgacctacacaagatccatcgggacgacctgctggaggtgctggacatgtaccctgagttctccgaccacttctggtccagcctggagatcaccttcaacctgcgagataccaacatgatcccgggctcccccggcagtacggagttagagggtggcttcagtcggcaacgcaagcgcaagttgtccttccgcaggcgcacggacaaggacacggagcagccaggggaggtgtcggccttggggccgggccgggcgggggcagggccgagtagccggggccggccgggggggccgtggggggagagcccgtccagtggcccctccagccctgagagcagtgaggatgagggcccaggccgcagctccagccccctccgcctggtgcccttctccagccccaggccccccggagagccgccgggtggggagcccctgatggaggactgcgagaagagcagcgacacttgcaaccccctgtcaggcgccttctcaggagtgtccaacattttcagcttctggggggacagtcggggccgccagtaccaggagctccctcgatgccccgcccccacccccagcctcctcaacatccccctctccagcccgggtcggcggccccggggcgacgtggagagcaggctggatgccctccagcgccagctcaacaggctggagacccggctgagtgcagacatggccactgtcctgcagctgctacagaggcagatgacgctggtcccgcccgcctacagtgctgtgaccaccccggggcctggccccacttccacatccccgctgttgcccgtcagccccctccccaccctcaccttggactcgctttctcaggtttcccagttcatggcgtgtgaggagctgcccccgggggccccagagcttccccaagaaggccccacacgacgcctctccctaccgggccagctgggggccctcacctcccagcccctgcacagacacggctcggacccgggcagttagtggggctgcccagtgtggacacgtggctcacccagggatcaaggcgctgctgggccgctccccttggaggccctgctcaggaggccctgaccgtggaaggggagaggaactcgaaagcacagctcctcccccagcccttgggaccatcttctcctgcagtcccctgggccccagtgagaggggcaggggcagggccggcagtaggtggggcctgtggtccccccactgccctgagggcattagctggtctaactgcccggaggcacccggccctgggccttaggcacctcaaggacttttctgctatttactgctcttattgttaaggataataattaaggatcatatgaataattaatgaagatgctgatgactatgaataataaataattatcctgaggaga

SEQ ID NO: 438 - DNA, 3884 bp, Homo sapiens
  source 1..3884: mol_type = genomic DNA
  misc_feature 1..3884: note = cDNA of KCNH2 gene SNP c.2122A>G (p.Thr708Ala)
atgccggtgcggaggggccacgtcgcgccgcagaacaccttcctggacaccatcatccgcaagtttgagggccagagccgtaagttcatcatcgccaacgctcgggtggagaactgcgccgtcatctactgcaacgacggcttctgcgagctgtgcggctactcgcgggccgaggtgatgcagcgaccctgcacctgcgacttcctgcacgggccgcgcacgcagcgccgcgctgccgcgcagatcgcgcaggcactgctgggcgccgaggagcgcaaagtggaaatcgccttctaccggaaagatgggagctgcttcctatgtctggtggatgtggtgcccgtgaagaacgaggatggggctgtcatcatgttcatcctcaatttcgaggtggtgatggagaaggacatggtggggtccccggctcatgacaccaaccaccggggcccccccaccagctggctggccccaggccgcgccaagaccttccgcctgaagctgcccgcgctgctggcgctgacggcccgggagtcgtcggtgcggtcgggcggcgcgggcggcgcgggcgccccgggggccgtggtggtggacgtggacctgacgcccgcggcacccagcagcgagtcgctggccctggacgaagtgacagccatggacaaccacgtggcagggctcgggcccgcggaggagcggcgtgcgctggtgggtcccggctctccgccccgcagcgcgcccggccagctcccatcgccccgggcgcacagcctcaaccccgacgcctcgggctccagctgcagcctggcccggacgcgctcccgagaaagctgcgccagcgtgcgccgcgcctcgtcggccgacgacatcgaggccatgcgcgccggggtgctgcccccgccaccgcgccacgccagcaccggggccatgcacccactgcgcagcggcttgctcaactccacctcggactccgacctcgtgcgctaccgcaccattagcaagattccccaaatcaccctcaactttgtggacctcaagggcgaccccttcttggcttcgcccaccagtgaccgtgagatcatagcacctaagataaaggagcgaacccacaatgtcactgagaaggtcacccaggtcctgtccctgggcgccgacgtgctgcctgagtacaagctgcaggcaccgcgcatccaccgctggaccatcctgcattacagccccttcaaggccgtgtgggactggctcatcctgctgctggtcatctacacggctgtcttcacaccctactcggctgccttcctgctgaaggagacggaagaaggcccgcctgctaccgagtgtggctacgcctgccagccgctggctgtggtggacctcatcgtggacatcatgttcattgtggacatcctcatcaacttccgcaccacctacgtcaatgccaacgaggaggtggtcagccaccccggccgcatcgccgtccactacttcaagggctggttcctcatcgacatggtggccgccatccccttcgacctgctcatcttcggctctggctctgaggagctgatcgggctgctgaagactgcgcggctgctgcggctggtgcgcgtggcgcggaagctggatcgctactcagagtacggcgcggccgtgctgttcttgctcatgtgcacctttgcgctcatcgcgcactggctagcctgcatctggtacgccatcggcaacatggagcagccacacatggactcacgcatcggctggctgcacaacctgggcgaccagataggcaaaccctacaacagcagcggcctgggcggcccctccatcaaggacaagtatgtgacggcgctctacttcaccttcagcagcctcaccagtgtgggcttcggcaacgtctctcccaacaccaactcagagaagatcttctccatctgcgtcatgctcattggctccctcatgtatgctagcatcttcggcaacgtgtcggccatcatccagcggctgtactcgggcacagcccgctaccacacacagatgctgcgggtgcgggagttcatccgcttccaccagatccccaatcccctgcgccagcgcctcgaggagtacttccagcacgcctggtcctacgccaacggcatcgacatgaacgcggtgctgaagggcttccctgagtgcctgcaggctgacatctgcctgcacctgaaccgctcactgctgcagcactgcaaacccttccgaggggccaccaagggctgccttcgggccctggccatgaagttcaagaccacacatgcaccgccaggggacacactggtgcatgctggggacctgctcaccgccctgtacttcatctcccggggctccatcgagatcctgcggggcgacgtcgtcgtggccatcctggggaagaatgacatctttggggagcctctgaacctgtatgcaaggcctggcaagtcgaacggggatgtgcgggccctcacctactgtgacctacacaagatccatcgggacgacctgctggaggtgctggacatgtaccctgagttctccgaccacttctggtccagcctggagatcaccttcaacctgcgagataccaacatgatcccgggctcccccggcagtacggagttagagggtggcttcagtcggcaacgcaagcgcaagttgtccttccgcaggcgcacggacaaggacacggagcagccaggggaggtgtcggccttggggccgggccgggcgggggcagggccgagtagccggggccggccgggggggccgtggggggagagcccgtccagtggcccctccagccctgagagcagtgaggatgagggcccaggccgcagctccagccccctccgcctggtgcccttctccagccccaggccccccggagagccgccgggtggggagcccctgatggaggactgcgagaagagcagcgacacttgcaaccccctgtcaggcgccttctcaggagtgtccaacattttcagcttctggggggacagtcggggccgccagtaccaggagctccctcgatgccccgcccccacccccagcctcctcaacatccccctctccagcccgggtcggcggccccggggcgacgtggagagcaggctggatgccctccagcgccagctcaacaggctggagacccggctgagtgcagacatggccactgtcctgcagctgctacagaggcagatgacgctggtcccgcccgcctacagtgctgtgaccaccccggggcctggccccacttccacatccccgctgttgcccgtcagccccctccccaccctcaccttggactcgctttctcaggtttcccagttcatggcgtgtgaggagctgcccccgggggccccagagcttccccaagaaggccccacacgacgcctctccctaccgggccagctgggggccctcacctcccagcccctgcacagacacggctcggacccgggcagttagtggggctgcccagtgtggacacgtggctcacccagggatcaaggcgctgctgggccgctccccttggaggccctgctcaggaggccctgaccgtggaaggggagaggaactcgaaagcacagctcctcccccagcccttgggaccatcttctcctgcagtcccctgggccccagtgagaggggcaggggcagggccggcagtaggtggggcctgtggtccccccactgccctgagggcattagctggtctaactgcccggaggcacccggccctgggccttaggcacctcaaggacttttctgctatttactgctcttattgttaaggataataattaaggatcatatgaataattaatgaagatgctgatgactatgaataataaataattatcctgaggaga

SEQ ID NO: 439 - DNA, 3884 bp, Homo sapiens
  source 1..3884: mol_type = genomic DNA
  misc_feature 1..3884: note = cDNA of KCNH2 gene SNP c.2128G>A (p.Gly710Ser)
atgccggtgcggaggggccacgtcgcgccgcagaacaccttcctggacaccatcatccgcaagtttgagggccagagccgtaagttcatcatcgccaacgctcgggtggagaactgcgccgtcatctactgcaacgacggcttctgcgagctgtgcggctactcgcgggccgaggtgatgcagcgaccctgcacctgcgacttcctgcacgggccgcgcacgcagcgccgcgctgccgcgcagatcgcgcaggcactgctgggcgccgaggagcgcaaagtggaaatcgccttctaccggaaagatgggagctgcttcctatgtctggtggatgtggtgcccgtgaagaacgaggatggggctgtcatcatgttcatcctcaatttcgaggtggtgatggagaaggacatggtggggtccccggctcatgacaccaaccaccggggcccccccaccagctggctggccccaggccgcgccaagaccttccgcctgaagctgcccgcgctgctggcgctgacggcccgggagtcgtcggtgcggtcgggcggcgcgggcggcgcgggcgccccgggggccgtggtggtggacgtggacctgacgcccgcggcacccagcagcgagtcgctggccctggacgaagtgacagccatggacaaccacgtggcagggctcgggcccgcggaggagcggcgtgcgctggtgggtcccggctctccgccccgcagcgcgcccggccagctcccatcgccccgggcgcacagcctcaaccccgacgcctcgggctccagctgcagcctggcccggacgcgctcccgagaaagctgcgccagcgtgcgccgcgcctcgtcggccgacgacatcgaggccatgcgcgccggggtgctgcccccgccaccgcgccacgccagcaccggggccatgcacccactgcgcagcggcttgctcaactccacctcggactccgacctcgtgcgctaccgcaccattagcaagattccccaaatcaccctcaactttgtggacctcaagggcgaccccttcttggcttcgcccaccagtgaccgtgagatcatagcacctaagataaaggagcgaacccacaatgtcactgagaaggtcacccaggtcctgtccctgggcgccgacgtgctgcctgagtacaagctgcaggcaccgcgcatccaccgctggaccatcctgcattacagccccttcaaggccgtgtgggactggctcatcctgctgctggtcatctacacggctgtcttcacaccctactcggctgccttcctgctgaaggagacggaagaaggcccgcctgctaccgagtgtggctacgcctgccagccgctggctgtggtggacctcatcgtggacatcatgttcattgtggacatcctcatcaacttccgcaccacctacgtcaatgccaacgaggaggtggtcagccaccccggccgcatcgccgtccactacttcaagggctggttcctcatcgacatggtggccgccatccccttcgacctgctcatcttcggctctggctctgaggagctgatcgggctgctgaagactgcgcggctgctgcggctggtgcgcgtggcgcggaagctggatcgctactcagagtacggcgcggccgtgctgttcttgctcatgtgcacctttgcgctcatcgcgcactggctagcctgcatctggtacgccatcggcaacatggagcagccacacatggactcacgcatcggctggctgcacaacctgggcgaccagataggcaaaccctacaacagcagcggcctgggcggcccctccatcaaggacaagtatgtgacggcgctctacttcaccttcagcagcctcaccagtgtgggcttcggcaacgtctctcccaacaccaactcagagaagatcttctccatctgcgtcatgctcattggctccctcatgtatgctagcatcttcggcaacgtgtcggccatcatccagcggctgtactcgggcacagcccgctaccacacacagatgctgcgggtgcgggagttcatccgcttccaccagatccccaatcccctgcgccagcgcctcgaggagtacttccagcacgcctggtcctacaccaacagcatcgacatgaacgcggtgctgaagggcttccctgagtgcctgcaggctgacatctgcctgcacctgaaccgctcactgctgcagcactgcaaacccttccgaggggccaccaagggctgccttcgggccctggccatgaagttcaagaccacacatgcaccgccaggggacacactggtgcatgctggggacctgctcaccgccctgtacttcatctcccggggctccatcgagatcctgcggggcgacgtcgtcgtggccatcctggggaagaatgacatctttggggagcctctgaacctgtatgcaaggcctggcaagtcgaacggggatgtgcgggccctcacctactgtgacctacacaagatccatcgggacgacctgctggaggtgctggacatgtaccctgagttctccgaccacttctggtccagcctggagatcaccttcaacctgcgagataccaacatgatcccgggctcccccggcagtacggagttagagggtggcttcagtcggcaacgcaagcgcaagttgtccttccgcaggcgcacggacaaggacacggagcagccaggggaggtgtcggccttggggccgggccgggcgggggcagggccgagtagccggggccggccgggggggccgtggggggagagcccgtccagtggcccctccagccctgagagcagtgaggatgagggcccaggccgcagctccagccccctccgcctggtgcccttctccagccccaggccccccggagagccgccgggtggggagcccctgatggaggactgcgagaagagcagcgacacttgcaaccccctgtcaggcgccttctcaggagtgtccaacattttcagcttctggggggacagtcggggccgccagtaccaggagctccctcgatgccccgcccccacccccagcctcctcaacatccccctctccagcccgggtcggcggccccggggcgacgtggagagcaggctggatgccctccagcgccagctcaacaggctggagacccggctgagtgcagacatggccactgtcctgcagctgctacagaggcagatgacgctggtcccgcccgcctacagtgctgtgaccaccccggggcctggccccacttccacatccccgctgttgcccgtcagccccctccccaccctcaccttggactcgctttctcaggtttcccagttcatggcgtgtgaggagctgcccccgggggccccagagcttccccaagaaggccccacacgacgcctctccctaccgggccagctgggggccctcacctcccagcccctgcacagacacggctcggacccgggcagttagtggggctgcccagtgtggacacgtggctcacccagggatcaaggcgctgctgggccgctccccttggaggccctgctcaggaggccctgaccgtggaaggggagaggaactcgaaagcacagctcctcccccagcccttgggaccatcttctcctgcagtcccctgggccccagtgagaggggcaggggcagggccggcagtaggtggggcctgtggtccccccactgccctgagggcattagctggtctaactgcccggaggcacccggccctgggccttaggcacctcaaggacttttctgctatttactgctcttattgttaaggataataattaaggatcatatgaataattaatgaagatgctgatgactatgaataataaataattatcctgaggaga

SEQ ID NO: 440 - DNA, 3884 bp, Homo sapiens
  source 1..3884: mol_type = genomic DNA
  misc_feature 1..3884: note = cDNA of KCNH2 gene SNP c.212G>A (p.Gly71Glu)
atgccggtgcggaggggccacgtcgcgccgcagaacaccttcctggacaccatcatccgcaagtttgagggccagagccgtaagttcatcatcgccaacgctcgggtggagaactgcgccgtcatctactgcaacgacggcttctgcgagctgtgcggctactcgcgggccgaggtgatgcagcgaccctgcacctgcgacttcctgcacgagccgcgcacgcagcgccgcgctgccgcgcagatcgcgcaggcactgctgggcgccgaggagcgcaaagtggaaatcgccttctaccggaaagatgggagctgcttcctatgtctggtggatgtggtgcccgtgaagaacgaggatggggctgtcatcatgttcatcctcaatttcgaggtggtgatggagaaggacatggtggggtccccggctcatgacaccaaccaccggggcccccccaccagctggctggccccaggccgcgccaagaccttccgcctgaagctgcccgcgctgctggcgctgacggcccgggagtcgtcggtgcggtcgggcggcgcgggcggcgcgggcgccccgggggccgtggtggtggacgtggacctgacgcccgcggcacccagcagcgagtcgctggccctggacgaagtgacagccatggacaaccacgtggcagggctcgggcccgcggaggagcggcgtgcgctggtgggtcccggctctccgccccgcagcgcgcccggccagctcccatcgccccgggcgcacagcctcaaccccgacgcctcgggctccagctgcagcctggcccggacgcgctcccgagaaagctgcgccagcgtgcgccgcgcctcgtcggccgacgacatcgaggccatgcgcgccggggtgctgcccccgccaccgcgccacgccagcaccggggccatgcacccactgcgcagcggcttgctcaactccacctcggactccgacctcgtgcgctaccgcaccattagcaagattccccaaatcaccctcaactttgtggacctcaagggcgaccccttcttggcttcgcccaccagtgaccgtgagatcatagcacctaagataaaggagcgaacccacaatgtcactgagaaggtcacccaggtcctgtccctgggcgccgacgtgctgcctgagtacaagctgcaggcaccgcgcatccaccgctggaccatcctgcattacagccccttcaaggccgtgtgggactggctcatcctgctgctggtcatctacacggctgtcttcacaccctactcggctgccttcctgctgaaggagacggaagaaggcccgcctgctaccgagtgtggctacgcctgccagccgctggctgtggtggacctcatcgtggacatcatgttcattgtggacatcctcatcaacttccgcaccacctacgtcaatgccaacgaggaggtggtcagccaccccggccgcatcgccgtccactacttcaagggctggttcctcatcgacatggtggccgccatccccttcgacctgctcatcttcggctctggctctgaggagctgatcgggctgctgaagactgcgcggctgctgcggctggtgcgcgtggcgcggaagctggatcgctactcagagtacggcgcggccgtgctgttcttgctcatgtgcacctttgcgctcatcgcgcactggctagcctgcatctggtacgccatcggcaacatggagcagccacacatggactcacgcatcggctggctgcacaacctgggcgaccagataggcaaaccctacaacagcagcggcctgggcggcccctccatcaaggacaagtatgtgacggcgctctacttcaccttcagcagcctcaccagtgtgggcttcggcaacgtctctcccaacaccaactcagagaagatcttctccatctgcgtcatgctcattggctccctcatgtatgctagcatcttcggcaacgtgtcggccatcatccagcggctgtactcgggcacagcccgctaccacacacagatgctgcgggtgcgggagttcatccgcttccaccagatccccaatcccctgcgccagcgcctcgaggagtacttccagcacgcctggtcctacaccaacggcatcgacatgaacgcggtgctgaagggcttccctgagtgcctgcaggctgacatctgcctgcacctgaaccgctcactgctgcagcactgcaaacccttccgaggggccaccaagggctgccttcgggccctggccatgaagttcaagaccacacatgcaccgccaggggacacactggtgcatgctggggacctgctcaccgccctgtacttcatctcccggggctccatcgagatcctgcggggcgacgtcgtcgtggccatcctggggaagaatgacatctttggggagcctctgaacctgtatgcaaggcctggcaagtcgaacggggatgtgcgggccctcacctactgtgacctacacaagatccatcgggacgacctgctggaggtgctggacatgtaccctgagttctccgaccacttctggtccagcctggagatcaccttcaacctgcgagataccaacatgatcccgggctcccccggcagtacggagttagagggtggcttcagtcggcaacgcaagcgcaagttgtccttccgcaggcgcacggacaaggacacggagcagccaggggaggtgtcggccttggggccgggccgggcgggggcagggccgagtagccggggccggccgggggggccgtggggggagagcccgtccagtggcccctccagccctgagagcagtgaggatgagggcccaggccgcagctccagccccctccgcctggtgcccttctccagccccaggccccccggagagccgccgggtggggagcccctgatggaggactgcgagaagagcagcgacacttgcaaccccctgtcaggcgccttctcaggagtgtccaacattttcagcttctggggggacagtcggggccgccagtaccaggagctccctcgatgccccgcccccacccccagcctcctcaacatccccctctccagcccgggtcggcggccccggggcgacgtggagagcaggctggatgccctccagcgccagctcaacaggctggagacccggctgagtgcagacatggccactgtcctgcagctgctacagaggcagatgacgctggtcccgcccgcctacagtgctgtgaccaccccggggcctggccccacttccacatccccgctgttgcccgtcagccccctccccaccctcaccttggactcgctttctcaggtttcccagttcatggcgtgtgaggagctgcccccgggggccccagagcttccccaagaaggccccacacgacgcctctccctaccgggccagctgggggccctcacctcccagcccctgcacagacacggctcggacccgggcagttagtggggctgcccagtgtggacacgtggctcacccagggatcaaggcgctgctgggccgctccccttggaggccctgctcaggaggccctgaccgtggaaggggagaggaactcgaaagcacagctcctcccccagcccttgggaccatcttctcctgcagtcccctgggccccagtgagaggggcaggggcagggccggcagtaggtggggcctgtggtccccccactgccctgagggcattagctggtctaactgcccggaggcacccggccctgggccttaggcacctcaaggacttttctgctatttactgctcttattgttaaggataataattaaggatcatatgaataattaatgaagatgctgatgactatgaataataaataattatcctgaggaga

SEQ ID NO: 441 - DNA, 3884 bp, Homo sapiens
  source 1..3884: mol_type = genomic DNA
  misc_feature 1..3884: note = cDNA of KCNH2 gene SNP c.2131A>G (p.Ile711Val)
atgccggtgcggaggggccacgtcgcgccgcagaacaccttcctggacaccatcatccgcaagtttgagggccagagccgtaagttcatcatcgccaacgctcgggtggagaactgcgccgtcatctactgcaacgacggcttctgcgagctgtgcggctactcgcgggccgaggtgatgcagcgaccctgcacctgcgacttcctgcacgggccgcgcacgcagcgccgcgctgccgcgcagatcgcgcaggcactgctgggcgccgaggagcgcaaagtggaaatcgccttctaccggaaagatgggagctgcttcctatgtctggtggatgtggtgcccgtgaagaacgaggatggggctgtcatcatgttcatcctcaatttcgaggtggtgatggagaaggacatggtggggtccccggctcatgacaccaaccaccggggcccccccaccagctggctggccccaggccgcgccaagaccttccgcctgaagctgcccgcgctgctggcgctgacggcccgggagtcgtcggtgcggtcgggcggcgcgggcggcgcgggcgccccgggggccgtggtggtggacgtggacctgacgcccgcggcacccagcagcgagtcgctggccctggacgaagtgacagccatggacaaccacgtggcagggctcgggcccgcggaggagcggcgtgcgctggtgggtcccggctctccgccccgcagcgcgcccggccagctcccatcgccccgggcgcacagcctcaaccccgacgcctcgggctccagctgcagcctggcccggacgcgctcccgagaaagctgcgccagcgtgcgccgcgcctcgtcggccgacgacatcgaggccatgcgcgccggggtgctgcccccgccaccgcgccacgccagcaccggggccatgcacccactgcgcagcggcttgctcaactccacctcggactccgacctcgtgcgctaccgcaccattagcaagattccccaaatcaccctcaactttgtggacctcaagggcgaccccttcttggcttcgcccaccagtgaccgtgagatcatagcacctaagataaaggagcgaacccacaatgtcactgagaaggtcacccaggtcctgtccctgggcgccgacgtgctgcctgagtacaagctgcaggcaccgcgcatccaccgctggaccatcctgcattacagccccttcaaggccgtgtgggactggctcatcctgctgctggtcatctacacggctgtcttcacaccctactcggctgccttcctgctgaaggagacggaagaaggcccgcctgctaccgagtgtggctacgcctgccagccgctggctgtggtggacctcatcgtggacatcatgttcattgtggacatcctcatcaacttccgcaccacctacgtcaatgccaacgaggaggtggtcagccaccccggccgcatcgccgtccactacttcaagggctggttcctcatcgacatggtggccgccatccccttcgacctgctcatcttcggctctggctctgaggagctgatcgggctgctgaagactgcgcggctgctgcggctggtgcgcgtggcgcggaagctggatcgctactcagagtacggcgcggccgtgctgttcttgctcatgtgcacctttgcgctcatcgcgcactggctagcctgcatctggtacgccatcggcaacatggagcagccacacatggactcacgcatcggctggctgcacaacctgggcgaccagataggcaaaccctacaacagcagcggcctgggcggcccctccatcaaggacaagtatgtgacggcgctctacttcaccttcagcagcctcaccagtgtgggcttcggcaacgtctctcccaacaccaactcagagaagatcttctccatctgcgtcatgctcattggctccctcatgtatgctagcatcttcggcaacgtgtcggccatcatccagcggctgtactcgggcacagcccgctaccacacacagatgctgcgggtgcgggagttcatccgcttccaccagatccccaatcccctgcgccagcgcctcgaggagtacttccagcacgcctggtcctacaccaacggcgtcgacatgaacgcggtgctgaagggcttccctgagtgcctgcaggctgacatctgcctgcacctgaaccgctcactgctgcagcactgcaaacccttccgaggggccaccaagggctgccttcgggccctggccatgaagttcaagaccacacatgcaccgccaggggacacactggtgcatgctggggacctgctcaccgccctgtacttcatctcccggggctccatcgagatcctgcggggcgacgtcgtcgtggccatcctggggaagaatgacatctttggggagcctctgaacctgtatgcaaggcctggcaagtcgaacggggatgtgcgggccctcacctactgtgacctacacaagatccatcgggacgacctgctggaggtgctggacatgtaccctgagttctccgaccacttctggtccagcctggagatcaccttcaacctgcgagataccaacatgatcccgggctcccccggcagtacggagttagagggtggcttcagtcggcaacgcaagcgcaagttgtccttccgcaggcgcacggacaaggacacggagcagccaggggaggtgtcggccttggggccgggccgggcgggggcagggccgagtagccggggccggccgggggggccgtggggggagagcccgtccagtggcccctccagccctgagagcagtgaggatgagggcccaggccgcagctccagccccctccgcctggtgcccttctccagccccaggccccccggagagccgccgggtggggagcccctgatggaggactgcgagaagagcagcgacacttgcaaccccctgtcaggcgccttctcaggagtgtccaacattttcagcttctggggggacagtcggggccgccagtaccaggagctccctcgatgccccgcccccacccccagcctcctcaacatccccctctccagcccgggtcggcggccccggggcgacgtggagagcaggctggatgccctccagcgccagctcaacaggctggagacccggctgagtgcagacatggccactgtcctgcagctgctacagaggcagatgacgctggtcccgcccgcctacagtgctgtgaccaccccggggcctggccccacttccacatccccgctgttgcccgtcagccccctccccaccctcaccttggactcgctttctcaggtttcccagttcatggcgtgtgaggagctgcccccgggggccccagagcttccccaagaaggccccacacgacgcctctccctaccgggccagctgggggccctcacctcccagcccctgcacagacacggctcggacccgggcagttagtggggctgcccagtgtggacacgtggctcacccagggatcaaggcgctgctgggccgctccccttggaggccctgctcaggaggccctgaccgtggaaggggagaggaactcgaaagcacagctcctcccccagcccttgggaccatcttctcctgcagtcccctgggccccagtgagaggggcaggggcagggccggcagtaggtggggcctgtggtccccccactgccctgagggcattagctggtctaactgcccggaggcacccggccctgggccttaggcacctcaaggacttttctgctatttactgctcttattgttaaggataataattaaggatcatatgaataattaatgaagatgctgatgactatgaataataaataattatcctgaggaga

SEQ ID NO: 442 - DNA, 3884 bp, Homo sapiens
  source 1..3884: mol_type = genomic DNA
  misc_feature 1..3884: note = cDNA of KCNH2 gene SNP c.2144C>T (p.Ala715Val)
atgccggtgcggaggggccacgtcgcgccgcagaacaccttcctggacaccatcatccgcaagtttgagggccagagccgtaagttcatcatcgccaacgctcgggtggagaactgcgccgtcatctactgcaacgacggcttctgcgagctgtgcggctactcgcgggccgaggtgatgcagcgaccctgcacctgcgacttcctgcacgggccgcgcacgcagcgccgcgctgccgcgcagatcgcgcaggcactgctgggcgccgaggagcgcaaagtggaaatcgccttctaccggaaagatgggagctgcttcctatgtctggtggatgtggtgcccgtgaagaacgaggatggggctgtcatcatgttcatcctcaatttcgaggtggtgatggagaaggacatggtggggtccccggctcatgacaccaaccaccggggcccccccaccagctggctggccccaggccgcgccaagaccttccgcctgaagctgcccgcgctgctggcgctgacggcccgggagtcgtcggtgcggtcgggcggcgcgggcggcgcgggcgccccgggggccgtggtggtggacgtggacctgacgcccgcggcacccagcagcgagtcgctggccctggacgaagtgacagccatggacaaccacgtggcagggctcgggcccgcggaggagcggcgtgcgctggtgggtcccggctctccgccccgcagcgcgcccggccagctcccatcgccccgggcgcacagcctcaaccccgacgcctcgggctccagctgcagcctggcccggacgcgctcccgagaaagctgcgccagcgtgcgccgcgcctcgtcggccgacgacatcgaggccatgcgcgccggggtgctgcccccgccaccgcgccacgccagcaccggggccatgcacccactgcgcagcggcttgctcaactccacctcggactccgacctcgtgcgctaccgcaccattagcaagattccccaaatcaccctcaactttgtggacctcaagggcgaccccttcttggcttcgcccaccagtgaccgtgagatcatagcacctaagataaaggagcgaacccacaatgtcactgagaaggtcacccaggtcctgtccctgggcgccgacgtgctgcctgagtacaagctgcaggcaccgcgcatccaccgctggaccatcctgcattacagccccttcaaggccgtgtgggactggctcatcctgctgctggtcatctacacggctgtcttcacaccctactcggctgccttcctgctgaaggagacggaagaaggcccgcctgctaccgagtgtggctacgcctgccagccgctggctgtggtggacctcatcgtggacatcatgttcattgtggacatcctcatcaacttccgcaccacctacgtcaatgccaacgaggaggtggtcagccaccccggccgcatcgccgtccactacttcaagggctggttcctcatcgacatggtggccgccatccccttcgacctgctcatcttcggctctggctctgaggagctgatcgggctgctgaagactgcgcggctgctgcggctggtgcgcgtggcgcggaagctggatcgctactcagagtacggcgcggccgtgctgttcttgctcatgtgcacctttgcgctcatcgcgcactggctagcctgcatctggtacgccatcggcaacatggagcagccacacatggactcacgcatcggctggctgcacaacctgggcgaccagataggcaaaccctacaacagcagcggcctgggcggcccctccatcaaggacaagtatgtgacggcgctctacttcaccttcagcagcctcaccagtgtgggcttcggcaacgtctctcccaacaccaactcagagaagatcttctccatctgcgtcatgctcattggctccctcatgtatgctagcatcttcggcaacgtgtcggccatcatccagcggctgtactcgggcacagcccgctaccacacacagatgctgcgggtgcgggagttcatccgcttccaccagatccccaatcccctgcgccagcgcctcgaggagtacttccagcacgcctggtcctacaccaacggcatcgacatgaacgtggtgctgaagggcttccctgagtgcctgcaggctgacatctgcctgcacctgaaccgctcactgctgcagcactgcaaacccttccgaggggccaccaagggctgccttcgggccctggccatgaagttcaagaccacacatgcaccgccaggggacacactggtgcatgctggggacctgctcaccgccctgtacttcatctcccggggctccatcgagatcctgcggggcgacgtcgtcgtggccatcctggggaagaatgacatctttggggagcctctgaacctgtatgcaaggcctggcaagtcgaacggggatgtgcgggccctcacctactgtgacctacacaagatccatcgggacgacctgctggaggtgctggacatgtaccctgagttctccgaccacttctggtccagcctggagatcaccttcaacctgcgagataccaacatgatcccgggctcccccggcagtacggagttagagggtggcttcagtcggcaacgcaagcgcaagttgtccttccgcaggcgcacggacaaggacacggagcagccaggggaggtgtcggccttggggccgggccgggcgggggcagggccgagtagccggggccggccgggggggccgtggggggagagcccgtccagtggcccctccagccctgagagcagtgaggatgagggcccaggccgcagctccagccccctccgcctggtgcccttctccagccccaggccccccggagagccgccgggtggggagcccctgatggaggactgcgagaagagcagcgacacttgcaaccccctgtcaggcgccttctcaggagtgtccaacattttcagcttctggggggacagtcggggccgccagtaccaggagctccctcgatgccccgcccccacccccagcctcctcaacatccccctctccagcccgggtcggcggccccggggcgacgtggagagcaggctggatgccctccagcgccagctcaacaggctggagacccggctgagtgcagacatggccactgtcctgcagctgctacagaggcagatgacgctggtcccgcccgcctacagtgctgtgaccaccccggggcctggccccacttccacatccccgctgttgcccgtcagccccctccccaccctcaccttggactcgctttctcaggtttcccagttcatggcgtgtgaggagctgcccccgggggccccagagcttccccaagaaggccccacacgacgcctctccctaccgggccagctgggggccctcacctcccagcccctgcacagacacggctcggacccgggcagttagtggggctgcccagtgtggacacgtggctcacccagggatcaaggcgctgctgggccgctccccttggaggccctgctcaggaggccctgaccgtggaaggggagaggaactcgaaagcacagctcctcccccagcccttgggaccatcttctcctgcagtcccctgggccccagtgagaggggcaggggcagggccggcagtaggtggggcctgtggtccccccactgccctgagggcattagctggtctaactgcccggaggcacccggccctgggccttaggcacctcaaggacttttctgctatttactgctcttattgttaaggataataattaaggatcatatgaataattaatgaagatgctgatgactatgaataataaataattatcctgaggaga

SEQ ID NO: 443 - DNA, 3884 bp, Homo sapiens
  source 1..3884: mol_type = genomic DNA
  misc_feature 1..3884: note = cDNA of KCNH2 gene SNP c.214C>T (p.Pro72Ser)
atgccggtgcggaggggccacgtcgcgccgcagaacaccttcctggacaccatcatccgcaagtttgagggccagagccgtaagttcatcatcgccaacgctcgggtggagaactgcgccgtcatctactgcaacgacggcttctgcgagctgtgcggctactcgcgggccgaggtgatgcagcgaccctgcacctgcgacttcctgcacgggtcgcgcacgcagcgccgcgctgccgcgcagatcgcgcaggcactgctgggcgccgaggagcgcaaagtggaaatcgccttctaccggaaagatgggagctgcttcctatgtctggtggatgtggtgcccgtgaagaacgaggatggggctgtcatcatgttcatcctcaatttcgaggtggtgatggagaaggacatggtggggtccccggctcatgacaccaaccaccggggcccccccaccagctggctggccccaggccgcgccaagaccttccgcctgaagctgcccgcgctgctggcgctgacggcccgggagtcgtcggtgcggtcgggcggcgcgggcggcgcgggcgccccgggggccgtggtggtggacgtggacctgacgcccgcggcacccagcagcgagtcgctggccctggacgaagtgacagccatggacaaccacgtggcagggctcgggcccgcggaggagcggcgtgcgctggtgggtcccggctctccgccccgcagcgcgcccggccagctcccatcgccccgggcgcacagcctcaaccccgacgcctcgggctccagctgcagcctggcccggacgcgctcccgagaaagctgcgccagcgtgcgccgcgcctcgtcggccgacgacatcgaggccatgcgcgccggggtgctgcccccgccaccgcgccacgccagcaccggggccatgcacccactgcgcagcggcttgctcaactccacctcggactccgacctcgtgcgctaccgcaccattagcaagattccccaaatcaccctcaactttgtggacctcaagggcgaccccttcttggcttcgcccaccagtgaccgtgagatcatagcacctaagataaaggagcgaacccacaatgtcactgagaaggtcacccaggtcctgtccctgggcgccgacgtgctgcctgagtacaagctgcaggcaccgcgcatccaccgctggaccatcctgcattacagccccttcaaggccgtgtgggactggctcatcctgctgctggtcatctacacggctgtcttcacaccctactcggctgccttcctgctgaaggagacggaagaaggcccgcctgctaccgagtgtggctacgcctgccagccgctggctgtggtggacctcatcgtggacatcatgttcattgtggacatcctcatcaacttccgcaccacctacgtcaatgccaacgaggaggtggtcagccaccccggccgcatcgccgtccactacttcaagggctggttcctcatcgacatggtggccgccatccccttcgacctgctcatcttcggctctggctctgaggagctgatcgggctgctgaagactgcgcggctgctgcggctggtgcgcgtggcgcggaagctggatcgctactcagagtacggcgcggccgtgctgttcttgctcatgtgcacctttgcgctcatcgcgcactggctagcctgcatctggtacgccatcggcaacatggagcagccacacatggactcacgcatcggctggctgcacaacctgggcgaccagataggcaaaccctacaacagcagcggcctgggcggcccctccatcaaggacaagtatgtgacggcgctctacttcaccttcagcagcctcaccagtgtgggcttcggcaacgtctctcccaacaccaactcagagaagatcttctccatctgcgtcatgctcattggctccctcatgtatgctagcatcttcggcaacgtgtcggccatcatccagcggctgtactcgggcacagcccgctaccacacacagatgctgcgggtgcgggagttcatccgcttccaccagatccccaatcccctgcgccagcgcctcgaggagtacttccagcacgcctggtcctacaccaacggcatcgacatgaacgcggtgctgaagggcttccctgagtgcctgcaggctgacatctgcctgcacctgaaccgctcactgctgcagcactgcaaacccttccgaggggccaccaagggctgccttcgggccctggccatgaagttcaagaccacacatgcaccgccaggggacacactggtgcatgctggggacctgctcaccgccctgtacttcatctcccggggctccatcgagatcctgcggggcgacgtcgtcgtggccatcctggggaagaatgacatctttggggagcctctgaacctgtatgcaaggcctggcaagtcgaacggggatgtgcgggccctcacctactgtgacctacacaagatccatcgggacgacctgctggaggtgctggacatgtaccctgagttctccgaccacttctggtccagcctggagatcaccttcaacctgcgagataccaacatgatcccgggctcccccggcagtacggagttagagggtggcttcagtcggcaacgcaagcgcaagttgtccttccgcaggcgcacggacaaggacacggagcagccaggggaggtgtcggccttggggccgggccgggcgggggcagggccgagtagccggggccggccgggggggccgtggggggagagcccgtccagtggcccctccagccctgagagcagtgaggatgagggcccaggccgcagctccagccccctccgcctggtgcccttctccagccccaggccccccggagagccgccgggtggggagcccctgatggaggactgcgagaagagcagcgacacttgcaaccccctgtcaggcgccttctcaggagtgtccaacattttcagcttctggggggacagtcggggccgccagtaccaggagctccctcgatgccccgcccccacccccagcctcctcaacatccccctctccagcccgggtcggcggccccggggcgacgtggagagcaggctggatgccctccagcgccagctcaacaggctggagacccggctgagtgcagacatggccactgtcctgcagctgctacagaggcagatgacgctggtcccgcccgcctacagtgctgtgaccaccccggggcctggccccacttccacatccccgctgttgcccgtcagccccctccccaccctcaccttggactcgctttctcaggtttcccagttcatggcgtgtgaggagctgcccccgggggccccagagcttccccaagaaggccccacacgacgcctctccctaccgggccagctgggggccctcacctcccagcccctgcacagacacggctcggacccgggcagttagtggggctgcccagtgtggacacgtggctcacccagggatcaaggcgctgctgggccgctccccttggaggccctgctcaggaggccctgaccgtggaaggggagaggaactcgaaagcacagctcctcccccagcccttgggaccatcttctcctgcagtcccctgggccccagtgagaggggcaggggcagggccggcagtaggtggggcctgtggtccccccactgccctgagggcattagctggtctaactgcccggaggcacccggccctgggccttaggcacctcaaggacttttctgctatttactgctcttattgttaaggataataattaaggatcatatgaataattaatgaagatgctgatgactatgaataataaataattatcctgaggaga

SEQ ID NO: 444 - DNA, 3884 bp, Homo sapiens
  source 1..3884: mol_type = genomic DNA
  misc_feature 1..3884: note = cDNA of KCNH2 gene SNP c.215C>A (p.Pro72Gln)
atgccggtgcggaggggccacgtcgcgccgcagaacaccttcctggacaccatcatccgcaagtttgagggccagagccgtaagttcatcatcgccaacgctcgggtggagaactgcgccgtcatctactgcaacgacggcttctgcgagctgtgcggctactcgcgggccgaggtgatgcagcgaccctgcacctgcgacttcctgcacgggcagcgcacgcagcgccgcgctgccgcgcagatcgcgcaggcactgctgggcgccgaggagcgcaaagtggaaatcgccttctaccggaaagatgggagctgcttcctatgtctggtggatgtggtgcccgtgaagaacgaggatggggctgtcatcatgttcatcctcaatttcgaggtggtgatggagaaggacatggtggggtccccggctcatgacaccaaccaccggggcccccccaccagctggctggccccaggccgcgccaagaccttccgcctgaagctgcccgcgctgctggcgctgacggcccgggagtcgtcggtgcggtcgggcggcgcgggcggcgcgggcgccccgggggccgtggtggtggacgtggacctgacgcccgcggcacccagcagcgagtcgctggccctggacgaagtgacagccatggacaaccacgtggcagggctcgggcccgcggaggagcggcgtgcgctggtgggtcccggctctccgccccgcagcgcgcccggccagctcccatcgccccgggcgcacagcctcaaccccgacgcctcgggctccagctgcagcctggcccggacgcgctcccgagaaagctgcgccagcgtgcgccgcgcctcgtcggccgacgacatcgaggccatgcgcgccggggtgctgcccccgccaccgcgccacgccagcaccggggccatgcacccactgcgcagcggcttgctcaactccacctcggactccgacctcgtgcgctaccgcaccattagcaagattccccaaatcaccctcaactttgtggacctcaagggcgaccccttcttggcttcgcccaccagtgaccgtgagatcatagcacctaagataaaggagcgaacccacaatgtcactgagaaggtcacccaggtcctgtccctgggcgccgacgtgctgcctgagtacaagctgcaggcaccgcgcatccaccgctggaccatcctgcattacagccccttcaaggccgtgtgggactggctcatcctgctgctggtcatctacacggctgtcttcacaccctactcggctgccttcctgctgaaggagacggaagaaggcccgcctgctaccgagtgtggctacgcctgccagccgctggctgtggtggacctcatcgtggacatcatgttcattgtggacatcctcatcaacttccgcaccacctacgtcaatgccaacgaggaggtggtcagccaccccggccgcatcgccgtccactacttcaagggctggttcctcatcgacatggtggccgccatccccttcgacctgctcatcttcggctctggctctgaggagctgatcgggctgctgaagactgcgcggctgctgcggctggtgcgcgtggcgcggaagctggatcgctactcagagtacggcgcggccgtgctgttcttgctcatgtgcacctttgcgctcatcgcgcactggctagcctgcatctggtacgccatcggcaacatggagcagccacacatggactcacgcatcggctggctgcacaacctgggcgaccagataggcaaaccctacaacagcagcggcctgggcggcccctccatcaaggacaagtatgtgacggcgctctacttcaccttcagcagcctcaccagtgtgggcttcggcaacgtctctcccaacaccaactcagagaagatcttctccatctgcgtcatgctcattggctccctcatgtatgctagcatcttcggcaacgtgtcggccatcatccagcggctgtactcgggcacagcccgctaccacacacagatgctgcgggtgcgggagttcatccgcttccaccagatccccaatcccctgcgccagcgcctcgaggagtacttccagcacgcctggtcctacaccaacggcatcgacatgaacgcggtgctgaagggcttccctgagtgcctgcaggctgacatctgcctgcacctgaaccgctcactgctgcagcactgcaaacccttccgaggggccaccaagggctgccttcgggccctggccatgaagttcaagaccacacatgcaccgccaggggacacactggtgcatgctggggacctgctcaccgccctgtacttcatctcccggggctccatcgagatcctgcggggcgacgtcgtcgtggccatcctggggaagaatgacatctttggggagcctctgaacctgtatgcaaggcctggcaagtcgaacggggatgtgcgggccctcacctactgtgacctacacaagatccatcgggacgacctgctggaggtgctggacatgtaccctgagttctccgaccacttctggtccagcctggagatcaccttcaacctgcgagataccaacatgatcccgggctcccccggcagtacggagttagagggtggcttcagtcggcaacgcaagcgcaagttgtccttccgcaggcgcacggacaaggacacggagcagccaggggaggtgtcggccttggggccgggccgggcgggggcagggccgagtagccggggccggccgggggggccgtggggggagagcccgtccagtggcccctccagccctgagagcagtgaggatgagggcccaggccgcagctccagccccctccgcctggtgcccttctccagccccaggccccccggagagccgccgggtggggagcccctgatggaggactgcgagaagagcagcgacacttgcaaccccctgtcaggcgccttctcaggagtgtccaacattttcagcttctggggggacagtcggggccgccagtaccaggagctccctcgatgccccgcccccacccccagcctcctcaacatccccctctccagcccgggtcggcggccccggggcgacgtggagagcaggctggatgccctccagcgccagctcaacaggctggagacccggctgagtgcagacatggccactgtcctgcagctgctacagaggcagatgacgctggtcccgcccgcctacagtgctgtgaccaccccggggcctggccccacttccacatccccgctgttgcccgtcagccccctccccaccctcaccttggactcgctttctcaggtttcccagttcatggcgtgtgaggagctgcccccgggggccccagagcttccccaagaaggccccacacgacgcctctccctaccgggccagctgggggccctcacctcccagcccctgcacagacacggctcggacccgggcagttagtggggctgcccagtgtggacacgtggctcacccagggatcaaggcgctgctgggccgctccccttggaggccctgctcaggaggccctgaccgtggaaggggagaggaactcgaaagcacagctcctcccccagcccttgggaccatcttctcctgcagtcccctgggccccagtgagaggggcaggggcagggccggcagtaggtggggcctgtggtccccccactgccctgagggcattagctggtctaactgcccggaggcacccggccctgggccttaggcacctcaaggacttttctgctatttactgctcttattgttaaggataataattaaggatcatatgaataattaatgaagatgctgatgactatgaataataaataattatcctgaggaga

SEQ ID NO: 445 - DNA, 3884 bp, Homo sapiens
  source 1..3884: mol_type = genomic DNA
  misc_feature 1..3884: note = cDNA of KCNH2 gene SNP c.215C>G (p.Pro72Arg)
atgccggtgcggaggggccacgtcgcgccgcagaacaccttcctggacaccatcatccgcaagtttgagggccagagccgtaagttcatcatcgccaacgctcgggtggagaactgcgccgtcatctactgcaacgacggcttctgcgagctgtgcggctactcgcgggccgaggtgatgcagcgaccctgcacctgcgacttcctgcacgggcggcgcacgcagcgccgcgctgccgcgcagatcgcgcaggcactgctgggcgccgaggagcgcaaagtggaaatcgccttctaccggaaagatgggagctgcttcctatgtctggtggatgtggtgcccgtgaagaacgaggatggggctgtcatcatgttcatcctcaatttcgaggtggtgatggagaaggacatggtggggtccccggctcatgacaccaaccaccggggcccccccaccagctggctggccccaggccgcgccaagaccttccgcctgaagctgcccgcgctgctggcgctgacggcccgggagtcgtcggtgcggtcgggcggcgcgggcggcgcgggcgccccgggggccgtggtggtggacgtggacctgacgcccgcggcacccagcagcgagtcgctggccctggacgaagtgacagccatggacaaccacgtggcagggctcgggcccgcggaggagcggcgtgcgctggtgggtcccggctctccgccccgcagcgcgcccggccagctcccatcgccccgggcgcacagcctcaaccccgacgcctcgggctccagctgcagcctggcccggacgcgctcccgagaaagctgcgccagcgtgcgccgcgcctcgtcggccgacgacatcgaggccatgcgcgccggggtgctgcccccgccaccgcgccacgccagcaccggggccatgcacccactgcgcagcggcttgctcaactccacctcggactccgacctcgtgcgctaccgcaccattagcaagattccccaaatcaccctcaactttgtggacctcaagggcgaccccttcttggcttcgcccaccagtgaccgtgagatcatagcacctaagataaaggagcgaacccacaatgtcactgagaaggtcacccaggtcctgtccctgggcgccgacgtgctgcctgagtacaagctgcaggcaccgcgcatccaccgctggaccatcctgcattacagccccttcaaggccgtgtgggactggctcatcctgctgctggtcatctacacggctgtcttcacaccctactcggctgccttcctgctgaaggagacggaagaaggcccgcctgctaccgagtgtggctacgcctgccagccgctggctgtggtggacctcatcgtggacatcatgttcattgtggacatcctcatcaacttccgcaccacctacgtcaatgccaacgaggaggtggtcagccaccccggccgcatcgccgtccactacttcaagggctggttcctcatcgacatggtggccgccatccccttcgacctgctcatcttcggctctggctctgaggagctgatcgggctgctgaagactgcgcggctgctgcggctggtgcgcgtggcgcggaagctggatcgctactcagagtacggcgcggccgtgctgttcttgctcatgtgcacctttgcgctcatcgcgcactggctagcctgcatctggtacgccatcggcaacatggagcagccacacatggactcacgcatcggctggctgcacaacctgggcgaccagataggcaaaccctacaacagcagcggcctgggcggcccctccatcaaggacaagtatgtgacggcgctctacttcaccttcagcagcctcaccagtgtgggcttcggcaacgtctctcccaacaccaactcagagaagatcttctccatctgcgtcatgctcattggctccctcatgtatgctagcatcttcggcaacgtgtcggccatcatccagcggctgtactcgggcacagcccgctaccacacacagatgctgcgggtgcgggagttcatccgcttccaccagatccccaatcccctgcgccagcgcctcgaggagtacttccagcacgcctggtcctacaccaacggcatcgacatgaacgcggtgctgaagggcttccctgagtgcctgcaggctgacatctgcctgcacctgaaccgctcactgctgcagcactgcaaacccttccgaggggccaccaagggctgccttcgggccctggccatgaagttcaagaccacacatgcaccgccaggggacacactggtgcatgctggggacctgctcaccgccctgtacttcatctcccggggctccatcgagatcctgcggggcgacgtcgtcgtggccatcctggggaagaatgacatctttggggagcctctgaacctgtatgcaaggcctggcaagtcgaacggggatgtgcgggccctcacctactgtgacctacacaagatccatcgggacgacctgctggaggtgctggacatgtaccctgagttctccgaccacttctggtccagcctggagatcaccttcaacctgcgagataccaacatgatcccgggctcccccggcagtacggagttagagggtggcttcagtcggcaacgcaagcgcaagttgtccttccgcaggcgcacggacaaggacacggagcagccaggggaggtgtcggccttggggccgggccgggcgggggcagggccgagtagccggggccggccgggggggccgtggggggagagcccgtccagtggcccctccagccctgagagcagtgaggatgagggcccaggccgcagctccagccccctccgcctggtgcccttctccagccccaggccccccggagagccgccgggtggggagcccctgatggaggactgcgagaagagcagcgacacttgcaaccccctgtcaggcgccttctcaggagtgtccaacattttcagcttctggggggacagtcggggccgccagtaccaggagctccctcgatgccccgcccccacccccagcctcctcaacatccccctctccagcccgggtcggcggccccggggcgacgtggagagcaggctggatgccctccagcgccagctcaacaggctggagacccggctgagtgcagacatggccactgtcctgcagctgctacagaggcagatgacgctggtcccgcccgcctacagtgctgtgaccaccccggggcctggccccacttccacatccccgctgttgcccgtcagccccctccccaccctcaccttggactcgctttctcaggtttcccagttcatggcgtgtgaggagctgcccccgggggccccagagcttccccaagaaggccccacacgacgcctctccctaccgggccagctgggggccctcacctcccagcccctgcacagacacggctcggacccgggcagttagtggggctgcccagtgtggacacgtggctcacccagggatcaaggcgctgctgggccgctccccttggaggccctgctcaggaggccctgaccgtggaaggggagaggaactcgaaagcacagctcctcccccagcccttgggaccatcttctcctgcagtcccctgggccccagtgagaggggcaggggcagggccggcagtaggtggggcctgtggtccccccactgccctgagggcattagctggtctaactgcccggaggcacccggccctgggccttaggcacctcaaggacttttctgctatttactgctcttattgttaaggataataattaaggatcatatgaataattaatgaagatgctgatgactatgaataataaataattatcctgaggaga

SEQ ID NO: 446 - DNA, 3884 bp, Homo sapiens
  source 1..3884: mol_type = genomic DNA
  misc_feature 1..3884: note = cDNA of KCNH2 gene SNP c.215C>T (p.Pro72Leu)
atgccggtgcggaggggccacgtcgcgccgcagaacaccttcctggacaccatcatccgcaagtttgagggccagagccgtaagttcatcatcgccaacgctcgggtggagaactgcgccgtcatctactgcaacgacggcttctgcgagctgtgcggctactcgcgggccgaggtgatgcagcgaccctgcacctgcgacttcctgcacgggctgcgcacgcagcgccgcgctgccgcgcagatcgcgcaggcactgctgggcgccgaggagcgcaaagtggaaatcgccttctaccggaaagatgggagctgcttcctatgtctggtggatgtggtgcccgtgaagaacgaggatggggctgtcatcatgttcatcctcaatttcgaggtggtgatggagaaggacatggtggggtccccggctcatgacaccaaccaccggggcccccccaccagctggctggccccaggccgcgccaagaccttccgcctgaagctgcccgcgctgctggcgctgacggcccgggagtcgtcggtgcggtcgggcggcgcgggcggcgcgggcgccccgggggccgtggtggtggacgtggacctgacgcccgcggcacccagcagcgagtcgctggccctggacgaagtgacagccatggacaaccacgtggcagggctcgggcccgcggaggagcggcgtgcgctggtgggtcccggctctccgccccgcagcgcgcccggccagctcccatcgccccgggcgcacagcctcaaccccgacgcctcgggctccagctgcagcctggcccggacgcgctcccgagaaagctgcgccagcgtgcgccgcgcctcgtcggccgacgacatcgaggccatgcgcgccggggtgctgcccccgccaccgcgccacgccagcaccggggccatgcacccactgcgcagcggcttgctcaactccacctcggactccgacctcgtgcgctaccgcaccattagcaagattccccaaatcaccctcaactttgtggacctcaagggcgaccccttcttggcttcgcccaccagtgaccgtgagatcatagcacctaagataaaggagcgaacccacaatgtcactgagaaggtcacccaggtcctgtccctgggcgccgacgtgctgcctgagtacaagctgcaggcaccgcgcatccaccgctggaccatcctgcattacagccccttcaaggccgtgtgggactggctcatcctgctgctggtcatctacacggctgtcttcacaccctactcggctgccttcctgctgaaggagacggaagaaggcccgcctgctaccgagtgtggctacgcctgccagccgctggctgtggtggacctcatcgtggacatcatgttcattgtggacatcctcatcaacttccgcaccacctacgtcaatgccaacgaggaggtggtcagccaccccggccgcatcgccgtccactacttcaagggctggttcctcatcgacatggtggccgccatccccttcgacctgctcatcttcggctctggctctgaggagctgatcgggctgctgaagactgcgcggctgctgcggctggtgcgcgtggcgcggaagctggatcgctactcagagtacggcgcggccgtgctgttcttgctcatgtgcacctttgcgctcatcgcgcactggctagcctgcatctggtacgccatcggcaacatggagcagccacacatggactcacgcatcggctggctgcacaacctgggcgaccagataggcaaaccctacaacagcagcggcctgggcggcccctccatcaaggacaagtatgtgacggcgctctacttcaccttcagcagcctcaccagtgtgggcttcggcaacgtctctcccaacaccaactcagagaagatcttctccatctgcgtcatgctcattggctccctcatgtatgctagcatcttcggcaacgtgtcggccatcatccagcggctgtactcgggcacagcccgctaccacacacagatgctgcgggtgcgggagttcatccgcttccaccagatccccaatcccctgcgccagcgcctcgaggagtacttccagcacgcctggtcctacaccaacggcatcgacatgaacgcggtgctgaagggcttccctgagtgcctgcaggctgacatctgcctgcacctgaaccgctcactgctgcagcactgcaaacccttccgaggggccaccaagggctgccttcgggccctggccatgaagttcaagaccacacatgcaccgccaggggacacactggtgcatgctggggacctgctcaccgccctgtacttcatctcccggggctccatcgagatcctgcggggcgacgtcgtcgtggccatcctggggaagaatgacatctttggggagcctctgaacctgtatgcaaggcctggcaagtcgaacggggatgtgcgggccctcacctactgtgacctacacaagatccatcgggacgacctgctggaggtgctggacatgtaccctgagttctccgaccacttctggtccagcctggagatcaccttcaacctgcgagataccaacatgatcccgggctcccccggcagtacggagttagagggtggcttcagtcggcaacgcaagcgcaagttgtccttccgcaggcgcacggacaaggacacggagcagccaggggaggtgtcggccttggggccgggccgggcgggggcagggccgagtagccggggccggccgggggggccgtggggggagagcccgtccagtggcccctccagccctgagagcagtgaggatgagggcccaggccgcagctccagccccctccgcctggtgcccttctccagccccaggccccccggagagccgccgggtggggagcccctgatggaggactgcgagaagagcagcgacacttgcaaccccctgtcaggcgccttctcaggagtgtccaacattttcagcttctggggggacagtcggggccgccagtaccaggagctccctcgatgccccgcccccacccccagcctcctcaacatccccctctccagcccgggtcggcggccccggggcgacgtggagagcaggctggatgccctccagcgccagctcaacaggctggagacccggctgagtgcagacatggccactgtcctgcagctgctacagaggcagatgacgctggtcccgcccgcctacagtgctgtgaccaccccggggcctggccccacttccacatccccgctgttgcccgtcagccccctccccaccctcaccttggactcgctttctcaggtttcccagttcatggcgtgtgaggagctgcccccgggggccccagagcttccccaagaaggccccacacgacgcctctccctaccgggccagctgggggccctcacctcccagcccctgcacagacacggctcggacccgggcagttagtggggctgcccagtgtggacacgtggctcacccagggatcaaggcgctgctgggccgctccccttggaggccctgctcaggaggccctgaccgtggaaggggagaggaactcgaaagcacagctcctcccccagcccttgggaccatcttctcctgcagtcccctgggccccagtgagaggggcaggggcagggccggcagtaggtggggcctgtggtccccccactgccctgagggcattagctggtctaactgcccggaggcacccggccctgggccttaggcacctcaaggacttttctgctatttactgctcttattgttaaggataataattaaggatcatatgaataattaatgaagatgctgatgactatgaataataaataattatcctgaggaga

SEQ ID NO: 447 - DNA, 3884 bp, Homo sapiens
  source 1..3884: mol_type = genomic DNA
  misc_feature 1..3884: note = cDNA of KCNH2 gene SNP c.2162C>T (p.Pro721Leu)
atgccggtgcggaggggccacgtcgcgccgcagaacaccttcctggacaccatcatccgcaagtttgagggccagagccgtaagttcatcatcgccaacgctcgggtggagaactgcgccgtcatctactgcaacgacggcttctgcgagctgtgcggctactcgcgggccgaggtgatgcagcgaccctgcacctgcgacttcctgcacgggccgcgcacgcagcgccgcgctgccgcgcagatcgcgcaggcactgctgggcgccgaggagcgcaaagtggaaatcgccttctaccggaaagatgggagctgcttcctatgtctggtggatgtggtgcccgtgaagaacgaggatggggctgtcatcatgttcatcctcaatttcgaggtggtgatggagaaggacatggtggggtccccggctcatgacaccaaccaccggggcccccccaccagctggctggccccaggccgcgccaagaccttccgcctgaagctgcccgcgctgctggcgctgacggcccgggagtcgtcggtgcggtcgggcggcgcgggcggcgcgggcgccccgggggccgtggtggtggacgtggacctgacgcccgcggcacccagcagcgagtcgctggccctggacgaagtgacagccatggacaaccacgtggcagggctcgggcccgcggaggagcggcgtgcgctggtgggtcccggctctccgccccgcagcgcgcccggccagctcccatcgccccgggcgcacagcctcaaccccgacgcctcgggctccagctgcagcctggcccggacgcgctcccgagaaagctgcgccagcgtgcgccgcgcctcgtcggccgacgacatcgaggccatgcgcgccggggtgctgcccccgccaccgcgccacgccagcaccggggccatgcacccactgcgcagcggcttgctcaactccacctcggactccgacctcgtgcgctaccgcaccattagcaagattccccaaatcaccctcaactttgtggacctcaagggcgaccccttcttggcttcgcccaccagtgaccgtgagatcatagcacctaagataaaggagcgaacccacaatgtcactgagaaggtcacccaggtcctgtccctgggcgccgacgtgctgcctgagtacaagctgcaggcaccgcgcatccaccgctggaccatcctgcattacagccccttcaaggccgtgtgggactggctcatcctgctgctggtcatctacacggctgtcttcacaccctactcggctgccttcctgctgaaggagacggaagaaggcccgcctgctaccgagtgtggctacgcctgccagccgctggctgtggtggacctcatcgtggacatcatgttcattgtggacatcctcatcaacttccgcaccacctacgtcaatgccaacgaggaggtggtcagccaccccggccgcatcgccgtccactacttcaagggctggttcctcatcgacatggtggccgccatccccttcgacctgctcatcttcggctctggctctgaggagctgatcgggctgctgaagactgcgcggctgctgcggctggtgcgcgtggcgcggaagctggatcgctactcagagtacggcgcggccgtgctgttcttgctcatgtgcacctttgcgctcatcgcgcactggctagcctgcatctggtacgccatcggcaacatggagcagccacacatggactcacgcatcggctggctgcacaacctgggcgaccagataggcaaaccctacaacagcagcggcctgggcggcccctccatcaaggacaagtatgtgacggcgctctacttcaccttcagcagcctcaccagtgtgggcttcggcaacgtctctcccaacaccaactcagagaagatcttctccatctgcgtcatgctcattggctccctcatgtatgctagcatcttcggcaacgtgtcggccatcatccagcggctgtactcgggcacagcccgctaccacacacagatgctgcgggtgcgggagttcatccgcttccaccagatccccaatcccctgcgccagcgcctcgaggagtacttccagcacgcctggtcctacaccaacggcatcgacatgaacgcggtgctgaagggcttccttgagtgcctgcaggctgacatctgcctgcacctgaaccgctcactgctgcagcactgcaaacccttccgaggggccaccaagggctgccttcgggccctggccatgaagttcaagaccacacatgcaccgccaggggacacactggtgcatgctggggacctgctcaccgccctgtacttcatctcccggggctccatcgagatcctgcggggcgacgtcgtcgtggccatcctggggaagaatgacatctttggggagcctctgaacctgtatgcaaggcctggcaagtcgaacggggatgtgcgggccctcacctactgtgacctacacaagatccatcgggacgacctgctggaggtgctggacatgtaccctgagttctccgaccacttctggtccagcctggagatcaccttcaacctgcgagataccaacatgatcccgggctcccccggcagtacggagttagagggtggcttcagtcggcaacgcaagcgcaagttgtccttccgcaggcgcacggacaaggacacggagcagccaggggaggtgtcggccttggggccgggccgggcgggggcagggccgagtagccggggccggccgggggggccgtggggggagagcccgtccagtggcccctccagccctgagagcagtgaggatgagggcccaggccgcagctccagccccctccgcctggtgcccttctccagccccaggccccccggagagccgccgggtggggagcccctgatggaggactgcgagaagagcagcgacacttgcaaccccctgtcaggcgccttctcaggagtgtccaacattttcagcttctggggggacagtcggggccgccagtaccaggagctccctcgatgccccgcccccacccccagcctcctcaacatccccctctccagcccgggtcggcggccccggggcgacgtggagagcaggctggatgccctccagcgccagctcaacaggctggagacccggctgagtgcagacatggccactgtcctgcagctgctacagaggcagatgacgctggtcccgcccgcctacagtgctgtgaccaccccggggcctggccccacttccacatccccgctgttgcccgtcagccccctccccaccctcaccttggactcgctttctcaggtttcccagttcatggcgtgtgaggagctgcccccgggggccccagagcttccccaagaaggccccacacgacgcctctccctaccgggccagctgggggccctcacctcccagcccctgcacagacacggctcggacccgggcagttagtggggctgcccagtgtggacacgtggctcacccagggatcaaggcgctgctgggccgctccccttggaggccctgctcaggaggccctgaccgtggaaggggagaggaactcgaaagcacagctcctcccccagcccttgggaccatcttctcctgcagtcccctgggccccagtgagaggggcaggggcagggccggcagtaggtggggcctgtggtccccccactgccctgagggcattagctggtctaactgcccggaggcacccggccctgggccttaggcacctcaaggacttttctgctatttactgctcttattgttaaggataataattaaggatcatatgaataattaatgaagatgctgatgactatgaataataaataattatcctgaggaga

SEQ ID NO: 448 - DNA, 3884 bp, Homo sapiens
  source 1..3884: mol_type = genomic DNA
  misc_feature 1..3884: note = cDNA of KCNH2 gene SNP c.2167T>C (p.Cys723Arg)
atgccggtgcggaggggccacgtcgcgccgcagaacaccttcctggacaccatcatccgcaagtttgagggccagagccgtaagttcatcatcgccaacgctcgggtggagaactgcgccgtcatctactgcaacgacggcttctgcgagctgtgcggctactcgcgggccgaggtgatgcagcgaccctgcacctgcgacttcctgcacgggccgcgcacgcagcgccgcgctgccgcgcagatcgcgcaggcactgctgggcgccgaggagcgcaaagtggaaatcgccttctaccggaaagatgggagctgcttcctatgtctggtggatgtggtgcccgtgaagaacgaggatggggctgtcatcatgttcatcctcaatttcgaggtggtgatggagaaggacatggtggggtccccggctcatgacaccaaccaccggggcccccccaccagctggctggccccaggccgcgccaagaccttccgcctgaagctgcccgcgctgctggcgctgacggcccgggagtcgtcggtgcggtcgggcggcgcgggcggcgcgggcgccccgggggccgtggtggtggacgtggacctgacgcccgcggcacccagcagcgagtcgctggccctggacgaagtgacagccatggacaaccacgtggcagggctcgggcccgcggaggagcggcgtgcgctggtgggtcccggctctccgccccgcagcgcgcccggccagctcccatcgccccgggcgcacagcctcaaccccgacgcctcgggctccagctgcagcctggcccggacgcgctcccgagaaagctgcgccagcgtgcgccgcgcctcgtcggccgacgacatcgaggccatgcgcgccggggtgctgcccccgccaccgcgccacgccagcaccggggccatgcacccactgcgcagcggcttgctcaactccacctcggactccgacctcgtgcgctaccgcaccattagcaagattccccaaatcaccctcaactttgtggacctcaagggcgaccccttcttggcttcgcccaccagtgaccgtgagatcatagcacctaagataaaggagcgaacccacaatgtcactgagaaggtcacccaggtcctgtccctgggcgccgacgtgctgcctgagtacaagctgcaggcaccgcgcatccaccgctggaccatcctgcattacagccccttcaaggccgtgtgggactggctcatcctgctgctggtcatctacacggctgtcttcacaccctactcggctgccttcctgctgaaggagacggaagaaggcccgcctgctaccgagtgtggctacgcctgccagccgctggctgtggtggacctcatcgtggacatcatgttcattgtggacatcctcatcaacttccgcaccacctacgtcaatgccaacgaggaggtggtcagccaccccggccgcatcgccgtccactacttcaagggctggttcctcatcgacatggtggccgccatccccttcgacctgctcatcttcggctctggctctgaggagctgatcgggctgctgaagactgcgcggctgctgcggctggtgcgcgtggcgcggaagctggatcgctactcagagtacggcgcggccgtgctgttcttgctcatgtgcacctttgcgctcatcgcgcactggctagcctgcatctggtacgccatcggcaacatggagcagccacacatggactcacgcatcggctggctgcacaacctgggcgaccagataggcaaaccctacaacagcagcggcctgggcggcccctccatcaaggacaagtatgtgacggcgctctacttcaccttcagcagcctcaccagtgtgggcttcggcaacgtctctcccaacaccaactcagagaagatcttctccatctgcgtcatgctcattggctccctcatgtatgctagcatcttcggcaacgtgtcggccatcatccagcggctgtactcgggcacagcccgctaccacacacagatgctgcgggtgcgggagttcatccgcttccaccagatccccaatcccctgcgccagcgcctcgaggagtacttccagcacgcctggtcctacaccaacggcatcgacatgaacgcggtgctgaagggcttccctgagcgcctgcaggctgacatctgcctgcacctgaaccgctcactgctgcagcactgcaaacccttccgaggggccaccaagggctgccttcgggccctggccatgaagttcaagaccacacatgcaccgccaggggacacactggtgcatgctggggacctgctcaccgccctgtacttcatctcccggggctccatcgagatcctgcggggcgacgtcgtcgtggccatcctggggaagaatgacatctttggggagcctctgaacctgtatgcaaggcctggcaagtcgaacggggatgtgcgggccctcacctactgtgacctacacaagatccatcgggacgacctgctggaggtgctggacatgtaccctgagttctccgaccacttctggtccagcctggagatcaccttcaacctgcgagataccaacatgatcccgggctcccccggcagtacggagttagagggtggcttcagtcggcaacgcaagcgcaagttgtccttccgcaggcgcacggacaaggacacggagcagccaggggaggtgtcggccttggggccgggccgggcgggggcagggccgagtagccggggccggccgggggggccgtggggggagagcccgtccagtggcccctccagccctgagagcagtgaggatgagggcccaggccgcagctccagccccctccgcctggtgcccttctccagccccaggccccccggagagccgccgggtggggagcccctgatggaggactgcgagaagagcagcgacacttgcaaccccctgtcaggcgccttctcaggagtgtccaacattttcagcttctggggggacagtcggggccgccagtaccaggagctccctcgatgccccgcccccacccccagcctcctcaacatccccctctccagcccgggtcggcggccccggggcgacgtggagagcaggctggatgccctccagcgccagctcaacaggctggagacccggctgagtgcagacatggccactgtcctgcagctgctacagaggcagatgacgctggtcccgcccgcctacagtgctgtgaccaccccggggcctggccccacttccacatccccgctgttgcccgtcagccccctccccaccctcaccttggactcgctttctcaggtttcccagttcatggcgtgtgaggagctgcccccgggggccccagagcttccccaagaaggccccacacgacgcctctccctaccgggccagctgggggccctcacctcccagcccctgcacagacacggctcggacccgggcagttagtggggctgcccagtgtggacacgtggctcacccagggatcaaggcgctgctgggccgctccccttggaggccctgctcaggaggccctgaccgtggaaggggagaggaactcgaaagcacagctcctcccccagcccttgggaccatcttctcctgcagtcccctgggccccagtgagaggggcaggggcagggccggcagtaggtggggcctgtggtccccccactgccctgagggcattagctggtctaactgcccggaggcacccggccctgggccttaggcacctcaaggacttttctgctatttactgctcttattgttaaggataataattaaggatcatatgaataattaatgaagatgctgatgactatgaataataaataattatcctgaggaga

SEQ ID NO: 449 - DNA, 3884 bp, Homo sapiens
  source 1..3884: mol_type = genomic DNA
  misc_feature 1..3884: note = cDNA of KCNH2 gene SNP c.2167T>G (p.Cys723Gly)
atgccggtgcggaggggccacgtcgcgccgcagaacaccttcctggacaccatcatccgcaagtttgagggccagagccgtaagttcatcatcgccaacgctcgggtggagaactgcgccgtcatctactgcaacgacggcttctgcgagctgtgcggctactcgcgggccgaggtgatgcagcgaccctgcacctgcgacttcctgcacgggccgcgcacgcagcgccgcgctgccgcgcagatcgcgcaggcactgctgggcgccgaggagcgcaaagtggaaatcgccttctaccggaaagatgggagctgcttcctatgtctggtggatgtggtgcccgtgaagaacgaggatggggctgtcatcatgttcatcctcaatttcgaggtggtgatggagaaggacatggtggggtccccggctcatgacaccaaccaccggggcccccccaccagctggctggccccaggccgcgccaagaccttccgcctgaagctgcccgcgctgctggcgctgacggcccgggagtcgtcggtgcggtcgggcggcgcgggcggcgcgggcgccccgggggccgtggtggtggacgtggacctgacgcccgcggcacccagcagcgagtcgctggccctggacgaagtgacagccatggacaaccacgtggcagggctcgggcccgcggaggagcggcgtgcgctggtgggtcccggctctccgccccgcagcgcgcccggccagctcccatcgccccgggcgcacagcctcaaccccgacgcctcgggctccagctgcagcctggcccggacgcgctcccgagaaagctgcgccagcgtgcgccgcgcctcgtcggccgacgacatcgaggccatgcgcgccggggtgctgcccccgccaccgcgccacgccagcaccggggccatgcacccactgcgcagcggcttgctcaactccacctcggactccgacctcgtgcgctaccgcaccattagcaagattccccaaatcaccctcaactttgtggacctcaagggcgaccccttcttggcttcgcccaccagtgaccgtgagatcatagcacctaagataaaggagcgaacccacaatgtcactgagaaggtcacccaggtcctgtccctgggcgccgacgtgctgcctgagtacaagctgcaggcaccgcgcatccaccgctggaccatcctgcattacagccccttcaaggccgtgtgggactggctcatcctgctgctggtcatctacacggctgtcttcacaccctactcggctgccttcctgctgaaggagacggaagaaggcccgcctgctaccgagtgtggctacgcctgccagccgctggctgtggtggacctcatcgtggacatcatgttcattgtggacatcctcatcaacttccgcaccacctacgtcaatgccaacgaggaggtggtcagccaccccggccgcatcgccgtccactacttcaagggctggttcctcatcgacatggtggccgccatccccttcgacctgctcatcttcggctctggctctgaggagctgatcgggctgctgaagactgcgcggctgctgcggctggtgcgcgtggcgcggaagctggatcgctactcagagtacggcgcggccgtgctgttcttgctcatgtgcacctttgcgctcatcgcgcactggctagcctgcatctggtacgccatcggcaacatggagcagccacacatggactcacgcatcggctggctgcacaacctgggcgaccagataggcaaaccctacaacagcagcggcctgggcggcccctccatcaaggacaagtatgtgacggcgctctacttcaccttcagcagcctcaccagtgtgggcttcggcaacgtctctcccaacaccaactcagagaagatcttctccatctgcgtcatgctcattggctccctcatgtatgctagcatcttcggcaacgtgtcggccatcatccagcggctgtactcgggcacagcccgctaccacacacagatgctgcgggtgcgggagttcatccgcttccaccagatccccaatcccctgcgccagcgcctcgaggagtacttccagcacgcctggtcctacaccaacggcatcgacatgaacgcggtgctgaagggcttccctgagggcctgcaggctgacatctgcctgcacctgaaccgctcactgctgcagcactgcaaacccttccgaggggccaccaagggctgccttcgggccctggccatgaagttcaagaccacacatgcaccgccaggggacacactggtgcatgctggggacctgctcaccgccctgtacttcatctcccggggctccatcgagatcctgcggggcgacgtcgtcgtggccatcctggggaagaatgacatctttggggagcctctgaacctgtatgcaaggcctggcaagtcgaacggggatgtgcgggccctcacctactgtgacctacacaagatccatcgggacgacctgctggaggtgctggacatgtaccctgagttctccgaccacttctggtccagcctggagatcaccttcaacctgcgagataccaacatgatcccgggctcccccggcagtacggagttagagggtggcttcagtcggcaacgcaagcgcaagttgtccttccgcaggcgcacggacaaggacacggagcagccaggggaggtgtcggccttggggccgggccgggcgggggcagggccgagtagccggggccggccgggggggccgtggggggagagcccgtccagtggcccctccagccctgagagcagtgaggatgagggcccaggccgcagctccagccccctccgcctggtgcccttctccagccccaggccccccggagagccgccgggtggggagcccctgatggaggactgcgagaagagcagcgacacttgcaaccccctgtcaggcgccttctcaggagtgtccaacattttcagcttctggggggacagtcggggccgccagtaccaggagctccctcgatgccccgcccccacccccagcctcctcaacatccccctctccagcccgggtcggcggccccggggcgacgtggagagcaggctggatgccctccagcgccagctcaacaggctggagacccggctgagtgcagacatggccactgtcctgcagctgctacagaggcagatgacgctggtcccgcccgcctacagtgctgtgaccaccccggggcctggccccacttccacatccccgctgttgcccgtcagccccctccccaccctcaccttggactcgctttctcaggtttcccagttcatggcgtgtgaggagctgcccccgggggccccagagcttccccaagaaggccccacacgacgcctctccctaccgggccagctgggggccctcacctcccagcccctgcacagacacggctcggacccgggcagttagtggggctgcccagtgtggacacgtggctcacccagggatcaaggcgctgctgggccgctccccttggaggccctgctcaggaggccctgaccgtggaaggggagaggaactcgaaagcacagctcctcccccagcccttgggaccatcttctcctgcagtcccctgggccccagtgagaggggcaggggcagggccggcagtaggtggggcctgtggtccccccactgccctgagggcattagctggtctaactgcccggaggcacccggccctgggccttaggcacctcaaggacttttctgctatttactgctcttattgttaaggataataattaaggatcatatgaataattaatgaagatgctgatgactatgaataataaataattatcctgaggaga

SEQ ID NO: 450 - DNA, 3884 bp, Homo sapiens
  source 1..3884: mol_type = genomic DNA
  misc_feature 1..3884: note = cDNA of KCNH2 gene SNP c.2168G>A (p.Cys723Tyr)
atgccggtgcggaggggccacgtcgcgccgcagaacaccttcctggacaccatcatccgcaagtttgagggccagagccgtaagttcatcatcgccaacgctcgggtggagaactgcgccgtcatctactgcaacgacggcttctgcgagctgtgcggctactcgcgggccgaggtgatgcagcgaccctgcacctgcgacttcctgcacgggccgcgcacgcagcgccgcgctgccgcgcagatcgcgcaggcactgctgggcgccgaggagcgcaaagtggaaatcgccttctaccggaaagatgggagctgcttcctatgtctggtggatgtggtgcccgtgaagaacgaggatggggctgtcatcatgttcatcctcaatttcgaggtggtgatggagaaggacatggtggggtccccggctcatgacaccaaccaccggggcccccccaccagctggctggccccaggccgcgccaagaccttccgcctgaagctgcccgcgctgctggcgctgacggcccgggagtcgtcggtgcggtcgggcggcgcgggcggcgcgggcgccccgggggccgtggtggtggacgtggacctgacgcccgcggcacccagcagcgagtcgctggccctggacgaagtgacagccatggacaaccacgtggcagggctcgggcccgcggaggagcggcgtgcgctggtgggtcccggctctccgccccgcagcgcgcccggccagctcccatcgccccgggcgcacagcctcaaccccgacgcctcgggctccagctgcagcctggcccggacgcgctcccgagaaagctgcgccagcgtgcgccgcgcctcgtcggccgacgacatcgaggccatgcgcgccggggtgctgcccccgccaccgcgccacgccagcaccggggccatgcacccactgcgcagcggcttgctcaactccacctcggactccgacctcgtgcgctaccgcaccattagcaagattccccaaatcaccctcaactttgtggacctcaagggcgaccccttcttggcttcgcccaccagtgaccgtgagatcatagcacctaagataaaggagcgaacccacaatgtcactgagaaggtcacccaggtcctgtccctgggcgccgacgtgctgcctgagtacaagctgcaggcaccgcgcatccaccgctggaccatcctgcattacagccccttcaaggccgtgtgggactggctcatcctgctgctggtcatctacacggctgtcttcacaccctactcggctgccttcctgctgaaggagacggaagaaggcccgcctgctaccgagtgtggctacgcctgccagccgctggctgtggtggacctcatcgtggacatcatgttcattgtggacatcctcatcaacttccgcaccacctacgtcaatgccaacgaggaggtggtcagccaccccggccgcatcgccgtccactacttcaagggctggttcctcatcgacatggtggccgccatccccttcgacctgctcatcttcggctctggctctgaggagctgatcgggctgctgaagactgcgcggctgctgcggctggtgcgcgtggcgcggaagctggatcgctactcagagtacggcgcggccgtgctgttcttgctcatgtgcacctttgcgctcatcgcgcactggctagcctgcatctggtacgccatcggcaacatggagcagccacacatggactcacgcatcggctggctgcacaacctgggcgaccagataggcaaaccctacaacagcagcggcctgggcggcccctccatcaaggacaagtatgtgacggcgctctacttcaccttcagcagcctcaccagtgtgggcttcggcaacgtctctcccaacaccaactcagagaagatcttctccatctgcgtcatgctcattggctccctcatgtatgctagcatcttcggcaacgtgtcggccatcatccagcggctgtactcgggcacagcccgctaccacacacagatgctgcgggtgcgggagttcatccgcttccaccagatccccaatcccctgcgccagcgcctcgaggagtacttccagcacgcctggtcctacaccaacggcatcgacatgaacgcggtgctgaagggcttccctgagtacctgcaggctgacatctgcctgcacctgaaccgctcactgctgcagcactgcaaacccttccgaggggccaccaagggctgccttcgggccctggccatgaagttcaagaccacacatgcaccgccaggggacacactggtgcatgctggggacctgctcaccgccctgtacttcatctcccggggctccatcgagatcctgcggggcgacgtcgtcgtggccatcctggggaagaatgacatctttggggagcctctgaacctgtatgcaaggcctggcaagtcgaacggggatgtgcgggccctcacctactgtgacctacacaagatccatcgggacgacctgctggaggtgctggacatgtaccctgagttctccgaccacttctggtccagcctggagatcaccttcaacctgcgagataccaacatgatcccgggctcccccggcagtacggagttagagggtggcttcagtcggcaacgcaagcgcaagttgtccttccgcaggcgcacggacaaggacacggagcagccaggggaggtgtcggccttggggccgggccgggcgggggcagggccgagtagccggggccggccgggggggccgtggggggagagcccgtccagtggcccctccagccctgagagcagtgaggatgagggcccaggccgcagctccagccccctccgcctggtgcccttctccagccccaggccccccggagagccgccgggtggggagcccctgatggaggactgcgagaagagcagcgacacttgcaaccccctgtcaggcgccttctcaggagtgtccaacattttcagcttctggggggacagtcggggccgccagtaccaggagctccctcgatgccccgcccccacccccagcctcctcaacatccccctctccagcccgggtcggcggccccggggcgacgtggagagcaggctggatgccctccagcgccagctcaacaggctggagacccggctgagtgcagacatggccactgtcctgcagctgctacagaggcagatgacgctggtcccgcccgcctacagtgctgtgaccaccccggggcctggccccacttccacatccccgctgttgcccgtcagccccctccccaccctcaccttggactcgctttctcaggtttcccagttcatggcgtgtgaggagctgcccccgggggccccagagcttccccaagaaggccccacacgacgcctctccctaccgggccagctgggggccctcacctcccagcccctgcacagacacggctcggacccgggcagttagtggggctgcccagtgtggacacgtggctcacccagggatcaaggcgctgctgggccgctccccttggaggccctgctcaggaggccctgaccgtggaaggggagaggaactcgaaagcacagctcctcccccagcccttgggaccatcttctcctgcagtcccctgggccccagtgagaggggcaggggcagggccggcagtaggtggggcctgtggtccccccactgccctgagggcattagctggtctaactgcccggaggcacccggccctgggccttaggcacctcaaggacttttctgctatttactgctcttattgttaaggataataattaaggatcatatgaataattaatgaagatgctgatgactatgaataataaataattatcctgaggaga

SEQ ID NO: 451 - DNA, 3884 bp, Homo sapiens
  source 1..3884: mol_type = genomic DNA
  misc_feature 1..3884: note = cDNA of KCNH2 gene SNP c.2171T>C (p.Leu724Pro)
atgccggtgcggaggggccacgtcgcgccgcagaacaccttcctggacaccatcatccgcaagtttgagggccagagccgtaagttcatcatcgccaacgctcgggtggagaactgcgccgtcatctactgcaacgacggcttctgcgagctgtgcggctactcgcgggccgaggtgatgcagcgaccctgcacctgcgacttcctgcacgggccgcgcacgcagcgccgcgctgccgcgcagatcgcgcaggcactgctgggcgccgaggagcgcaaagtggaaatcgccttctaccggaaagatgggagctgcttcctatgtctggtggatgtggtgcccgtgaagaacgaggatggggctgtcatcatgttcatcctcaatttcgaggtggtgatggagaaggacatggtggggtccccggctcatgacaccaaccaccggggcccccccaccagctggctggccccaggccgcgccaagaccttccgcctgaagctgcccgcgctgctggcgctgacggcccgggagtcgtcggtgcggtcgggcggcgcgggcggcgcgggcgccccgggggccgtggtggtggacgtggacctgacgcccgcggcacccagcagcgagtcgctggccctggacgaagtgacagccatggacaaccacgtggcagggctcgggcccgcggaggagcggcgtgcgctggtgggtcccggctctccgccccgcagcgcgcccggccagctcccatcgccccgggcgcacagcctcaaccccgacgcctcgggctccagctgcagcctggcccggacgcgctcccgagaaagctgcgccagcgtgcgccgcgcctcgtcggccgacgacatcgaggccatgcgcgccggggtgctgcccccgccaccgcgccacgccagcaccggggccatgcacccactgcgcagcggcttgctcaactccacctcggactccgacctcgtgcgctaccgcaccattagcaagattccccaaatcaccctcaactttgtggacctcaagggcgaccccttcttggcttcgcccaccagtgaccgtgagatcatagcacctaagataaaggagcgaacccacaatgtcactgagaaggtcacccaggtcctgtccctgggcgccgacgtgctgcctgagtacaagctgcaggcaccgcgcatccaccgctggaccatcctgcattacagccccttcaaggccgtgtgggactggctcatcctgctgctggtcatctacacggctgtcttcacaccctactcggctgccttcctgctgaaggagacggaagaaggcccgcctgctaccgagtgtggctacgcctgccagccgctggctgtggtggacctcatcgtggacatcatgttcattgtggacatcctcatcaacttccgcaccacctacgtcaatgccaacgaggaggtggtcagccaccccggccgcatcgccgtccactacttcaagggctggttcctcatcgacatggtggccgccatccccttcgacctgctcatcttcggctctggctctgaggagctgatcgggctgctgaagactgcgcggctgctgcggctggtgcgcgtggcgcggaagctggatcgctactcagagtacggcgcggccgtgctgttcttgctcatgtgcacctttgcgctcatcgcgcactggctagcctgcatctggtacgccatcggcaacatggagcagccacacatggactcacgcatcggctggctgcacaacctgggcgaccagataggcaaaccctacaacagcagcggcctgggcggcccctccatcaaggacaagtatgtgacggcgctctacttcaccttcagcagcctcaccagtgtgggcttcggcaacgtctctcccaacaccaactcagagaagatcttctccatctgcgtcatgctcattggctccctcatgtatgctagcatcttcggcaacgtgtcggccatcatccagcggctgtactcgggcacagcccgctaccacacacagatgctgcgggtgcgggagttcatccgcttccaccagatccccaatcccctgcgccagcgcctcgaggagtacttccagcacgcctggtcctacaccaacggcatcgacatgaacgcggtgctgaagggcttccctgagtgcccgcaggctgacatctgcctgcacctgaaccgctcactgctgcagcactgcaaacccttccgaggggccaccaagggctgccttcgggccctggccatgaagttcaagaccacacatgcaccgccaggggacacactggtgcatgctggggacctgctcaccgccctgtacttcatctcccggggctccatcgagatcctgcggggcgacgtcgtcgtggccatcctggggaagaatgacatctttggggagcctctgaacctgtatgcaaggcctggcaagtcgaacggggatgtgcgggccctcacctactgtgacctacacaagatccatcgggacgacctgctggaggtgctggacatgtaccctgagttctccgaccacttctggtccagcctggagatcaccttcaacctgcgagataccaacatgatcccgggctcccccggcagtacggagttagagggtggcttcagtcggcaacgcaagcgcaagttgtccttccgcaggcgcacggacaaggacacggagcagccaggggaggtgtcggccttggggccgggccgggcgggggcagggccgagtagccggggccggccgggggggccgtggggggagagcccgtccagtggcccctccagccctgagagcagtgaggatgagggcccaggccgcagctccagccccctccgcctggtgcccttctccagccccaggccccccggagagccgccgggtggggagcccctgatggaggactgcgagaagagcagcgacacttgcaaccccctgtcaggcgccttctcaggagtgtccaacattttcagcttctggggggacagtcggggccgccagtaccaggagctccctcgatgccccgcccccacccccagcctcctcaacatccccctctccagcccgggtcggcggccccggggcgacgtggagagcaggctggatgccctccagcgccagctcaacaggctggagacccggctgagtgcagacatggccactgtcctgcagctgctacagaggcagatgacgctggtcccgcccgcctacagtgctgtgaccaccccggggcctggccccacttccacatccccgctgttgcccgtcagccccctccccaccctcaccttggactcgctttctcaggtttcccagttcatggcgtgtgaggagctgcccccgggggccccagagcttccccaagaaggccccacacgacgcctctccctaccgggccagctgggggccctcacctcccagcccctgcacagacacggctcggacccgggcagttagtggggctgcccagtgtggacacgtggctcacccagggatcaaggcgctgctgggccgctccccttggaggccctgctcaggaggccctgaccgtggaaggggagaggaactcgaaagcacagctcctcccccagcccttgggaccatcttctcctgcagtcccctgggccccagtgagaggggcaggggcagggccggcagtaggtggggcctgtggtccccccactgccctgagggcattagctggtctaactgcccggaggcacccggccctgggccttaggcacctcaaggacttttctgctatttactgctcttattgttaaggataataattaaggatcatatgaataattaatgaagatgctgatgactatgaataataaataattatcctgaggaga

SEQ ID NO: 452 - DNA, 3884 bp, Homo sapiens
  source 1..3884: mol_type = genomic DNA
  misc_feature 1..3884: note = cDNA of KCNH2 gene SNP c.2182A>T (p.Ile728Phe)
atgccggtgcggaggggccacgtcgcgccgcagaacaccttcctggacaccatcatccgcaagtttgagggccagagccgtaagttcatcatcgccaacgctcgggtggagaactgcgccgtcatctactgcaacgacggcttctgcgagctgtgcggctactcgcgggccgaggtgatgcagcgaccctgcacctgcgacttcctgcacgggccgcgcacgcagcgccgcgctgccgcgcagatcgcgcaggcactgctgggcgccgaggagcgcaaagtggaaatcgccttctaccggaaagatgggagctgcttcctatgtctggtggatgtggtgcccgtgaagaacgaggatggggctgtcatcatgttcatcctcaatttcgaggtggtgatggagaaggacatggtggggtccccggctcatgacaccaaccaccggggcccccccaccagctggctggccccaggccgcgccaagaccttccgcctgaagctgcccgcgctgctggcgctgacggcccgggagtcgtcggtgcggtcgggcggcgcgggcggcgcgggcgccccgggggccgtggtggtggacgtggacctgacgcccgcggcacccagcagcgagtcgctggccctggacgaagtgacagccatggacaaccacgtggcagggctcgggcccgcggaggagcggcgtgcgctggtgggtcccggctctccgccccgcagcgcgcccggccagctcccatcgccccgggcgcacagcctcaaccccgacgcctcgggctccagctgcagcctggcccggacgcgctcccgagaaagctgcgccagcgtgcgccgcgcctcgtcggccgacgacatcgaggccatgcgcgccggggtgctgcccccgccaccgcgccacgccagcaccggggccatgcacccactgcgcagcggcttgctcaactccacctcggactccgacctcgtgcgctaccgcaccattagcaagattccccaaatcaccctcaactttgtggacctcaagggcgaccccttcttggcttcgcccaccagtgaccgtgagatcatagcacctaagataaaggagcgaacccacaatgtcactgagaaggtcacccaggtcctgtccctgggcgccgacgtgctgcctgagtacaagctgcaggcaccgcgcatccaccgctggaccatcctgcattacagccccttcaaggccgtgtgggactggctcatcctgctgctggtcatctacacggctgtcttcacaccctactcggctgccttcctgctgaaggagacggaagaaggcccgcctgctaccgagtgtggctacgcctgccagccgctggctgtggtggacctcatcgtggacatcatgttcattgtggacatcctcatcaacttccgcaccacctacgtcaatgccaacgaggaggtggtcagccaccccggccgcatcgccgtccactacttcaagggctggttcctcatcgacatggtggccgccatccccttcgacctgctcatcttcggctctggctctgaggagctgatcgggctgctgaagactgcgcggctgctgcggctggtgcgcgtggcgcggaagctggatcgctactcagagtacggcgcggccgtgctgttcttgctcatgtgcacctttgcgctcatcgcgcactggctagcctgcatctggtacgccatcggcaacatggagcagccacacatggactcacgcatcggctggctgcacaacctgggcgaccagataggcaaaccctacaacagcagcggcctgggcggcccctccatcaaggacaagtatgtgacggcgctctacttcaccttcagcagcctcaccagtgtgggcttcggcaacgtctctcccaacaccaactcagagaagatcttctccatctgcgtcatgctcattggctccctcatgtatgctagcatcttcggcaacgtgtcggccatcatccagcggctgtactcgggcacagcccgctaccacacacagatgctgcgggtgcgggagttcatccgcttccaccagatccccaatcccctgcgccagcgcctcgaggagtacttccagcacgcctggtcctacaccaacggcatcgacatgaacgcggtgctgaagggcttccctgagtgcctgcaggctgacttctgcctgcacctgaaccgctcactgctgcagcactgcaaacccttccgaggggccaccaagggctgccttcgggccctggccatgaagttcaagaccacacatgcaccgccaggggacacactggtgcatgctggggacctgctcaccgccctgtacttcatctcccggggctccatcgagatcctgcggggcgacgtcgtcgtggccatcctggggaagaatgacatctttggggagcctctgaacctgtatgcaaggcctggcaagtcgaacggggatgtgcgggccctcacctactgtgacctacacaagatccatcgggacgacctgctggaggtgctggacatgtaccctgagttctccgaccacttctggtccagcctggagatcaccttcaacctgcgagataccaacatgatcccgggctcccccggcagtacggagttagagggtggcttcagtcggcaacgcaagcgcaagttgtccttccgcaggcgcacggacaaggacacggagcagccaggggaggtgtcggccttggggccgggccgggcgggggcagggccgagtagccggggccggccgggggggccgtggggggagagcccgtccagtggcccctccagccctgagagcagtgaggatgagggcccaggccgcagctccagccccctccgcctggtgcccttctccagccccaggccccccggagagccgccgggtggggagcccctgatggaggactgcgagaagagcagcgacacttgcaaccccctgtcaggcgccttctcaggagtgtccaacattttcagcttctggggggacagtcggggccgccagtaccaggagctccctcgatgccccgcccccacccccagcctcctcaacatccccctctccagcccgggtcggcggccccggggcgacgtggagagcaggctggatgccctccagcgccagctcaacaggctggagacccggctgagtgcagacatggccactgtcctgcagctgctacagaggcagatgacgctggtcccgcccgcctacagtgctgtgaccaccccggggcctggccccacttccacatccccgctgttgcccgtcagccccctccccaccctcaccttggactcgctttctcaggtttcccagttcatggcgtgtgaggagctgcccccgggggccccagagcttccccaagaaggccccacacgacgcctctccctaccgggccagctgggggccctcacctcccagcccctgcacagacacggctcggacccgggcagttagtggggctgcccagtgtggacacgtggctcacccagggatcaaggcgctgctgggccgctccccttggaggccctgctcaggaggccctgaccgtggaaggggagaggaactcgaaagcacagctcctcccccagcccttgggaccatcttctcctgcagtcccctgggccccagtgagaggggcaggggcagggccggcagtaggtggggcctgtggtccccccactgccctgagggcattagctggtctaactgcccggaggcacccggccctgggccttaggcacctcaaggacttttctgctatttactgctcttattgttaaggataataattaaggatcatatgaataattaatgaagatgctgatgactatgaataataaataattatcctgaggaga

SEQ ID NO: 453 - DNA, 3884 bp, Homo sapiens
  source 1..3884: mol_type = genomic DNA
  misc_feature 1..3884: note = cDNA of KCNH2 gene SNP c.2192A>C (p.His731Pro)
atgccggtgcggaggggccacgtcgcgccgcagaacaccttcctggacaccatcatccgcaagtttgagggccagagccgtaagttcatcatcgccaacgctcgggtggagaactgcgccgtcatctactgcaacgacggcttctgcgagctgtgcggctactcgcgggccgaggtgatgcagcgaccctgcacctgcgacttcctgcacgggccgcgcacgcagcgccgcgctgccgcgcagatcgcgcaggcactgctgggcgccgaggagcgcaaagtggaaatcgccttctaccggaaagatgggagctgcttcctatgtctggtggatgtggtgcccgtgaagaacgaggatggggctgtcatcatgttcatcctcaatttcgaggtggtgatggagaaggacatggtggggtccccggctcatgacaccaaccaccggggcccccccaccagctggctggccccaggccgcgccaagaccttccgcctgaagctgcccgcgctgctggcgctgacggcccgggagtcgtcggtgcggtcgggcggcgcgggcggcgcgggcgccccgggggccgtggtggtggacgtggacctgacgcccgcggcacccagcagcgagtcgctggccctggacgaagtgacagccatggacaaccacgtggcagggctcgggcccgcggaggagcggcgtgcgctggtgggtcccggctctccgccccgcagcgcgcccggccagctcccatcgccccgggcgcacagcctcaaccccgacgcctcgggctccagctgcagcctggcccggacgcgctcccgagaaagctgcgccagcgtgcgccgcgcctcgtcggccgacgacatcgaggccatgcgcgccggggtgctgcccccgccaccgcgccacgccagcaccggggccatgcacccactgcgcagcggcttgctcaactccacctcggactccgacctcgtgcgctaccgcaccattagcaagattccccaaatcaccctcaactttgtggacctcaagggcgaccccttcttggcttcgcccaccagtgaccgtgagatcatagcacctaagataaaggagcgaacccacaatgtcactgagaaggtcacccaggtcctgtccctgggcgccgacgtgctgcctgagtacaagctgcaggcaccgcgcatccaccgctggaccatcctgcattacagccccttcaaggccgtgtgggactggctcatcctgctgctggtcatctacacggctgtcttcacaccctactcggctgccttcctgctgaaggagacggaagaaggcccgcctgctaccgagtgtggctacgcctgccagccgctggctgtggtggacctcatcgtggacatcatgttcattgtggacatcctcatcaacttccgcaccacctacgtcaatgccaacgaggaggtggtcagccaccccggccgcatcgccgtccactacttcaagggctggttcctcatcgacatggtggccgccatccccttcgacctgctcatcttcggctctggctctgaggagctgatcgggctgctgaagactgcgcggctgctgcggctggtgcgcgtggcgcggaagctggatcgctactcagagtacggcgcggccgtgctgttcttgctcatgtgcacctttgcgctcatcgcgcactggctagcctgcatctggtacgccatcggcaacatggagcagccacacatggactcacgcatcggctggctgcacaacctgggcgaccagataggcaaaccctacaacagcagcggcctgggcggcccctccatcaaggacaagtatgtgacggcgctctacttcaccttcagcagcctcaccagtgtgggcttcggcaacgtctctcccaacaccaactcagagaagatcttctccatctgcgtcatgctcattggctccctcatgtatgctagcatcttcggcaacgtgtcggccatcatccagcggctgtactcgggcacagcccgctaccacacacagatgctgcgggtgcgggagttcatccgcttccaccagatccccaatcccctgcgccagcgcctcgaggagtacttccagcacgcctggtcctacaccaacggcatcgacatgaacgcggtgctgaagggcttccctgagtgcctgcaggctgacatctgcctgcccctgaaccgctcactgctgcagcactgcaaacccttccgaggggccaccaagggctgccttcgggccctggccatgaagttcaagaccacacatgcaccgccaggggacacactggtgcatgctggggacctgctcaccgccctgtacttcatctcccggggctccatcgagatcctgcggggcgacgtcgtcgtggccatcctggggaagaatgacatctttggggagcctctgaacctgtatgcaaggcctggcaagtcgaacggggatgtgcgggccctcacctactgtgacctacacaagatccatcgggacgacctgctggaggtgctggacatgtaccctgagttctccgaccacttctggtccagcctggagatcaccttcaacctgcgagataccaacatgatcccgggctcccccggcagtacggagttagagggtggcttcagtcggcaacgcaagcgcaagttgtccttccgcaggcgcacggacaaggacacggagcagccaggggaggtgtcggccttggggccgggccgggcgggggcagggccgagtagccggggccggccgggggggccgtggggggagagcccgtccagtggcccctccagccctgagagcagtgaggatgagggcccaggccgcagctccagccccctccgcctggtgcccttctccagccccaggccccccggagagccgccgggtggggagcccctgatggaggactgcgagaagagcagcgacacttgcaaccccctgtcaggcgccttctcaggagtgtccaacattttcagcttctggggggacagtcggggccgccagtaccaggagctccctcgatgccccgcccccacccccagcctcctcaacatccccctctccagcccgggtcggcggccccggggcgacgtggagagcaggctggatgccctccagcgccagctcaacaggctggagacccggctgagtgcagacatggccactgtcctgcagctgctacagaggcagatgacgctggtcccgcccgcctacagtgctgtgaccaccccggggcctggccccacttccacatccccgctgttgcccgtcagccccctccccaccctcaccttggactcgctttctcaggtttcccagttcatggcgtgtgaggagctgcccccgggggccccagagcttccccaagaaggccccacacgacgcctctccctaccgggccagctgggggccctcacctcccagcccctgcacagacacggctcggacccgggcagttagtggggctgcccagtgtggacacgtggctcacccagggatcaaggcgctgctgggccgctccccttggaggccctgctcaggaggccctgaccgtggaaggggagaggaactcgaaagcacagctcctcccccagcccttgggaccatcttctcctgcagtcccctgggccccagtgagaggggcaggggcagggccggcagtaggtggggcctgtggtccccccactgccctgagggcattagctggtctaactgcccggaggcacccggccctgggccttaggcacctcaaggacttttctgctatttactgctcttattgttaaggataataattaaggatcatatgaataattaatgaagatgctgatgactatgaataataaataattatcctgaggaga

SEQ ID NO: 454 - DNA, 3884 bp, Homo sapiens
  source 1..3884: mol_type = genomic DNA
  misc_feature 1..3884: note = cDNA of KCNH2 gene SNP c.2200C>T (p.Arg734Cys)
atgccggtgcggaggggccacgtcgcgccgcagaacaccttcctggacaccatcatccgcaagtttgagggccagagccgtaagttcatcatcgccaacgctcgggtggagaactgcgccgtcatctactgcaacgacggcttctgcgagctgtgcggctactcgcgggccgaggtgatgcagcgaccctgcacctgcgacttcctgcacgggccgcgcacgcagcgccgcgctgccgcgcagatcgcgcaggcactgctgggcgccgaggagcgcaaagtggaaatcgccttctaccggaaagatgggagctgcttcctatgtctggtggatgtggtgcccgtgaagaacgaggatggggctgtcatcatgttcatcctcaatttcgaggtggtgatggagaaggacatggtggggtccccggctcatgacaccaaccaccggggcccccccaccagctggctggccccaggccgcgccaagaccttccgcctgaagctgcccgcgctgctggcgctgacggcccgggagtcgtcggtgcggtcgggcggcgcgggcggcgcgggcgccccgggggccgtggtggtggacgtggacctgacgcccgcggcacccagcagcgagtcgctggccctggacgaagtgacagccatggacaaccacgtggcagggctcgggcccgcggaggagcggcgtgcgctggtgggtcccggctctccgccccgcagcgcgcccggccagctcccatcgccccgggcgcacagcctcaaccccgacgcctcgggctccagctgcagcctggcccggacgcgctcccgagaaagctgcgccagcgtgcgccgcgcctcgtcggccgacgacatcgaggccatgcgcgccggggtgctgcccccgccaccgcgccacgccagcaccggggccatgcacccactgcgcagcggcttgctcaactccacctcggactccgacctcgtgcgctaccgcaccattagcaagattccccaaatcaccctcaactttgtggacctcaagggcgaccccttcttggcttcgcccaccagtgaccgtgagatcatagcacctaagataaaggagcgaacccacaatgtcactgagaaggtcacccaggtcctgtccctgggcgccgacgtgctgcctgagtacaagctgcaggcaccgcgcatccaccgctggaccatcctgcattacagccccttcaaggccgtgtgggactggctcatcctgctgctggtcatctacacggctgtcttcacaccctactcggctgccttcctgctgaaggagacggaagaaggcccgcctgctaccgagtgtggctacgcctgccagccgctggctgtggtggacctcatcgtggacatcatgttcattgtggacatcctcatcaacttccgcaccacctacgtcaatgccaacgaggaggtggtcagccaccccggccgcatcgccgtccactacttcaagggctggttcctcatcgacatggtggccgccatccccttcgacctgctcatcttcggctctggctctgaggagctgatcgggctgctgaagactgcgcggctgctgcggctggtgcgcgtggcgcggaagctggatcgctactcagagtacggcgcggccgtgctgttcttgctcatgtgcacctttgcgctcatcgcgcactggctagcctgcatctggtacgccatcggcaacatggagcagccacacatggactcacgcatcggctggctgcacaacctgggcgaccagataggcaaaccctacaacagcagcggcctgggcggcccctccatcaaggacaagtatgtgacggcgctctacttcaccttcagcagcctcaccagtgtgggcttcggcaacgtctctcccaacaccaactcagagaagatcttctccatctgcgtcatgctcattggctccctcatgtatgctagcatcttcggcaacgtgtcggccatcatccagcggctgtactcgggcacagcccgctaccacacacagatgctgcgggtgcgggagttcatccgcttccaccagatccccaatcccctgcgccagcgcctcgaggagtacttccagcacgcctggtcctacaccaacggcatcgacatgaacgcggtgctgaagggcttccctgagtgcctgcaggctgacatctgcctgcacctgaactgctcactgctgcagcactgcaaacccttccgaggggccaccaagggctgccttcgggccctggccatgaagttcaagaccacacatgcaccgccaggggacacactggtgcatgctggggacctgctcaccgccctgtacttcatctcccggggctccatcgagatcctgcggggcgacgtcgtcgtggccatcctggggaagaatgacatctttggggagcctctgaacctgtatgcaaggcctggcaagtcgaacggggatgtgcgggccctcacctactgtgacctacacaagatccatcgggacgacctgctggaggtgctggacatgtaccctgagttctccgaccacttctggtccagcctggagatcaccttcaacctgcgagataccaacatgatcccgggctcccccggcagtacggagttagagggtggcttcagtcggcaacgcaagcgcaagttgtccttccgcaggcgcacggacaaggacacggagcagccaggggaggtgtcggccttggggccgggccgggcgggggcagggccgagtagccggggccggccgggggggccgtggggggagagcccgtccagtggcccctccagccctgagagcagtgaggatgagggcccaggccgcagctccagccccctccgcctggtgcccttctccagccccaggccccccggagagccgccgggtggggagcccctgatggaggactgcgagaagagcagcgacacttgcaaccccctgtcaggcgccttctcaggagtgtccaacattttcagcttctggggggacagtcggggccgccagtaccaggagctccctcgatgccccgcccccacccccagcctcctcaacatccccctctccagcccgggtcggcggccccggggcgacgtggagagcaggctggatgccctccagcgccagctcaacaggctggagacccggctgagtgcagacatggccactgtcctgcagctgctacagaggcagatgacgctggtcccgcccgcctacagtgctgtgaccaccccggggcctggccccacttccacatccccgctgttgcccgtcagccccctccccaccctcaccttggactcgctttctcaggtttcccagttcatggcgtgtgaggagctgcccccgggggccccagagcttccccaagaaggccccacacgacgcctctccctaccgggccagctgggggccctcacctcccagcccctgcacagacacggctcggacccgggcagttagtggggctgcccagtgtggacacgtggctcacccagggatcaaggcgctgctgggccgctccccttggaggccctgctcaggaggccctgaccgtggaaggggagaggaactcgaaagcacagctcctcccccagcccttgggaccatcttctcctgcagtcccctgggccccagtgagaggggcaggggcagggccggcagtaggtggggcctgtggtccccccactgccctgagggcattagctggtctaactgcccggaggcacccggccctgggccttaggcacctcaaggacttttctgctatttactgctcttattgttaaggataataattaaggatcatatgaataattaatgaagatgctgatgactatgaataataaataattatcctgaggaga

SEQ ID NO: 455 - DNA, 3884 bp, Homo sapiens
  source 1..3884: mol_type = genomic DNA
  misc_feature 1..3884: note = cDNA of KCNH2 gene SNP c.2204C>T (p.Ser735Leu)
atgccggtgcggaggggccacgtcgcgccgcagaacaccttcctggacaccatcatccgcaagtttgagggccagagccgtaagttcatcatcgccaacgctcgggtggagaactgcgccgtcatctactgcaacgacggcttctgcgagctgtgcggctactcgcgggccgaggtgatgcagcgaccctgcacctgcgacttcctgcacgggccgcgcacgcagcgccgcgctgccgcgcagatcgcgcaggcactgctgggcgccgaggagcgcaaagtggaaatcgccttctaccggaaagatgggagctgcttcctatgtctggtggatgtggtgcccgtgaagaacgaggatggggctgtcatcatgttcatcctcaatttcgaggtggtgatggagaaggacatggtggggtccccggctcatgacaccaaccaccggggcccccccaccagctggctggccccaggccgcgccaagaccttccgcctgaagctgcccgcgctgctggcgctgacggcccgggagtcgtcggtgcggtcgggcggcgcgggcggcgcgggcgccccgggggccgtggtggtggacgtggacctgacgcccgcggcacccagcagcgagtcgctggccctggacgaagtgacagccatggacaaccacgtggcagggctcgggcccgcggaggagcggcgtgcgctggtgggtcccggctctccgccccgcagcgcgcccggccagctcccatcgccccgggcgcacagcctcaaccccgacgcctcgggctccagctgcagcctggcccggacgcgctcccgagaaagctgcgccagcgtgcgccgcgcctcgtcggccgacgacatcgaggccatgcgcgccggggtgctgcccccgccaccgcgccacgccagcaccggggccatgcacccactgcgcagcggcttgctcaactccacctcggactccgacctcgtgcgctaccgcaccattagcaagattccccaaatcaccctcaactttgtggacctcaagggcgaccccttcttggcttcgcccaccagtgaccgtgagatcatagcacctaagataaaggagcgaacccacaatgtcactgagaaggtcacccaggtcctgtccctgggcgccgacgtgctgcctgagtacaagctgcaggcaccgcgcatccaccgctggaccatcctgcattacagccccttcaaggccgtgtgggactggctcatcctgctgctggtcatctacacggctgtcttcacaccctactcggctgccttcctgctgaaggagacggaagaaggcccgcctgctaccgagtgtggctacgcctgccagccgctggctgtggtggacctcatcgtggacatcatgttcattgtggacatcctcatcaacttccgcaccacctacgtcaatgccaacgaggaggtggtcagccaccccggccgcatcgccgtccactacttcaagggctggttcctcatcgacatggtggccgccatccccttcgacctgctcatcttcggctctggctctgaggagctgatcgggctgctgaagactgcgcggctgctgcggctggtgcgcgtggcgcggaagctggatcgctactcagagtacggcgcggccgtgctgttcttgctcatgtgcacctttgcgctcatcgcgcactggctagcctgcatctggtacgccatcggcaacatggagcagccacacatggactcacgcatcggctggctgcacaacctgggcgaccagataggcaaaccctacaacagcagcggcctgggcggcccctccatcaaggacaagtatgtgacggcgctctacttcaccttcagcagcctcaccagtgtgggcttcggcaacgtctctcccaacaccaactcagagaagatcttctccatctgcgtcatgctcattggctccctcatgtatgctagcatcttcggcaacgtgtcggccatcatccagcggctgtactcgggcacagcccgctaccacacacagatgctgcgggtgcgggagttcatccgcttccaccagatccccaatcccctgcgccagcgcctcgaggagtacttccagcacgcctggtcctacaccaacggcatcgacatgaacgcggtgctgaagggcttccctgagtgcctgcaggctgacatctgcctgcacctgaaccgcttactgctgcagcactgcaaacccttccgaggggccaccaagggctgccttcgggccctggccatgaagttcaagaccacacatgcaccgccaggggacacactggtgcatgctggggacctgctcaccgccctgtacttcatctcccggggctccatcgagatcctgcggggcgacgtcgtcgtggccatcctggggaagaatgacatctttggggagcctctgaacctgtatgcaaggcctggcaagtcgaacggggatgtgcgggccctcacctactgtgacctacacaagatccatcgggacgacctgctggaggtgctggacatgtaccctgagttctccgaccacttctggtccagcctggagatcaccttcaacctgcgagataccaacatgatcccgggctcccccggcagtacggagttagagggtggcttcagtcggcaacgcaagcgcaagttgtccttccgcaggcgcacggacaaggacacggagcagccaggggaggtgtcggccttggggccgggccgggcgggggcagggccgagtagccggggccggccgggggggccgtggggggagagcccgtccagtggcccctccagccctgagagcagtgaggatgagggcccaggccgcagctccagccccctccgcctggtgcccttctccagccccaggccccccggagagccgccgggtggggagcccctgatggaggactgcgagaagagcagcgacacttgcaaccccctgtcaggcgccttctcaggagtgtccaacattttcagcttctggggggacagtcggggccgccagtaccaggagctccctcgatgccccgcccccacccccagcctcctcaacatccccctctccagcccgggtcggcggccccggggcgacgtggagagcaggctggatgccctccagcgccagctcaacaggctggagacccggctgagtgcagacatggccactgtcctgcagctgctacagaggcagatgacgctggtcccgcccgcctacagtgctgtgaccaccccggggcctggccccacttccacatccccgctgttgcccgtcagccccctccccaccctcaccttggactcgctttctcaggtttcccagttcatggcgtgtgaggagctgcccccgggggccccagagcttccccaagaaggccccacacgacgcctctccctaccgggccagctgggggccctcacctcccagcccctgcacagacacggctcggacccgggcagttagtggggctgcccagtgtggacacgtggctcacccagggatcaaggcgctgctgggccgctccccttggaggccctgctcaggaggccctgaccgtggaaggggagaggaactcgaaagcacagctcctcccccagcccttgggaccatcttctcctgcagtcccctgggccccagtgagaggggcaggggcagggccggcagtaggtggggcctgtggtccccccactgccctgagggcattagctggtctaactgcccggaggcacccggccctgggccttaggcacctcaaggacttttctgctatttactgctcttattgttaaggataataattaaggatcatatgaataattaatgaagatgctgatgactatgaataataaataattatcctgaggaga

SEQ ID NO: 456 - DNA, 3884 bp, Homo sapiens
  source 1..3884: mol_type = genomic DNA
  misc_feature 1..3884: note = cDNA of KCNH2 gene SNP c.220A>C (p.Thr74Pro)
atgccggtgcggaggggccacgtcgcgccgcagaacaccttcctggacaccatcatccgcaagtttgagggccagagccgtaagttcatcatcgccaacgctcgggtggagaactgcgccgtcatctactgcaacgacggcttctgcgagctgtgcggctactcgcgggccgaggtgatgcagcgaccctgcacctgcgacttcctgcacgggccgcgcccgcagcgccgcgctgccgcgcagatcgcgcaggcactgctgggcgccgaggagcgcaaagtggaaatcgccttctaccggaaagatgggagctgcttcctatgtctggtggatgtggtgcccgtgaagaacgaggatggggctgtcatcatgttcatcctcaatttcgaggtggtgatggagaaggacatggtggggtccccggctcatgacaccaaccaccggggcccccccaccagctggctggccccaggccgcgccaagaccttccgcctgaagctgcccgcgctgctggcgctgacggcccgggagtcgtcggtgcggtcgggcggcgcgggcggcgcgggcgccccgggggccgtggtggtggacgtggacctgacgcccgcggcacccagcagcgagtcgctggccctggacgaagtgacagccatggacaaccacgtggcagggctcgggcccgcggaggagcggcgtgcgctggtgggtcccggctctccgccccgcagcgcgcccggccagctcccatcgccccgggcgcacagcctcaaccccgacgcctcgggctccagctgcagcctggcccggacgcgctcccgagaaagctgcgccagcgtgcgccgcgcctcgtcggccgacgacatcgaggccatgcgcgccggggtgctgcccccgccaccgcgccacgccagcaccggggccatgcacccactgcgcagcggcttgctcaactccacctcggactccgacctcgtgcgctaccgcaccattagcaagattccccaaatcaccctcaactttgtggacctcaagggcgaccccttcttggcttcgcccaccagtgaccgtgagatcatagcacctaagataaaggagcgaacccacaatgtcactgagaaggtcacccaggtcctgtccctgggcgccgacgtgctgcctgagtacaagctgcaggcaccgcgcatccaccgctggaccatcctgcattacagccccttcaaggccgtgtgggactggctcatcctgctgctggtcatctacacggctgtcttcacaccctactcggctgccttcctgctgaaggagacggaagaaggcccgcctgctaccgagtgtggctacgcctgccagccgctggctgtggtggacctcatcgtggacatcatgttcattgtggacatcctcatcaacttccgcaccacctacgtcaatgccaacgaggaggtggtcagccaccccggccgcatcgccgtccactacttcaagggctggttcctcatcgacatggtggccgccatccccttcgacctgctcatcttcggctctggctctgaggagctgatcgggctgctgaagactgcgcggctgctgcggctggtgcgcgtggcgcggaagctggatcgctactcagagtacggcgcggccgtgctgttcttgctcatgtgcacctttgcgctcatcgcgcactggctagcctgcatctggtacgccatcggcaacatggagcagccacacatggactcacgcatcggctggctgcacaacctgggcgaccagataggcaaaccctacaacagcagcggcctgggcggcccctccatcaaggacaagtatgtgacggcgctctacttcaccttcagcagcctcaccagtgtgggcttcggcaacgtctctcccaacaccaactcagagaagatcttctccatctgcgtcatgctcattggctccctcatgtatgctagcatcttcggcaacgtgtcggccatcatccagcggctgtactcgggcacagcccgctaccacacacagatgctgcgggtgcgggagttcatccgcttccaccagatccccaatcccctgcgccagcgcctcgaggagtacttccagcacgcctggtcctacaccaacggcatcgacatgaacgcggtgctgaagggcttccctgagtgcctgcaggctgacatctgcctgcacctgaaccgctcactgctgcagcactgcaaacccttccgaggggccaccaagggctgccttcgggccctggccatgaagttcaagaccacacatgcaccgccaggggacacactggtgcatgctggggacctgctcaccgccctgtacttcatctcccggggctccatcgagatcctgcggggcgacgtcgtcgtggccatcctggggaagaatgacatctttggggagcctctgaacctgtatgcaaggcctggcaagtcgaacggggatgtgcgggccctcacctactgtgacctacacaagatccatcgggacgacctgctggaggtgctggacatgtaccctgagttctccgaccacttctggtccagcctggagatcaccttcaacctgcgagataccaacatgatcccgggctcccccggcagtacggagttagagggtggcttcagtcggcaacgcaagcgcaagttgtccttccgcaggcgcacggacaaggacacggagcagccaggggaggtgtcggccttggggccgggccgggcgggggcagggccgagtagccggggccggccgggggggccgtggggggagagcccgtccagtggcccctccagccctgagagcagtgaggatgagggcccaggccgcagctccagccccctccgcctggtgcccttctccagccccaggccccccggagagccgccgggtggggagcccctgatggaggactgcgagaagagcagcgacacttgcaaccccctgtcaggcgccttctcaggagtgtccaacattttcagcttctggggggacagtcggggccgccagtaccaggagctccctcgatgccccgcccccacccccagcctcctcaacatccccctctccagcccgggtcggcggccccggggcgacgtggagagcaggctggatgccctccagcgccagctcaacaggctggagacccggctgagtgcagacatggccactgtcctgcagctgctacagaggcagatgacgctggtcccgcccgcctacagtgctgtgaccaccccggggcctggccccacttccacatccccgctgttgcccgtcagccccctccccaccctcaccttggactcgctttctcaggtttcccagttcatggcgtgtgaggagctgcccccgggggccccagagcttccccaagaaggccccacacgacgcctctccctaccgggccagctgggggccctcacctcccagcccctgcacagacacggctcggacccgggcagttagtggggctgcccagtgtggacacgtggctcacccagggatcaaggcgctgctgggccgctccccttggaggccctgctcaggaggccctgaccgtggaaggggagaggaactcgaaagcacagctcctcccccagcccttgggaccatcttctcctgcagtcccctgggccccagtgagaggggcaggggcagggccggcagtaggtggggcctgtggtccccccactgccctgagggcattagctggtctaactgcccggaggcacccggccctgggccttaggcacctcaaggacttttctgctatttactgctcttattgttaaggataataattaaggatcatatgaataattaatgaagatgctgatgactatgaataataaataattatcctgaggaga

SEQ ID NO: 457 - DNA, 3884 bp, Homo sapiens
  source 1..3884: mol_type = genomic DNA
  misc_feature 1..3884: note = cDNA of KCNH2 gene SNP c.220A>G (p.Thr74Ala)
atgccggtgcggaggggccacgtcgcgccgcagaacaccttcctggacaccatcatccgcaagtttgagggccagagccgtaagttcatcatcgccaacgctcgggtggagaactgcgccgtcatctactgcaacgacggcttctgcgagctgtgcggctactcgcgggccgaggtgatgcagcgaccctgcacctgcgacttcctgcacgggccgcgcgcgcagcgccgcgctgccgcgcagatcgcgcaggcactgctgggcgccgaggagcgcaaagtggaaatcgccttctaccggaaagatgggagctgcttcctatgtctggtggatgtggtgcccgtgaagaacgaggatggggctgtcatcatgttcatcctcaatttcgaggtggtgatggagaaggacatggtggggtccccggctcatgacaccaaccaccggggcccccccaccagctggctggccccaggccgcgccaagaccttccgcctgaagctgcccgcgctgctggcgctgacggcccgggagtcgtcggtgcggtcgggcggcgcgggcggcgcgggcgccccgggggccgtggtggtggacgtggacctgacgcccgcggcacccagcagcgagtcgctggccctggacgaagtgacagccatggacaaccacgtggcagggctcgggcccgcggaggagcggcgtgcgctggtgggtcccggctctccgccccgcagcgcgcccggccagctcccatcgccccgggcgcacagcctcaaccccgacgcctcgggctccagctgcagcctggcccggacgcgctcccgagaaagctgcgccagcgtgcgccgcgcctcgtcggccgacgacatcgaggccatgcgcgccggggtgctgcccccgccaccgcgccacgccagcaccggggccatgcacccactgcgcagcggcttgctcaactccacctcggactccgacctcgtgcgctaccgcaccattagcaagattccccaaatcaccctcaactttgtggacctcaagggcgaccccttcttggcttcgcccaccagtgaccgtgagatcatagcacctaagataaaggagcgaacccacaatgtcactgagaaggtcacccaggtcctgtccctgggcgccgacgtgctgcctgagtacaagctgcaggcaccgcgcatccaccgctggaccatcctgcattacagccccttcaaggccgtgtgggactggctcatcctgctgctggtcatctacacggctgtcttcacaccctactcggctgccttcctgctgaaggagacggaagaaggcccgcctgctaccgagtgtggctacgcctgccagccgctggctgtggtggacctcatcgtggacatcatgttcattgtggacatcctcatcaacttccgcaccacctacgtcaatgccaacgaggaggtggtcagccaccccggccgcatcgccgtccactacttcaagggctggttcctcatcgacatggtggccgccatccccttcgacctgctcatcttcggctctggctctgaggagctgatcgggctgctgaagactgcgcggctgctgcggctggtgcgcgtggcgcggaagctggatcgctactcagagtacggcgcggccgtgctgttcttgctcatgtgcacctttgcgctcatcgcgcactggctagcctgcatctggtacgccatcggcaacatggagcagccacacatggactcacgcatcggctggctgcacaacctgggcgaccagataggcaaaccctacaacagcagcggcctgggcggcccctccatcaaggacaagtatgtgacggcgctctacttcaccttcagcagcctcaccagtgtgggcttcggcaacgtctctcccaacaccaactcagagaagatcttctccatctgcgtcatgctcattggctccctcatgtatgctagcatcttcggcaacgtgtcggccatcatccagcggctgtactcgggcacagcccgctaccacacacagatgctgcgggtgcgggagttcatccgcttccaccagatccccaatcccctgcgccagcgcctcgaggagtacttccagcacgcctggtcctacaccaacggcatcgacatgaacgcggtgctgaagggcttccctgagtgcctgcaggctgacatctgcctgcacctgaaccgctcactgctgcagcactgcaaacccttccgaggggccaccaagggctgccttcgggccctggccatgaagttcaagaccacacatgcaccgccaggggacacactggtgcatgctggggacctgctcaccgccctgtacttcatctcccggggctccatcgagatcctgcggggcgacgtcgtcgtggccatcctggggaagaatgacatctttggggagcctctgaacctgtatgcaaggcctggcaagtcgaacggggatgtgcgggccctcacctactgtgacctacacaagatccatcgggacgacctgctggaggtgctggacatgtaccctgagttctccgaccacttctggtccagcctggagatcaccttcaacctgcgagataccaacatgatcccgggctcccccggcagtacggagttagagggtggcttcagtcggcaacgcaagcgcaagttgtccttccgcaggcgcacggacaaggacacggagcagccaggggaggtgtcggccttggggccgggccgggcgggggcagggccgagtagccggggccggccgggggggccgtggggggagagcccgtccagtggcccctccagccctgagagcagtgaggatgagggcccaggccgcagctccagccccctccgcctggtgcccttctccagccccaggccccccggagagccgccgggtggggagcccctgatggaggactgcgagaagagcagcgacacttgcaaccccctgtcaggcgccttctcaggagtgtccaacattttcagcttctggggggacagtcggggccgccagtaccaggagctccctcgatgccccgcccccacccccagcctcctcaacatccccctctccagcccgggtcggcggccccggggcgacgtggagagcaggctggatgccctccagcgccagctcaacaggctggagacccggctgagtgcagacatggccactgtcctgcagctgctacagaggcagatgacgctggtcccgcccgcctacagtgctgtgaccaccccggggcctggccccacttccacatccccgctgttgcccgtcagccccctccccaccctcaccttggactcgctttctcaggtttcccagttcatggcgtgtgaggagctgcccccgggggccccagagcttccccaagaaggccccacacgacgcctctccctaccgggccagctgggggccctcacctcccagcccctgcacagacacggctcggacccgggcagttagtggggctgcccagtgtggacacgtggctcacccagggatcaaggcgctgctgggccgctccccttggaggccctgctcaggaggccctgaccgtggaaggggagaggaactcgaaagcacagctcctcccccagcccttgggaccatcttctcctgcagtcccctgggccccagtgagaggggcaggggcagggccggcagtaggtggggcctgtggtccccccactgccctgagggcattagctggtctaactgcccggaggcacccggccctgggccttaggcacctcaaggacttttctgctatttactgctcttattgttaaggataataattaaggatcatatgaataattaatgaagatgctgatgactatgaataataaataattatcctgaggaga

SEQ ID NO: 458 - DNA, 3884 bp, Homo sapiens
  source 1..3884: mol_type = genomic DNA
  misc_feature 1..3884: note = cDNA of KCNH2 gene SNP c.2216A>G (p.His739Arg)
atgccggtgcggaggggccacgtcgcgccgcagaacaccttcctggacaccatcatccgcaagtttgagggccagagccgtaagttcatcatcgccaacgctcgggtggagaactgcgccgtcatctactgcaacgacggcttctgcgagctgtgcggctactcgcgggccgaggtgatgcagcgaccctgcacctgcgacttcctgcacgggccgcgcacgcagcgccgcgctgccgcgcagatcgcgcaggcactgctgggcgccgaggagcgcaaagtggaaatcgccttctaccggaaagatgggagctgcttcctatgtctggtggatgtggtgcccgtgaagaacgaggatggggctgtcatcatgttcatcctcaatttcgaggtggtgatggagaaggacatggtggggtccccggctcatgacaccaaccaccggggcccccccaccagctggctggccccaggccgcgccaagaccttccgcctgaagctgcccgcgctgctggcgctgacggcccgggagtcgtcggtgcggtcgggcggcgcgggcggcgcgggcgccccgggggccgtggtggtggacgtggacctgacgcccgcggcacccagcagcgagtcgctggccctggacgaagtgacagccatggacaaccacgtggcagggctcgggcccgcggaggagcggcgtgcgctggtgggtcccggctctccgccccgcagcgcgcccggccagctcccatcgccccgggcgcacagcctcaaccccgacgcctcgggctccagctgcagcctggcccggacgcgctcccgagaaagctgcgccagcgtgcgccgcgcctcgtcggccgacgacatcgaggccatgcgcgccggggtgctgcccccgccaccgcgccacgccagcaccggggccatgcacccactgcgcagcggcttgctcaactccacctcggactccgacctcgtgcgctaccgcaccattagcaagattccccaaatcaccctcaactttgtggacctcaagggcgaccccttcttggcttcgcccaccagtgaccgtgagatcatagcacctaagataaaggagcgaacccacaatgtcactgagaaggtcacccaggtcctgtccctgggcgccgacgtgctgcctgagtacaagctgcaggcaccgcgcatccaccgctggaccatcctgcattacagccccttcaaggccgtgtgggactggctcatcctgctgctggtcatctacacggctgtcttcacaccctactcggctgccttcctgctgaaggagacggaagaaggcccgcctgctaccgagtgtggctacgcctgccagccgctggctgtggtggacctcatcgtggacatcatgttcattgtggacatcctcatcaacttccgcaccacctacgtcaatgccaacgaggaggtggtcagccaccccggccgcatcgccgtccactacttcaagggctggttcctcatcgacatggtggccgccatccccttcgacctgctcatcttcggctctggctctgaggagctgatcgggctgctgaagactgcgcggctgctgcggctggtgcgcgtggcgcggaagctggatcgctactcagagtacggcgcggccgtgctgttcttgctcatgtgcacctttgcgctcatcgcgcactggctagcctgcatctggtacgccatcggcaacatggagcagccacacatggactcacgcatcggctggctgcacaacctgggcgaccagataggcaaaccctacaacagcagcggcctgggcggcccctccatcaaggacaagtatgtgacggcgctctacttcaccttcagcagcctcaccagtgtgggcttcggcaacgtctctcccaacaccaactcagagaagatcttctccatctgcgtcatgctcattggctccctcatgtatgctagcatcttcggcaacgtgtcggccatcatccagcggctgtactcgggcacagcccgctaccacacacagatgctgcgggtgcgggagttcatccgcttccaccagatccccaatcccctgcgccagcgcctcgaggagtacttccagcacgcctggtcctacaccaacggcatcgacatgaacgcggtgctgaagggcttccctgagtgcctgcaggctgacatctgcctgcacctgaaccgctcactgctgcagcgctgcaaacccttccgaggggccaccaagggctgccttcgggccctggccatgaagttcaagaccacacatgcaccgccaggggacacactggtgcatgctggggacctgctcaccgccctgtacttcatctcccggggctccatcgagatcctgcggggcgacgtcgtcgtggccatcctggggaagaatgacatctttggggagcctctgaacctgtatgcaaggcctggcaagtcgaacggggatgtgcgggccctcacctactgtgacctacacaagatccatcgggacgacctgctggaggtgctggacatgtaccctgagttctccgaccacttctggtccagcctggagatcaccttcaacctgcgagataccaacatgatcccgggctcccccggcagtacggagttagagggtggcttcagtcggcaacgcaagcgcaagttgtccttccgcaggcgcacggacaaggacacggagcagccaggggaggtgtcggccttggggccgggccgggcgggggcagggccgagtagccggggccggccgggggggccgtggggggagagcccgtccagtggcccctccagccctgagagcagtgaggatgagggcccaggccgcagctccagccccctccgcctggtgcccttctccagccccaggccccccggagagccgccgggtggggagcccctgatggaggactgcgagaagagcagcgacacttgcaaccccctgtcaggcgccttctcaggagtgtccaacattttcagcttctggggggacagtcggggccgccagtaccaggagctccctcgatgccccgcccccacccccagcctcctcaacatccccctctccagcccgggtcggcggccccggggcgacgtggagagcaggctggatgccctccagcgccagctcaacaggctggagacccggctgagtgcagacatggccactgtcctgcagctgctacagaggcagatgacgctggtcccgcccgcctacagtgctgtgaccaccccggggcctggccccacttccacatccccgctgttgcccgtcagccccctccccaccctcaccttggactcgctttctcaggtttcccagttcatggcgtgtgaggagctgcccccgggggccccagagcttccccaagaaggccccacacgacgcctctccctaccgggccagctgggggccctcacctcccagcccctgcacagacacggctcggacccgggcagttagtggggctgcccagtgtggacacgtggctcacccagggatcaaggcgctgctgggccgctccccttggaggccctgctcaggaggccctgaccgtggaaggggagaggaactcgaaagcacagctcctcccccagcccttgggaccatcttctcctgcagtcccctgggccccagtgagaggggcaggggcagggccggcagtaggtggggcctgtggtccccccactgccctgagggcattagctggtctaactgcccggaggcacccggccctgggccttaggcacctcaaggacttttctgctatttactgctcttattgttaaggataataattaaggatcatatgaataattaatgaagatgctgatgactatgaataataaataattatcctgaggaga

SEQ ID NO: 459 - DNA, 3884 bp, Homo sapiens
  source 1..3884: mol_type = genomic DNA
  misc_feature 1..3884: note = cDNA of KCNH2 gene SNP c.221C>G (p.Thr74Arg)
atgccggtgcggaggggccacgtcgcgccgcagaacaccttcctggacaccatcatccgcaagtttgagggccagagccgtaagttcatcatcgccaacgctcgggtggagaactgcgccgtcatctactgcaacgacggcttctgcgagctgtgcggctactcgcgggccgaggtgatgcagcgaccctgcacctgcgacttcctgcacgggccgcgcaggcagcgccgcgctgccgcgcagatcgcgcaggcactgctgggcgccgaggagcgcaaagtggaaatcgccttctaccggaaagatgggagctgcttcctatgtctggtggatgtggtgcccgtgaagaacgaggatggggctgtcatcatgttcatcctcaatttcgaggtggtgatggagaaggacatggtggggtccccggctcatgacaccaaccaccggggcccccccaccagctggctggccccaggccgcgccaagaccttccgcctgaagctgcccgcgctgctggcgctgacggcccgggagtcgtcggtgcggtcgggcggcgcgggcggcgcgggcgccccgggggccgtggtggtggacgtggacctgacgcccgcggcacccagcagcgagtcgctggccctggacgaagtgacagccatggacaaccacgtggcagggctcgggcccgcggaggagcggcgtgcgctggtgggtcccggctctccgccccgcagcgcgcccggccagctcccatcgccccgggcgcacagcctcaaccccgacgcctcgggctccagctgcagcctggcccggacgcgctcccgagaaagctgcgccagcgtgcgccgcgcctcgtcggccgacgacatcgaggccatgcgcgccggggtgctgcccccgccaccgcgccacgccagcaccggggccatgcacccactgcgcagcggcttgctcaactccacctcggactccgacctcgtgcgctaccgcaccattagcaagattccccaaatcaccctcaactttgtggacctcaagggcgaccccttcttggcttcgcccaccagtgaccgtgagatcatagcacctaagataaaggagcgaacccacaatgtcactgagaaggtcacccaggtcctgtccctgggcgccgacgtgctgcctgagtacaagctgcaggcaccgcgcatccaccgctggaccatcctgcattacagccccttcaaggccgtgtgggactggctcatcctgctgctggtcatctacacggctgtcttcacaccctactcggctgccttcctgctgaaggagacggaagaaggcccgcctgctaccgagtgtggctacgcctgccagccgctggctgtggtggacctcatcgtggacatcatgttcattgtggacatcctcatcaacttccgcaccacctacgtcaatgccaacgaggaggtggtcagccaccccggccgcatcgccgtccactacttcaagggctggttcctcatcgacatggtggccgccatccccttcgacctgctcatcttcggctctggctctgaggagctgatcgggctgctgaagactgcgcggctgctgcggctggtgcgcgtggcgcggaagctggatcgctactcagagtacggcgcggccgtgctgttcttgctcatgtgcacctttgcgctcatcgcgcactggctagcctgcatctggtacgccatcggcaacatggagcagccacacatggactcacgcatcggctggctgcacaacctgggcgaccagataggcaaaccctacaacagcagcggcctgggcggcccctccatcaaggacaagtatgtgacggcgctctacttcaccttcagcagcctcaccagtgtgggcttcggcaacgtctctcccaacaccaactcagagaagatcttctccatctgcgtcatgctcattggctccctcatgtatgctagcatcttcggcaacgtgtcggccatcatccagcggctgtactcgggcacagcccgctaccacacacagatgctgcgggtgcgggagttcatccgcttccaccagatccccaatcccctgcgccagcgcctcgaggagtacttccagcacgcctggtcctacaccaacggcatcgacatgaacgcggtgctgaagggcttccctgagtgcctgcaggctgacatctgcctgcacctgaaccgctcactgctgcagcactgcaaacccttccgaggggccaccaagggctgccttcgggccctggccatgaagttcaagaccacacatgcaccgccaggggacacactggtgcatgctggggacctgctcaccgccctgtacttcatctcccggggctccatcgagatcctgcggggcgacgtcgtcgtggccatcctggggaagaatgacatctttggggagcctctgaacctgtatgcaaggcctggcaagtcgaacggggatgtgcgggccctcacctactgtgacctacacaagatccatcgggacgacctgctggaggtgctggacatgtaccctgagttctccgaccacttctggtccagcctggagatcaccttcaacctgcgagataccaacatgatcccgggctcccccggcagtacggagttagagggtggcttcagtcggcaacgcaagcgcaagttgtccttccgcaggcgcacggacaaggacacggagcagccaggggaggtgtcggccttggggccgggccgggcgggggcagggccgagtagccggggccggccgggggggccgtggggggagagcccgtccagtggcccctccagccctgagagcagtgaggatgagggcccaggccgcagctccagccccctccgcctggtgcccttctccagccccaggccccccggagagccgccgggtggggagcccctgatggaggactgcgagaagagcagcgacacttgcaaccccctgtcaggcgccttctcaggagtgtccaacattttcagcttctggggggacagtcggggccgccagtaccaggagctccctcgatgccccgcccccacccccagcctcctcaacatccccctctccagcccgggtcggcggccccggggcgacgtggagagcaggctggatgccctccagcgccagctcaacaggctggagacccggctgagtgcagacatggccactgtcctgcagctgctacagaggcagatgacgctggtcccgcccgcctacagtgctgtgaccaccccggggcctggccccacttccacatccccgctgttgcccgtcagccccctccccaccctcaccttggactcgctttctcaggtttcccagttcatggcgtgtgaggagctgcccccgggggccccagagcttccccaagaaggccccacacgacgcctctccctaccgggccagctgggggccctcacctcccagcccctgcacagacacggctcggacccgggcagttagtggggctgcccagtgtggacacgtggctcacccagggatcaaggcgctgctgggccgctccccttggaggccctgctcaggaggccctgaccgtggaaggggagaggaactcgaaagcacagctcctcccccagcccttgggaccatcttctcctgcagtcccctgggccccagtgagaggggcaggggcagggccggcagtaggtggggcctgtggtccccccactgccctgagggcattagctggtctaactgcccggaggcacccggccctgggccttaggcacctcaaggacttttctgctatttactgctcttattgttaaggataataattaaggatcatatgaataattaatgaagatgctgatgactatgaataataaataattatcctgaggaga

SEQ ID NO: 460 - DNA, 3884 bp, Homo sapiens
  source 1..3884: mol_type = genomic DNA
  misc_feature 1..3884: note = cDNA of KCNH2 gene SNP c.221C>T (p.Thr74Met)
atgccggtgcggaggggccacgtcgcgccgcagaacaccttcctggacaccatcatccgcaagtttgagggccagagccgtaagttcatcatcgccaacgctcgggtggagaactgcgccgtcatctactgcaacgacggcttctgcgagctgtgcggctactcgcgggccgaggtgatgcagcgaccctgcacctgcgacttcctgcacgggccgcgcatgcagcgccgcgctgccgcgcagatcgcgcaggcactgctgggcgccgaggagcgcaaagtggaaatcgccttctaccggaaagatgggagctgcttcctatgtctggtggatgtggtgcccgtgaagaacgaggatggggctgtcatcatgttcatcctcaatttcgaggtggtgatggagaaggacatggtggggtccccggctcatgacaccaaccaccggggcccccccaccagctggctggccccaggccgcgccaagaccttccgcctgaagctgcccgcgctgctggcgctgacggcccgggagtcgtcggtgcggtcgggcggcgcgggcggcgcgggcgccccgggggccgtggtggtggacgtggacctgacgcccgcggcacccagcagcgagtcgctggccctggacgaagtgacagccatggacaaccacgtggcagggctcgggcccgcggaggagcggcgtgcgctggtgggtcccggctctccgccccgcagcgcgcccggccagctcccatcgccccgggcgcacagcctcaaccccgacgcctcgggctccagctgcagcctggcccggacgcgctcccgagaaagctgcgccagcgtgcgccgcgcctcgtcggccgacgacatcgaggccatgcgcgccggggtgctgcccccgccaccgcgccacgccagcaccggggccatgcacccactgcgcagcggcttgctcaactccacctcggactccgacctcgtgcgctaccgcaccattagcaagattccccaaatcaccctcaactttgtggacctcaagggcgaccccttcttggcttcgcccaccagtgaccgtgagatcatagcacctaagataaaggagcgaacccacaatgtcactgagaaggtcacccaggtcctgtccctgggcgccgacgtgctgcctgagtacaagctgcaggcaccgcgcatccaccgctggaccatcctgcattacagccccttcaaggccgtgtgggactggctcatcctgctgctggtcatctacacggctgtcttcacaccctactcggctgccttcctgctgaaggagacggaagaaggcccgcctgctaccgagtgtggctacgcctgccagccgctggctgtggtggacctcatcgtggacatcatgttcattgtggacatcctcatcaacttccgcaccacctacgtcaatgccaacgaggaggtggtcagccaccccggccgcatcgccgtccactacttcaagggctggttcctcatcgacatggtggccgccatccccttcgacctgctcatcttcggctctggctctgaggagctgatcgggctgctgaagactgcgcggctgctgcggctggtgcgcgtggcgcggaagctggatcgctactcagagtacggcgcggccgtgctgttcttgctcatgtgcacctttgcgctcatcgcgcactggctagcctgcatctggtacgccatcggcaacatggagcagccacacatggactcacgcatcggctggctgcacaacctgggcgaccagataggcaaaccctacaacagcagcggcctgggcggcccctccatcaaggacaagtatgtgacggcgctctacttcaccttcagcagcctcaccagtgtgggcttcggcaacgtctctcccaacaccaactcagagaagatcttctccatctgcgtcatgctcattggctccctcatgtatgctagcatcttcggcaacgtgtcggccatcatccagcggctgtactcgggcacagcccgctaccacacacagatgctgcgggtgcgggagttcatccgcttccaccagatccccaatcccctgcgccagcgcctcgaggagtacttccagcacgcctggtcctacaccaacggcatcgacatgaacgcggtgctgaagggcttccctgagtgcctgcaggctgacatctgcctgcacctgaaccgctcactgctgcagcactgcaaacccttccgaggggccaccaagggctgccttcgggccctggccatgaagttcaagaccacacatgcaccgccaggggacacactggtgcatgctggggacctgctcaccgccctgtacttcatctcccggggctccatcgagatcctgcggggcgacgtcgtcgtggccatcctggggaagaatgacatctttggggagcctctgaacctgtatgcaaggcctggcaagtcgaacggggatgtgcgggccctcacctactgtgacctacacaagatccatcgggacgacctgctggaggtgctggacatgtaccctgagttctccgaccacttctggtccagcctggagatcaccttcaacctgcgagataccaacatgatcccgggctcccccggcagtacggagttagagggtggcttcagtcggcaacgcaagcgcaagttgtccttccgcaggcgcacggacaaggacacggagcagccaggggaggtgtcggccttggggccgggccgggcgggggcagggccgagtagccggggccggccgggggggccgtggggggagagcccgtccagtggcccctccagccctgagagcagtgaggatgagggcccaggccgcagctccagccccctccgcctggtgcccttctccagccccaggccccccggagagccgccgggtggggagcccctgatggaggactgcgagaagagcagcgacacttgcaaccccctgtcaggcgccttctcaggagtgtccaacattttcagcttctggggggacagtcggggccgccagtaccaggagctccctcgatgccccgcccccacccccagcctcctcaacatccccctctccagcccgggtcggcggccccggggcgacgtggagagcaggctggatgccctccagcgccagctcaacaggctggagacccggctgagtgcagacatggccactgtcctgcagctgctacagaggcagatgacgctggtcccgcccgcctacagtgctgtgaccaccccggggcctggccccacttccacatccccgctgttgcccgtcagccccctccccaccctcaccttggactcgctttctcaggtttcccagttcatggcgtgtgaggagctgcccccgggggccccagagcttccccaagaaggccccacacgacgcctctccctaccgggccagctgggggccctcacctcccagcccctgcacagacacggctcggacccgggcagttagtggggctgcccagtgtggacacgtggctcacccagggatcaaggcgctgctgggccgctccccttggaggccctgctcaggaggccctgaccgtggaaggggagaggaactcgaaagcacagctcctcccccagcccttgggaccatcttctcctgcagtcccctgggccccagtgagaggggcaggggcagggccggcagtaggtggggcctgtggtccccccactgccctgagggcattagctggtctaactgcccggaggcacccggccctgggccttaggcacctcaaggacttttctgctatttactgctcttattgttaaggataataattaaggatcatatgaataattaatgaagatgctgatgactatgaataataaataattatcctgaggaga

SEQ ID NO: 461 - DNA, 3884 bp, Homo sapiens
  source 1..3884: mol_type = genomic DNA
  misc_feature 1..3884: note = cDNA of KCNH2 gene SNP c.2221A>C (p.Lys741Gln)
atgccggtgcggaggggccacgtcgcgccgcagaacaccttcctggacaccatcatccgcaagtttgagggccagagccgtaagttcatcatcgccaacgctcgggtggagaactgcgccgtcatctactgcaacgacggcttctgcgagctgtgcggctactcgcgggccgaggtgatgcagcgaccctgcacctgcgacttcctgcacgggccgcgcacgcagcgccgcgctgccgcgcagatcgcgcaggcactgctgggcgccgaggagcgcaaagtggaaatcgccttctaccggaaagatgggagctgcttcctatgtctggtggatgtggtgcccgtgaagaacgaggatggggctgtcatcatgttcatcctcaatttcgaggtggtgatggagaaggacatggtggggtccccggctcatgacaccaaccaccggggcccccccaccagctggctggccccaggccgcgccaagaccttccgcctgaagctgcccgcgctgctggcgctgacggcccgggagtcgtcggtgcggtcgggcggcgcgggcggcgcgggcgccccgggggccgtggtggtggacgtggacctgacgcccgcggcacccagcagcgagtcgctggccctggacgaagtgacagccatggacaaccacgtggcagggctcgggcccgcggaggagcggcgtgcgctggtgggtcccggctctccgccccgcagcgcgcccggccagctcccatcgccccgggcgcacagcctcaaccccgacgcctcgggctccagctgcagcctggcccggacgcgctcccgagaaagctgcgccagcgtgcgccgcgcctcgtcggccgacgacatcgaggccatgcgcgccggggtgctgcccccgccaccgcgccacgccagcaccggggccatgcacccactgcgcagcggcttgctcaactccacctcggactccgacctcgtgcgctaccgcaccattagcaagattccccaaatcaccctcaactttgtggacctcaagggcgaccccttcttggcttcgcccaccagtgaccgtgagatcatagcacctaagataaaggagcgaacccacaatgtcactgagaaggtcacccaggtcctgtccctgggcgccgacgtgctgcctgagtacaagctgcaggcaccgcgcatccaccgctggaccatcctgcattacagccccttcaaggccgtgtgggactggctcatcctgctgctggtcatctacacggctgtcttcacaccctactcggctgccttcctgctgaaggagacggaagaaggcccgcctgctaccgagtgtggctacgcctgccagccgctggctgtggtggacctcatcgtggacatcatgttcattgtggacatcctcatcaacttccgcaccacctacgtcaatgccaacgaggaggtggtcagccaccccggccgcatcgccgtccactacttcaagggctggttcctcatcgacatggtggccgccatccccttcgacctgctcatcttcggctctggctctgaggagctgatcgggctgctgaagactgcgcggctgctgcggctggtgcgcgtggcgcggaagctggatcgctactcagagtacggcgcggccgtgctgttcttgctcatgtgcacctttgcgctcatcgcgcactggctagcctgcatctggtacgccatcggcaacatggagcagccacacatggactcacgcatcggctggctgcacaacctgggcgaccagataggcaaaccctacaacagcagcggcctgggcggcccctccatcaaggacaagtatgtgacggcgctctacttcaccttcagcagcctcaccagtgtgggcttcggcaacgtctctcccaacaccaactcagagaagatcttctccatctgcgtcatgctcattggctccctcatgtatgctagcatcttcggcaacgtgtcggccatcatccagcggctgtactcgggcacagcccgctaccacacacagatgctgcgggtgcgggagttcatccgcttccaccagatccccaatcccctgcgccagcgcctcgaggagtacttccagcacgcctggtcctacaccaacggcatcgacatgaacgcggtgctgaagggcttccctgagtgcctgcaggctgacatctgcctgcacctgaaccgctcactgctgcagcactgccaacccttccgaggggccaccaagggctgccttcgggccctggccatgaagttcaagaccacacatgcaccgccaggggacacactggtgcatgctggggacctgctcaccgccctgtacttcatctcccggggctccatcgagatcctgcggggcgacgtcgtcgtggccatcctggggaagaatgacatctttggggagcctctgaacctgtatgcaaggcctggcaagtcgaacggggatgtgcgggccctcacctactgtgacctacacaagatccatcgggacgacctgctggaggtgctggacatgtaccctgagttctccgaccacttctggtccagcctggagatcaccttcaacctgcgagataccaacatgatcccgggctcccccggcagtacggagttagagggtggcttcagtcggcaacgcaagcgcaagttgtccttccgcaggcgcacggacaaggacacggagcagccaggggaggtgtcggccttggggccgggccgggcgggggcagggccgagtagccggggccggccgggggggccgtggggggagagcccgtccagtggcccctccagccctgagagcagtgaggatgagggcccaggccgcagctccagccccctccgcctggtgcccttctccagccccaggccccccggagagccgccgggtggggagcccctgatggaggactgcgagaagagcagcgacacttgcaaccccctgtcaggcgccttctcaggagtgtccaacattttcagcttctggggggacagtcggggccgccagtaccaggagctccctcgatgccccgcccccacccccagcctcctcaacatccccctctccagcccgggtcggcggccccggggcgacgtggagagcaggctggatgccctccagcgccagctcaacaggctggagacccggctgagtgcagacatggccactgtcctgcagctgctacagaggcagatgacgctggtcccgcccgcctacagtgctgtgaccaccccggggcctggccccacttccacatccccgctgttgcccgtcagccccctccccaccctcaccttggactcgctttctcaggtttcccagttcatggcgtgtgaggagctgcccccgggggccccagagcttccccaagaaggccccacacgacgcctctccctaccgggccagctgggggccctcacctcccagcccctgcacagacacggctcggacccgggcagttagtggggctgcccagtgtggacacgtggctcacccagggatcaaggcgctgctgggccgctccccttggaggccctgctcaggaggccctgaccgtggaaggggagaggaactcgaaagcacagctcctcccccagcccttgggaccatcttctcctgcagtcccctgggccccagtgagaggggcaggggcagggccggcagtaggtggggcctgtggtccccccactgccctgagggcattagctggtctaactgcccggaggcacccggccctgggccttaggcacctcaaggacttttctgctatttactgctcttattgttaaggataataattaaggatcatatgaataattaatgaagatgctgatgactatgaataataaataattatcctgaggaga

SEQ ID NO: 462 - DNA, 3884 bp, Homo sapiens
  source 1..3884: mol_type = genomic DNA
  misc_feature 1..3884: note = cDNA of KCNH2 gene SNP c.2222A>G (p.Lys741Arg)
atgccggtgcggaggggccacgtcgcgccgcagaacaccttcctggacaccatcatccgcaagtttgagggccagagccgtaagttcatcatcgccaacgctcgggtggagaactgcgccgtcatctactgcaacgacggcttctgcgagctgtgcggctactcgcgggccgaggtgatgcagcgaccctgcacctgcgacttcctgcacgggccgcgcacgcagcgccgcgctgccgcgcagatcgcgcaggcactgctgggcgccgaggagcgcaaagtggaaatcgccttctaccggaaagatgggagctgcttcctatgtctggtggatgtggtgcccgtgaagaacgaggatggggctgtcatcatgttcatcctcaatttcgaggtggtgatggagaaggacatggtggggtccccggctcatgacaccaaccaccggggcccccccaccagctggctggccccaggccgcgccaagaccttccgcctgaagctgcccgcgctgctggcgctgacggcccgggagtcgtcggtgcggtcgggcggcgcgggcggcgcgggcgccccgggggccgtggtggtggacgtggacctgacgcccgcggcacccagcagcgagtcgctggccctggacgaagtgacagccatggacaaccacgtggcagggctcgggcccgcggaggagcggcgtgcgctggtgggtcccggctctccgccccgcagcgcgcccggccagctcccatcgccccgggcgcacagcctcaaccccgacgcctcgggctccagctgcagcctggcccggacgcgctcccgagaaagctgcgccagcgtgcgccgcgcctcgtcggccgacgacatcgaggccatgcgcgccggggtgctgcccccgccaccgcgccacgccagcaccggggccatgcacccactgcgcagcggcttgctcaactccacctcggactccgacctcgtgcgctaccgcaccattagcaagattccccaaatcaccctcaactttgtggacctcaagggcgaccccttcttggcttcgcccaccagtgaccgtgagatcatagcacctaagataaaggagcgaacccacaatgtcactgagaaggtcacccaggtcctgtccctgggcgccgacgtgctgcctgagtacaagctgcaggcaccgcgcatccaccgctggaccatcctgcattacagccccttcaaggccgtgtgggactggctcatcctgctgctggtcatctacacggctgtcttcacaccctactcggctgccttcctgctgaaggagacggaagaaggcccgcctgctaccgagtgtggctacgcctgccagccgctggctgtggtggacctcatcgtggacatcatgttcattgtggacatcctcatcaacttccgcaccacctacgtcaatgccaacgaggaggtggtcagccaccccggccgcatcgccgtccactacttcaagggctggttcctcatcgacatggtggccgccatccccttcgacctgctcatcttcggctctggctctgaggagctgatcgggctgctgaagactgcgcggctgctgcggctggtgcgcgtggcgcggaagctggatcgctactcagagtacggcgcggccgtgctgttcttgctcatgtgcacctttgcgctcatcgcgcactggctagcctgcatctggtacgccatcggcaacatggagcagccacacatggactcacgcatcggctggctgcacaacctgggcgaccagataggcaaaccctacaacagcagcggcctgggcggcccctccatcaaggacaagtatgtgacggcgctctacttcaccttcagcagcctcaccagtgtgggcttcggcaacgtctctcccaacaccaactcagagaagatcttctccatctgcgtcatgctcattggctccctcatgtatgctagcatcttcggcaacgtgtcggccatcatccagcggctgtactcgggcacagcccgctaccacacacagatgctgcgggtgcgggagttcatccgcttccaccagatccccaatcccctgcgccagcgcctcgaggagtacttccagcacgcctggtcctacaccaacggcatcgacatgaacgcggtgctgaagggcttccctgagtgcctgcaggctgacatctgcctgcacctgaaccgctcactgctgcagcactgcagacccttccgaggggccaccaagggctgccttcgggccctggccatgaagttcaagaccacacatgcaccgccaggggacacactggtgcatgctggggacctgctcaccgccctgtacttcatctcccggggctccatcgagatcctgcggggcgacgtcgtcgtggccatcctggggaagaatgacatctttggggagcctctgaacctgtatgcaaggcctggcaagtcgaacggggatgtgcgggccctcacctactgtgacctacacaagatccatcgggacgacctgctggaggtgctggacatgtaccctgagttctccgaccacttctggtccagcctggagatcaccttcaacctgcgagataccaacatgatcccgggctcccccggcagtacggagttagagggtggcttcagtcggcaacgcaagcgcaagttgtccttccgcaggcgcacggacaaggacacggagcagccaggggaggtgtcggccttggggccgggccgggcgggggcagggccgagtagccggggccggccgggggggccgtggggggagagcccgtccagtggcccctccagccctgagagcagtgaggatgagggcccaggccgcagctccagccccctccgcctggtgcccttctccagccccaggccccccggagagccgccgggtggggagcccctgatggaggactgcgagaagagcagcgacacttgcaaccccctgtcaggcgccttctcaggagtgtccaacattttcagcttctggggggacagtcggggccgccagtaccaggagctccctcgatgccccgcccccacccccagcctcctcaacatccccctctccagcccgggtcggcggccccggggcgacgtggagagcaggctggatgccctccagcgccagctcaacaggctggagacccggctgagtgcagacatggccactgtcctgcagctgctacagaggcagatgacgctggtcccgcccgcctacagtgctgtgaccaccccggggcctggccccacttccacatccccgctgttgcccgtcagccccctccccaccctcaccttggactcgctttctcaggtttcccagttcatggcgtgtgaggagctgcccccgggggccccagagcttccccaagaaggccccacacgacgcctctccctaccgggccagctgggggccctcacctcccagcccctgcacagacacggctcggacccgggcagttagtggggctgcccagtgtggacacgtggctcacccagggatcaaggcgctgctgggccgctccccttggaggccctgctcaggaggccctgaccgtggaaggggagaggaactcgaaagcacagctcctcccccagcccttgggaccatcttctcctgcagtcccctgggccccagtgagaggggcaggggcagggccggcagtaggtggggcctgtggtccccccactgccctgagggcattagctggtctaactgcccggaggcacccggccctgggccttaggcacctcaaggacttttctgctatttactgctcttattgttaaggataataattaaggatcatatgaataattaatgaagatgctgatgactatgaataataaataattatcctgaggaga

SEQ ID NO: 463 - DNA, 3884 bp, Homo sapiens
  source 1..3884: mol_type = genomic DNA
  misc_feature 1..3884: note = cDNA of KCNH2 gene SNP c.2230C>T (p.Arg744Ter)
atgccggtgcggaggggccacgtcgcgccgcagaacaccttcctggacaccatcatccgcaagtttgagggccagagccgtaagttcatcatcgccaacgctcgggtggagaactgcgccgtcatctactgcaacgacggcttctgcgagctgtgcggctactcgcgggccgaggtgatgcagcgaccctgcacctgcgacttcctgcacgggccgcgcacgcagcgccgcgctgccgcgcagatcgcgcaggcactgctgggcgccgaggagcgcaaagtggaaatcgccttctaccggaaagatgggagctgcttcctatgtctggtggatgtggtgcccgtgaagaacgaggatggggctgtcatcatgttcatcctcaatttcgaggtggtgatggagaaggacatggtggggtccccggctcatgacaccaaccaccggggcccccccaccagctggctggccccaggccgcgccaagaccttccgcctgaagctgcccgcgctgctggcgctgacggcccgggagtcgtcggtgcggtcgggcggcgcgggcggcgcgggcgccccgggggccgtggtggtggacgtggacctgacgcccgcggcacccagcagcgagtcgctggccctggacgaagtgacagccatggacaaccacgtggcagggctcgggcccgcggaggagcggcgtgcgctggtgggtcccggctctccgccccgcagcgcgcccggccagctcccatcgccccgggcgcacagcctcaaccccgacgcctcgggctccagctgcagcctggcccggacgcgctcccgagaaagctgcgccagcgtgcgccgcgcctcgtcggccgacgacatcgaggccatgcgcgccggggtgctgcccccgccaccgcgccacgccagcaccggggccatgcacccactgcgcagcggcttgctcaactccacctcggactccgacctcgtgcgctaccgcaccattagcaagattccccaaatcaccctcaactttgtggacctcaagggcgaccccttcttggcttcgcccaccagtgaccgtgagatcatagcacctaagataaaggagcgaacccacaatgtcactgagaaggtcacccaggtcctgtccctgggcgccgacgtgctgcctgagtacaagctgcaggcaccgcgcatccaccgctggaccatcctgcattacagccccttcaaggccgtgtgggactggctcatcctgctgctggtcatctacacggctgtcttcacaccctactcggctgccttcctgctgaaggagacggaagaaggcccgcctgctaccgagtgtggctacgcctgccagccgctggctgtggtggacctcatcgtggacatcatgttcattgtggacatcctcatcaacttccgcaccacctacgtcaatgccaacgaggaggtggtcagccaccccggccgcatcgccgtccactacttcaagggctggttcctcatcgacatggtggccgccatccccttcgacctgctcatcttcggctctggctctgaggagctgatcgggctgctgaagactgcgcggctgctgcggctggtgcgcgtggcgcggaagctggatcgctactcagagtacggcgcggccgtgctgttcttgctcatgtgcacctttgcgctcatcgcgcactggctagcctgcatctggtacgccatcggcaacatggagcagccacacatggactcacgcatcggctggctgcacaacctgggcgaccagataggcaaaccctacaacagcagcggcctgggcggcccctccatcaaggacaagtatgtgacggcgctctacttcaccttcagcagcctcaccagtgtgggcttcggcaacgtctctcccaacaccaactcagagaagatcttctccatctgcgtcatgctcattggctccctcatgtatgctagcatcttcggcaacgtgtcggccatcatccagcggctgtactcgggcacagcccgctaccacacacagatgctgcgggtgcgggagttcatccgcttccaccagatccccaatcccctgcgccagcgcctcgaggagtacttccagcacgcctggtcctacaccaacggcatcgacatgaacgcggtgctgaagggcttccctgagtgcctgcaggctgacatctgcctgcacctgaaccgctcactgctgcagcactgcaaacccttctgaggggccaccaagggctgccttcgggccctggccatgaagttcaagaccacacatgcaccgccaggggacacactggtgcatgctggggacctgctcaccgccctgtacttcatctcccggggctccatcgagatcctgcggggcgacgtcgtcgtggccatcctggggaagaatgacatctttggggagcctctgaacctgtatgcaaggcctggcaagtcgaacggggatgtgcgggccctcacctactgtgacctacacaagatccatcgggacgacctgctggaggtgctggacatgtaccctgagttctccgaccacttctggtccagcctggagatcaccttcaacctgcgagataccaacatgatcccgggctcccccggcagtacggagttagagggtggcttcagtcggcaacgcaagcgcaagttgtccttccgcaggcgcacggacaaggacacggagcagccaggggaggtgtcggccttggggccgggccgggcgggggcagggccgagtagccggggccggccgggggggccgtggggggagagcccgtccagtggcccctccagccctgagagcagtgaggatgagggcccaggccgcagctccagccccctccgcctggtgcccttctccagccccaggccccccggagagccgccgggtggggagcccctgatggaggactgcgagaagagcagcgacacttgcaaccccctgtcaggcgccttctcaggagtgtccaacattttcagcttctggggggacagtcggggccgccagtaccaggagctccctcgatgccccgcccccacccccagcctcctcaacatccccctctccagcccgggtcggcggccccggggcgacgtggagagcaggctggatgccctccagcgccagctcaacaggctggagacccggctgagtgcagacatggccactgtcctgcagctgctacagaggcagatgacgctggtcccgcccgcctacagtgctgtgaccaccccggggcctggccccacttccacatccccgctgttgcccgtcagccccctccccaccctcaccttggactcgctttctcaggtttcccagttcatggcgtgtgaggagctgcccccgggggccccagagcttccccaagaaggccccacacgacgcctctccctaccgggccagctgggggccctcacctcccagcccctgcacagacacggctcggacccgggcagttagtggggctgcccagtgtggacacgtggctcacccagggatcaaggcgctgctgggccgctccccttggaggccctgctcaggaggccctgaccgtggaaggggagaggaactcgaaagcacagctcctcccccagcccttgggaccatcttctcctgcagtcccctgggccccagtgagaggggcaggggcagggccggcagtaggtggggcctgtggtccccccactgccctgagggcattagctggtctaactgcccggaggcacccggccctgggccttaggcacctcaaggacttttctgctatttactgctcttattgttaaggataataattaaggatcatatgaataattaatgaagatgctgatgactatgaataataaataattatcctgaggaga

SEQ ID NO: 464 - DNA, 3884 bp, Homo sapiens
  source 1..3884: mol_type = genomic DNA
  misc_feature 1..3884: note = cDNA of KCNH2 gene SNP c.2231G>A (p.Arg744Gln)
atgccggtgcggaggggccacgtcgcgccgcagaacaccttcctggacaccatcatccgcaagtttgagggccagagccgtaagttcatcatcgccaacgctcgggtggagaactgcgccgtcatctactgcaacgacggcttctgcgagctgtgcggctactcgcgggccgaggtgatgcagcgaccctgcacctgcgacttcctgcacgggccgcgcacgcagcgccgcgctgccgcgcagatcgcgcaggcactgctgggcgccgaggagcgcaaagtggaaatcgccttctaccggaaagatgggagctgcttcctatgtctggtggatgtggtgcccgtgaagaacgaggatggggctgtcatcatgttcatcctcaatttcgaggtggtgatggagaaggacatggtggggtccccggctcatgacaccaaccaccggggcccccccaccagctggctggccccaggccgcgccaagaccttccgcctgaagctgcccgcgctgctggcgctgacggcccgggagtcgtcggtgcggtcgggcggcgcgggcggcgcgggcgccccgggggccgtggtggtggacgtggacctgacgcccgcggcacccagcagcgagtcgctggccctggacgaagtgacagccatggacaaccacgtggcagggctcgggcccgcggaggagcggcgtgcgctggtgggtcccggctctccgccccgcagcgcgcccggccagctcccatcgccccgggcgcacagcctcaaccccgacgcctcgggctccagctgcagcctggcccggacgcgctcccgagaaagctgcgccagcgtgcgccgcgcctcgtcggccgacgacatcgaggccatgcgcgccggggtgctgcccccgccaccgcgccacgccagcaccggggccatgcacccactgcgcagcggcttgctcaactccacctcggactccgacctcgtgcgctaccgcaccattagcaagattccccaaatcaccctcaactttgtggacctcaagggcgaccccttcttggcttcgcccaccagtgaccgtgagatcatagcacctaagataaaggagcgaacccacaatgtcactgagaaggtcacccaggtcctgtccctgggcgccgacgtgctgcctgagtacaagctgcaggcaccgcgcatccaccgctggaccatcctgcattacagccccttcaaggccgtgtgggactggctcatcctgctgctggtcatctacacggctgtcttcacaccctactcggctgccttcctgctgaaggagacggaagaaggcccgcctgctaccgagtgtggctacgcctgccagccgctggctgtggtggacctcatcgtggacatcatgttcattgtggacatcctcatcaacttccgcaccacctacgtcaatgccaacgaggaggtggtcagccaccccggccgcatcgccgtccactacttcaagggctggttcctcatcgacatggtggccgccatccccttcgacctgctcatcttcggctctggctctgaggagctgatcgggctgctgaagactgcgcggctgctgcggctggtgcgcgtggcgcggaagctggatcgctactcagagtacggcgcggccgtgctgttcttgctcatgtgcacctttgcgctcatcgcgcactggctagcctgcatctggtacgccatcggcaacatggagcagccacacatggactcacgcatcggctggctgcacaacctgggcgaccagataggcaaaccctacaacagcagcggcctgggcggcccctccatcaaggacaagtatgtgacggcgctctacttcaccttcagcagcctcaccagtgtgggcttcggcaacgtctctcccaacaccaactcagagaagatcttctccatctgcgtcatgctcattggctccctcatgtatgctagcatcttcggcaacgtgtcggccatcatccagcggctgtactcgggcacagcccgctaccacacacagatgctgcgggtgcgggagttcatccgcttccaccagatccccaatcccctgcgccagcgcctcgaggagtacttccagcacgcctggtcctacaccaacggcatcgacatgaacgcggtgctgaagggcttccctgagtgcctgcaggctgacatctgcctgcacctgaaccgctcactgctgcagcactgcaaacccttccaaggggccaccaagggctgccttcgggccctggccatgaagttcaagaccacacatgcaccgccaggggacacactggtgcatgctggggacctgctcaccgccctgtacttcatctcccggggctccatcgagatcctgcggggcgacgtcgtcgtggccatcctggggaagaatgacatctttggggagcctctgaacctgtatgcaaggcctggcaagtcgaacggggatgtgcgggccctcacctactgtgacctacacaagatccatcgggacgacctgctggaggtgctggacatgtaccctgagttctccgaccacttctggtccagcctggagatcaccttcaacctgcgagataccaacatgatcccgggctcccccggcagtacggagttagagggtggcttcagtcggcaacgcaagcgcaagttgtccttccgcaggcgcacggacaaggacacggagcagccaggggaggtgtcggccttggggccgggccgggcgggggcagggccgagtagccggggccggccgggggggccgtggggggagagcccgtccagtggcccctccagccctgagagcagtgaggatgagggcccaggccgcagctccagccccctccgcctggtgcccttctccagccccaggccccccggagagccgccgggtggggagcccctgatggaggactgcgagaagagcagcgacacttgcaaccccctgtcaggcgccttctcaggagtgtccaacattttcagcttctggggggacagtcggggccgccagtaccaggagctccctcgatgccccgcccccacccccagcctcctcaacatccccctctccagcccgggtcggcggccccggggcgacgtggagagcaggctggatgccctccagcgccagctcaacaggctggagacccggctgagtgcagacatggccactgtcctgcagctgctacagaggcagatgacgctggtcccgcccgcctacagtgctgtgaccaccccggggcctggccccacttccacatccccgctgttgcccgtcagccccctccccaccctcaccttggactcgctttctcaggtttcccagttcatggcgtgtgaggagctgcccccgggggccccagagcttccccaagaaggccccacacgacgcctctccctaccgggccagctgggggccctcacctcccagcccctgcacagacacggctcggacccgggcagttagtggggctgcccagtgtggacacgtggctcacccagggatcaaggcgctgctgggccgctccccttggaggccctgctcaggaggccctgaccgtggaaggggagaggaactcgaaagcacagctcctcccccagcccttgggaccatcttctcctgcagtcccctgggccccagtgagaggggcaggggcagggccggcagtaggtggggcctgtggtccccccactgccctgagggcattagctggtctaactgcccggaggcacccggccctgggccttaggcacctcaaggacttttctgctatttactgctcttattgttaaggataataattaaggatcatatgaataattaatgaagatgctgatgactatgaataataaataattatcctgaggaga

SEQ ID NO: 465 - DNA, 3884 bp, Homo sapiens
  source 1..3884: mol_type = genomic DNA
  misc_feature 1..3884: note = cDNA of KCNH2 gene SNP c.2231G>C (p.Arg744Pro)
atgccggtgcggaggggccacgtcgcgccgcagaacaccttcctggacaccatcatccgcaagtttgagggccagagccgtaagttcatcatcgccaacgctcgggtggagaactgcgccgtcatctactgcaacgacggcttctgcgagctgtgcggctactcgcgggccgaggtgatgcagcgaccctgcacctgcgacttcctgcacgggccgcgcacgcagcgccgcgctgccgcgcagatcgcgcaggcactgctgggcgccgaggagcgcaaagtggaaatcgccttctaccggaaagatgggagctgcttcctatgtctggtggatgtggtgcccgtgaagaacgaggatggggctgtcatcatgttcatcctcaatttcgaggtggtgatggagaaggacatggtggggtccccggctcatgacaccaaccaccggggcccccccaccagctggctggccccaggccgcgccaagaccttccgcctgaagctgcccgcgctgctggcgctgacggcccgggagtcgtcggtgcggtcgggcggcgcgggcggcgcgggcgccccgggggccgtggtggtggacgtggacctgacgcccgcggcacccagcagcgagtcgctggccctggacgaagtgacagccatggacaaccacgtggcagggctcgggcccgcggaggagcggcgtgcgctggtgggtcccggctctccgccccgcagcgcgcccggccagctcccatcgccccgggcgcacagcctcaaccccgacgcctcgggctccagctgcagcctggcccggacgcgctcccgagaaagctgcgccagcgtgcgccgcgcctcgtcggccgacgacatcgaggccatgcgcgccggggtgctgcccccgccaccgcgccacgccagcaccggggccatgcacccactgcgcagcggcttgctcaactccacctcggactccgacctcgtgcgctaccgcaccattagcaagattccccaaatcaccctcaactttgtggacctcaagggcgaccccttcttggcttcgcccaccagtgaccgtgagatcatagcacctaagataaaggagcgaacccacaatgtcactgagaaggtcacccaggtcctgtccctgggcgccgacgtgctgcctgagtacaagctgcaggcaccgcgcatccaccgctggaccatcctgcattacagccccttcaaggccgtgtgggactggctcatcctgctgctggtcatctacacggctgtcttcacaccctactcggctgccttcctgctgaaggagacggaagaaggcccgcctgctaccgagtgtggctacgcctgccagccgctggctgtggtggacctcatcgtggacatcatgttcattgtggacatcctcatcaacttccgcaccacctacgtcaatgccaacgaggaggtggtcagccaccccggccgcatcgccgtccactacttcaagggctggttcctcatcgacatggtggccgccatccccttcgacctgctcatcttcggctctggctctgaggagctgatcgggctgctgaagactgcgcggctgctgcggctggtgcgcgtggcgcggaagctggatcgctactcagagtacggcgcggccgtgctgttcttgctcatgtgcacctttgcgctcatcgcgcactggctagcctgcatctggtacgccatcggcaacatggagcagccacacatggactcacgcatcggctggctgcacaacctgggcgaccagataggcaaaccctacaacagcagcggcctgggcggcccctccatcaaggacaagtatgtgacggcgctctacttcaccttcagcagcctcaccagtgtgggcttcggcaacgtctctcccaacaccaactcagagaagatcttctccatctgcgtcatgctcattggctccctcatgtatgctagcatcttcggcaacgtgtcggccatcatccagcggctgtactcgggcacagcccgctaccacacacagatgctgcgggtgcgggagttcatccgcttccaccagatccccaatcccctgcgccagcgcctcgaggagtacttccagcacgcctggtcctacaccaacggcatcgacatgaacgcggtgctgaagggcttccctgagtgcctgcaggctgacatctgcctgcacctgaaccgctcactgctgcagcactgcaaacccttcccaggggccaccaagggctgccttcgggccctggccatgaagttcaagaccacacatgcaccgccaggggacacactggtgcatgctggggacctgctcaccgccctgtacttcatctcccggggctccatcgagatcctgcggggcgacgtcgtcgtggccatcctggggaagaatgacatctttggggagcctctgaacctgtatgcaaggcctggcaagtcgaacggggatgtgcgggccctcacctactgtgacctacacaagatccatcgggacgacctgctggaggtgctggacatgtaccctgagttctccgaccacttctggtccagcctggagatcaccttcaacctgcgagataccaacatgatcccgggctcccccggcagtacggagttagagggtggcttcagtcggcaacgcaagcgcaagttgtccttccgcaggcgcacggacaaggacacggagcagccaggggaggtgtcggccttggggccgggccgggcgggggcagggccgagtagccggggccggccgggggggccgtggggggagagcccgtccagtggcccctccagccctgagagcagtgaggatgagggcccaggccgcagctccagccccctccgcctggtgcccttctccagccccaggccccccggagagccgccgggtggggagcccctgatggaggactgcgagaagagcagcgacacttgcaaccccctgtcaggcgccttctcaggagtgtccaacattttcagcttctggggggacagtcggggccgccagtaccaggagctccctcgatgccccgcccccacccccagcctcctcaacatccccctctccagcccgggtcggcggccccggggcgacgtggagagcaggctggatgccctccagcgccagctcaacaggctggagacccggctgagtgcagacatggccactgtcctgcagctgctacagaggcagatgacgctggtcccgcccgcctacagtgctgtgaccaccccggggcctggccccacttccacatccccgctgttgcccgtcagccccctccccaccctcaccttggactcgctttctcaggtttcccagttcatggcgtgtgaggagctgcccccgggggccccagagcttccccaagaaggccccacacgacgcctctccctaccgggccagctgggggccctcacctcccagcccctgcacagacacggctcggacccgggcagttagtggggctgcccagtgtggacacgtggctcacccagggatcaaggcgctgctgggccgctccccttggaggccctgctcaggaggccctgaccgtggaaggggagaggaactcgaaagcacagctcctcccccagcccttgggaccatcttctcctgcagtcccctgggccccagtgagaggggcaggggcagggccggcagtaggtggggcctgtggtccccccactgccctgagggcattagctggtctaactgcccggaggcacccggccctgggccttaggcacctcaaggacttttctgctatttactgctcttattgttaaggataataattaaggatcatatgaataattaatgaagatgctgatgactatgaataataaataattatcctgaggaga

SEQ ID NO: 466 - DNA, 3884 bp, Homo sapiens
  source 1..3884: mol_type = genomic DNA
  misc_feature 1..3884: note = cDNA of KCNH2 gene SNP c.2236G>T (p.Ala746Ser)
atgccggtgcggaggggccacgtcgcgccgcagaacaccttcctggacaccatcatccgcaagtttgagggccagagccgtaagttcatcatcgccaacgctcgggtggagaactgcgccgtcatctactgcaacgacggcttctgcgagctgtgcggctactcgcgggccgaggtgatgcagcgaccctgcacctgcgacttcctgcacgggccgcgcacgcagcgccgcgctgccgcgcagatcgcgcaggcactgctgggcgccgaggagcgcaaagtggaaatcgccttctaccggaaagatgggagctgcttcctatgtctggtggatgtggtgcccgtgaagaacgaggatggggctgtcatcatgttcatcctcaatttcgaggtggtgatggagaaggacatggtggggtccccggctcatgacaccaaccaccggggcccccccaccagctggctggccccaggccgcgccaagaccttccgcctgaagctgcccgcgctgctggcgctgacggcccgggagtcgtcggtgcggtcgggcggcgcgggcggcgcgggcgccccgggggccgtggtggtggacgtggacctgacgcccgcggcacccagcagcgagtcgctggccctggacgaagtgacagccatggacaaccacgtggcagggctcgggcccgcggaggagcggcgtgcgctggtgggtcccggctctccgccccgcagcgcgcccggccagctcccatcgccccgggcgcacagcctcaaccccgacgcctcgggctccagctgcagcctggcccggacgcgctcccgagaaagctgcgccagcgtgcgccgcgcctcgtcggccgacgacatcgaggccatgcgcgccggggtgctgcccccgccaccgcgccacgccagcaccggggccatgcacccactgcgcagcggcttgctcaactccacctcggactccgacctcgtgcgctaccgcaccattagcaagattccccaaatcaccctcaactttgtggacctcaagggcgaccccttcttggcttcgcccaccagtgaccgtgagatcatagcacctaagataaaggagcgaacccacaatgtcactgagaaggtcacccaggtcctgtccctgggcgccgacgtgctgcctgagtacaagctgcaggcaccgcgcatccaccgctggaccatcctgcattacagccccttcaaggccgtgtgggactggctcatcctgctgctggtcatctacacggctgtcttcacaccctactcggctgccttcctgctgaaggagacggaagaaggcccgcctgctaccgagtgtggctacgcctgccagccgctggctgtggtggacctcatcgtggacatcatgttcattgtggacatcctcatcaacttccgcaccacctacgtcaatgccaacgaggaggtggtcagccaccccggccgcatcgccgtccactacttcaagggctggttcctcatcgacatggtggccgccatccccttcgacctgctcatcttcggctctggctctgaggagctgatcgggctgctgaagactgcgcggctgctgcggctggtgcgcgtggcgcggaagctggatcgctactcagagtacggcgcggccgtgctgttcttgctcatgtgcacctttgcgctcatcgcgcactggctagcctgcatctggtacgccatcggcaacatggagcagccacacatggactcacgcatcggctggctgcacaacctgggcgaccagataggcaaaccctacaacagcagcggcctgggcggcccctccatcaaggacaagtatgtgacggcgctctacttcaccttcagcagcctcaccagtgtgggcttcggcaacgtctctcccaacaccaactcagagaagatcttctccatctgcgtcatgctcattggctccctcatgtatgctagcatcttcggcaacgtgtcggccatcatccagcggctgtactcgggcacagcccgctaccacacacagatgctgcgggtgcgggagttcatccgcttccaccagatccccaatcccctgcgccagcgcctcgaggagtacttccagcacgcctggtcctacaccaacggcatcgacatgaacgcggtgctgaagggcttccctgagtgcctgcaggctgacatctgcctgcacctgaaccgctcactgctgcagcactgcaaacccttccgagggtccaccaagggctgccttcgggccctggccatgaagttcaagaccacacatgcaccgccaggggacacactggtgcatgctggggacctgctcaccgccctgtacttcatctcccggggctccatcgagatcctgcggggcgacgtcgtcgtggccatcctggggaagaatgacatctttggggagcctctgaacctgtatgcaaggcctggcaagtcgaacggggatgtgcgggccctcacctactgtgacctacacaagatccatcgggacgacctgctggaggtgctggacatgtaccctgagttctccgaccacttctggtccagcctggagatcaccttcaacctgcgagataccaacatgatcccgggctcccccggcagtacggagttagagggtggcttcagtcggcaacgcaagcgcaagttgtccttccgcaggcgcacggacaaggacacggagcagccaggggaggtgtcggccttggggccgggccgggcgggggcagggccgagtagccggggccggccgggggggccgtggggggagagcccgtccagtggcccctccagccctgagagcagtgaggatgagggcccaggccgcagctccagccccctccgcctggtgcccttctccagccccaggccccccggagagccgccgggtggggagcccctgatggaggactgcgagaagagcagcgacacttgcaaccccctgtcaggcgccttctcaggagtgtccaacattttcagcttctggggggacagtcggggccgccagtaccaggagctccctcgatgccccgcccccacccccagcctcctcaacatccccctctccagcccgggtcggcggccccggggcgacgtggagagcaggctggatgccctccagcgccagctcaacaggctggagacccggctgagtgcagacatggccactgtcctgcagctgctacagaggcagatgacgctggtcccgcccgcctacagtgctgtgaccaccccggggcctggccccacttccacatccccgctgttgcccgtcagccccctccccaccctcaccttggactcgctttctcaggtttcccagttcatggcgtgtgaggagctgcccccgggggccccagagcttccccaagaaggccccacacgacgcctctccctaccgggccagctgggggccctcacctcccagcccctgcacagacacggctcggacccgggcagttagtggggctgcccagtgtggacacgtggctcacccagggatcaaggcgctgctgggccgctccccttggaggccctgctcaggaggccctgaccgtggaaggggagaggaactcgaaagcacagctcctcccccagcccttgggaccatcttctcctgcagtcccctgggccccagtgagaggggcaggggcagggccggcagtaggtggggcctgtggtccccccactgccctgagggcattagctggtctaactgcccggaggcacccggccctgggccttaggcacctcaaggacttttctgctatttactgctcttattgttaaggataataattaaggatcatatgaataattaatgaagatgctgatgactatgaataataaataattatcctgaggaga

SEQ ID NO: 467 - DNA, 3884 bp, Homo sapiens
  source 1..3884: mol_type = genomic DNA
  misc_feature 1..3884: note = cDNA of KCNH2 gene SNP c.223C>G (p.Gln75Glu)
atgccggtgcggaggggccacgtcgcgccgcagaacaccttcctggacaccatcatccgcaagtttgagggccagagccgtaagttcatcatcgccaacgctcgggtggagaactgcgccgtcatctactgcaacgacggcttctgcgagctgtgcggctactcgcgggccgaggtgatgcagcgaccctgcacctgcgacttcctgcacgggccgcgcacggagcgccgcgctgccgcgcagatcgcgcaggcactgctgggcgccgaggagcgcaaagtggaaatcgccttctaccggaaagatgggagctgcttcctatgtctggtggatgtggtgcccgtgaagaacgaggatggggctgtcatcatgttcatcctcaatttcgaggtggtgatggagaaggacatggtggggtccccggctcatgacaccaaccaccggggcccccccaccagctggctggccccaggccgcgccaagaccttccgcctgaagctgcccgcgctgctggcgctgacggcccgggagtcgtcggtgcggtcgggcggcgcgggcggcgcgggcgccccgggggccgtggtggtggacgtggacctgacgcccgcggcacccagcagcgagtcgctggccctggacgaagtgacagccatggacaaccacgtggcagggctcgggcccgcggaggagcggcgtgcgctggtgggtcccggctctccgccccgcagcgcgcccggccagctcccatcgccccgggcgcacagcctcaaccccgacgcctcgggctccagctgcagcctggcccggacgcgctcccgagaaagctgcgccagcgtgcgccgcgcctcgtcggccgacgacatcgaggccatgcgcgccggggtgctgcccccgccaccgcgccacgccagcaccggggccatgcacccactgcgcagcggcttgctcaactccacctcggactccgacctcgtgcgctaccgcaccattagcaagattccccaaatcaccctcaactttgtggacctcaagggcgaccccttcttggcttcgcccaccagtgaccgtgagatcatagcacctaagataaaggagcgaacccacaatgtcactgagaaggtcacccaggtcctgtccctgggcgccgacgtgctgcctgagtacaagctgcaggcaccgcgcatccaccgctggaccatcctgcattacagccccttcaaggccgtgtgggactggctcatcctgctgctggtcatctacacggctgtcttcacaccctactcggctgccttcctgctgaaggagacggaagaaggcccgcctgctaccgagtgtggctacgcctgccagccgctggctgtggtggacctcatcgtggacatcatgttcattgtggacatcctcatcaacttccgcaccacctacgtcaatgccaacgaggaggtggtcagccaccccggccgcatcgccgtccactacttcaagggctggttcctcatcgacatggtggccgccatccccttcgacctgctcatcttcggctctggctctgaggagctgatcgggctgctgaagactgcgcggctgctgcggctggtgcgcgtggcgcggaagctggatcgctactcagagtacggcgcggccgtgctgttcttgctcatgtgcacctttgcgctcatcgcgcactggctagcctgcatctggtacgccatcggcaacatggagcagccacacatggactcacgcatcggctggctgcacaacctgggcgaccagataggcaaaccctacaacagcagcggcctgggcggcccctccatcaaggacaagtatgtgacggcgctctacttcaccttcagcagcctcaccagtgtgggcttcggcaacgtctctcccaacaccaactcagagaagatcttctccatctgcgtcatgctcattggctccctcatgtatgctagcatcttcggcaacgtgtcggccatcatccagcggctgtactcgggcacagcccgctaccacacacagatgctgcgggtgcgggagttcatccgcttccaccagatccccaatcccctgcgccagcgcctcgaggagtacttccagcacgcctggtcctacaccaacggcatcgacatgaacgcggtgctgaagggcttccctgagtgcctgcaggctgacatctgcctgcacctgaaccgctcactgctgcagcactgcaaacccttccgaggggccaccaagggctgccttcgggccctggccatgaagttcaagaccacacatgcaccgccaggggacacactggtgcatgctggggacctgctcaccgccctgtacttcatctcccggggctccatcgagatcctgcggggcgacgtcgtcgtggccatcctggggaagaatgacatctttggggagcctctgaacctgtatgcaaggcctggcaagtcgaacggggatgtgcgggccctcacctactgtgacctacacaagatccatcgggacgacctgctggaggtgctggacatgtaccctgagttctccgaccacttctggtccagcctggagatcaccttcaacctgcgagataccaacatgatcccgggctcccccggcagtacggagttagagggtggcttcagtcggcaacgcaagcgcaagttgtccttccgcaggcgcacggacaaggacacggagcagccaggggaggtgtcggccttggggccgggccgggcgggggcagggccgagtagccggggccggccgggggggccgtggggggagagcccgtccagtggcccctccagccctgagagcagtgaggatgagggcccaggccgcagctccagccccctccgcctggtgcccttctccagccccaggccccccggagagccgccgggtggggagcccctgatggaggactgcgagaagagcagcgacacttgcaaccccctgtcaggcgccttctcaggagtgtccaacattttcagcttctggggggacagtcggggccgccagtaccaggagctccctcgatgccccgcccccacccccagcctcctcaacatccccctctccagcccgggtcggcggccccggggcgacgtggagagcaggctggatgccctccagcgccagctcaacaggctggagacccggctgagtgcagacatggccactgtcctgcagctgctacagaggcagatgacgctggtcccgcccgcctacagtgctgtgaccaccccggggcctggccccacttccacatccccgctgttgcccgtcagccccctccccaccctcaccttggactcgctttctcaggtttcccagttcatggcgtgtgaggagctgcccccgggggccccagagcttccccaagaaggccccacacgacgcctctccctaccgggccagctgggggccctcacctcccagcccctgcacagacacggctcggacccgggcagttagtggggctgcccagtgtggacacgtggctcacccagggatcaaggcgctgctgggccgctccccttggaggccctgctcaggaggccctgaccgtggaaggggagaggaactcgaaagcacagctcctcccccagcccttgggaccatcttctcctgcagtcccctgggccccagtgagaggggcaggggcagggccggcagtaggtggggcctgtggtccccccactgccctgagggcattagctggtctaactgcccggaggcacccggccctgggccttaggcacctcaaggacttttctgctatttactgctcttattgttaaggataataattaaggatcatatgaataattaatgaagatgctgatgactatgaataataaataattatcctgaggaga

SEQ ID NO: 468 - DNA, 3884 bp, Homo sapiens
  source 1..3884: mol_type = genomic DNA
  misc_feature 1..3884: note = cDNA of KCNH2 gene SNP c.2245G>T (p.Gly749Cys)
atgccggtgcggaggggccacgtcgcgccgcagaacaccttcctggacaccatcatccgcaagtttgagggccagagccgtaagttcatcatcgccaacgctcgggtggagaactgcgccgtcatctactgcaacgacggcttctgcgagctgtgcggctactcgcgggccgaggtgatgcagcgaccctgcacctgcgacttcctgcacgggccgcgcacgcagcgccgcgctgccgcgcagatcgcgcaggcactgctgggcgccgaggagcgcaaagtggaaatcgccttctaccggaaagatgggagctgcttcctatgtctggtggatgtggtgcccgtgaagaacgaggatggggctgtcatcatgttcatcctcaatttcgaggtggtgatggagaaggacatggtggggtccccggctcatgacaccaaccaccggggcccccccaccagctggctggccccaggccgcgccaagaccttccgcctgaagctgcccgcgctgctggcgctgacggcccgggagtcgtcggtgcggtcgggcggcgcgggcggcgcgggcgccccgggggccgtggtggtggacgtggacctgacgcccgcggcacccagcagcgagtcgctggccctggacgaagtgacagccatggacaaccacgtggcagggctcgggcccgcggaggagcggcgtgcgctggtgggtcccggctctccgccccgcagcgcgcccggccagctcccatcgccccgggcgcacagcctcaaccccgacgcctcgggctccagctgcagcctggcccggacgcgctcccgagaaagctgcgccagcgtgcgccgcgcctcgtcggccgacgacatcgaggccatgcgcgccggggtgctgcccccgccaccgcgccacgccagcaccggggccatgcacccactgcgcagcggcttgctcaactccacctcggactccgacctcgtgcgctaccgcaccattagcaagattccccaaatcaccctcaactttgtggacctcaagggcgaccccttcttggcttcgcccaccagtgaccgtgagatcatagcacctaagataaaggagcgaacccacaatgtcactgagaaggtcacccaggtcctgtccctgggcgccgacgtgctgcctgagtacaagctgcaggcaccgcgcatccaccgctggaccatcctgcattacagccccttcaaggccgtgtgggactggctcatcctgctgctggtcatctacacggctgtcttcacaccctactcggctgccttcctgctgaaggagacggaagaaggcccgcctgctaccgagtgtggctacgcctgccagccgctggctgtggtggacctcatcgtggacatcatgttcattgtggacatcctcatcaacttccgcaccacctacgtcaatgccaacgaggaggtggtcagccaccccggccgcatcgccgtccactacttcaagggctggttcctcatcgacatggtggccgccatccccttcgacctgctcatcttcggctctggctctgaggagctgatcgggctgctgaagactgcgcggctgctgcggctggtgcgcgtggcgcggaagctggatcgctactcagagtacggcgcggccgtgctgttcttgctcatgtgcacctttgcgctcatcgcgcactggctagcctgcatctggtacgccatcggcaacatggagcagccacacatggactcacgcatcggctggctgcacaacctgggcgaccagataggcaaaccctacaacagcagcggcctgggcggcccctccatcaaggacaagtatgtgacggcgctctacttcaccttcagcagcctcaccagtgtgggcttcggcaacgtctctcccaacaccaactcagagaagatcttctccatctgcgtcatgctcattggctccctcatgtatgctagcatcttcggcaacgtgtcggccatcatccagcggctgtactcgggcacagcccgctaccacacacagatgctgcgggtgcgggagttcatccgcttccaccagatccccaatcccctgcgccagcgcctcgaggagtacttccagcacgcctggtcctacaccaacggcatcgacatgaacgcggtgctgaagggcttccctgagtgcctgcaggctgacatctgcctgcacctgaaccgctcactgctgcagcactgcaaacccttccgaggggccaccaagtgctgccttcgggccctggccatgaagttcaagaccacacatgcaccgccaggggacacactggtgcatgctggggacctgctcaccgccctgtacttcatctcccggggctccatcgagatcctgcggggcgacgtcgtcgtggccatcctggggaagaatgacatctttggggagcctctgaacctgtatgcaaggcctggcaagtcgaacggggatgtgcgggccctcacctactgtgacctacacaagatccatcgggacgacctgctggaggtgctggacatgtaccctgagttctccgaccacttctggtccagcctggagatcaccttcaacctgcgagataccaacatgatcccgggctcccccggcagtacggagttagagggtggcttcagtcggcaacgcaagcgcaagttgtccttccgcaggcgcacggacaaggacacggagcagccaggggaggtgtcggccttggggccgggccgggcgggggcagggccgagtagccggggccggccgggggggccgtggggggagagcccgtccagtggcccctccagccctgagagcagtgaggatgagggcccaggccgcagctccagccccctccgcctggtgcccttctccagccccaggccccccggagagccgccgggtggggagcccctgatggaggactgcgagaagagcagcgacacttgcaaccccctgtcaggcgccttctcaggagtgtccaacattttcagcttctggggggacagtcggggccgccagtaccaggagctccctcgatgccccgcccccacccccagcctcctcaacatccccctctccagcccgggtcggcggccccggggcgacgtggagagcaggctggatgccctccagcgccagctcaacaggctggagacccggctgagtgcagacatggccactgtcctgcagctgctacagaggcagatgacgctggtcccgcccgcctacagtgctgtgaccaccccggggcctggccccacttccacatccccgctgttgcccgtcagccccctccccaccctcaccttggactcgctttctcaggtttcccagttcatggcgtgtgaggagctgcccccgggggccccagagcttccccaagaaggccccacacgacgcctctccctaccgggccagctgggggccctcacctcccagcccctgcacagacacggctcggacccgggcagttagtggggctgcccagtgtggacacgtggctcacccagggatcaaggcgctgctgggccgctccccttggaggccctgctcaggaggccctgaccgtggaaggggagaggaactcgaaagcacagctcctcccccagcccttgggaccatcttctcctgcagtcccctgggccccagtgagaggggcaggggcagggccggcagtaggtggggcctgtggtccccccactgccctgagggcattagctggtctaactgcccggaggcacccggccctgggccttaggcacctcaaggacttttctgctatttactgctcttattgttaaggataataattaaggatcatatgaataattaatgaagatgctgatgactatgaataataaataattatcctgaggaga

SEQ ID NO: 469 - DNA, 3884 bp, Homo sapiens
  source 1..3884: mol_type = genomic DNA
  misc_feature 1..3884: note = cDNA of KCNH2 gene SNP c.2246G>T (p.Gly749Val)
atgccggtgcggaggggccacgtcgcgccgcagaacaccttcctggacaccatcatccgcaagtttgagggccagagccgtaagttcatcatcgccaacgctcgggtggagaactgcgccgtcatctactgcaacgacggcttctgcgagctgtgcggctactcgcgggccgaggtgatgcagcgaccctgcacctgcgacttcctgcacgggccgcgcacgcagcgccgcgctgccgcgcagatcgcgcaggcactgctgggcgccgaggagcgcaaagtggaaatcgccttctaccggaaagatgggagctgcttcctatgtctggtggatgtggtgcccgtgaagaacgaggatggggctgtcatcatgttcatcctcaatttcgaggtggtgatggagaaggacatggtggggtccccggctcatgacaccaaccaccggggcccccccaccagctggctggccccaggccgcgccaagaccttccgcctgaagctgcccgcgctgctggcgctgacggcccgggagtcgtcggtgcggtcgggcggcgcgggcggcgcgggcgccccgggggccgtggtggtggacgtggacctgacgcccgcggcacccagcagcgagtcgctggccctggacgaagtgacagccatggacaaccacgtggcagggctcgggcccgcggaggagcggcgtgcgctggtgggtcccggctctccgccccgcagcgcgcccggccagctcccatcgccccgggcgcacagcctcaaccccgacgcctcgggctccagctgcagcctggcccggacgcgctcccgagaaagctgcgccagcgtgcgccgcgcctcgtcggccgacgacatcgaggccatgcgcgccggggtgctgcccccgccaccgcgccacgccagcaccggggccatgcacccactgcgcagcggcttgctcaactccacctcggactccgacctcgtgcgctaccgcaccattagcaagattccccaaatcaccctcaactttgtggacctcaagggcgaccccttcttggcttcgcccaccagtgaccgtgagatcatagcacctaagataaaggagcgaacccacaatgtcactgagaaggtcacccaggtcctgtccctgggcgccgacgtgctgcctgagtacaagctgcaggcaccgcgcatccaccgctggaccatcctgcattacagccccttcaaggccgtgtgggactggctcatcctgctgctggtcatctacacggctgtcttcacaccctactcggctgccttcctgctgaaggagacggaagaaggcccgcctgctaccgagtgtggctacgcctgccagccgctggctgtggtggacctcatcgtggacatcatgttcattgtggacatcctcatcaacttccgcaccacctacgtcaatgccaacgaggaggtggtcagccaccccggccgcatcgccgtccactacttcaagggctggttcctcatcgacatggtggccgccatccccttcgacctgctcatcttcggctctggctctgaggagctgatcgggctgctgaagactgcgcggctgctgcggctggtgcgcgtggcgcggaagctggatcgctactcagagtacggcgcggccgtgctgttcttgctcatgtgcacctttgcgctcatcgcgcactggctagcctgcatctggtacgccatcggcaacatggagcagccacacatggactcacgcatcggctggctgcacaacctgggcgaccagataggcaaaccctacaacagcagcggcctgggcggcccctccatcaaggacaagtatgtgacggcgctctacttcaccttcagcagcctcaccagtgtgggcttcggcaacgtctctcccaacaccaactcagagaagatcttctccatctgcgtcatgctcattggctccctcatgtatgctagcatcttcggcaacgtgtcggccatcatccagcggctgtactcgggcacagcccgctaccacacacagatgctgcgggtgcgggagttcatccgcttccaccagatccccaatcccctgcgccagcgcctcgaggagtacttccagcacgcctggtcctacaccaacggcatcgacatgaacgcggtgctgaagggcttccctgagtgcctgcaggctgacatctgcctgcacctgaaccgctcactgctgcagcactgcaaacccttccgaggggccaccaaggtctgccttcgggccctggccatgaagttcaagaccacacatgcaccgccaggggacacactggtgcatgctggggacctgctcaccgccctgtacttcatctcccggggctccatcgagatcctgcggggcgacgtcgtcgtggccatcctggggaagaatgacatctttggggagcctctgaacctgtatgcaaggcctggcaagtcgaacggggatgtgcgggccctcacctactgtgacctacacaagatccatcgggacgacctgctggaggtgctggacatgtaccctgagttctccgaccacttctggtccagcctggagatcaccttcaacctgcgagataccaacatgatcccgggctcccccggcagtacggagttagagggtggcttcagtcggcaacgcaagcgcaagttgtccttccgcaggcgcacggacaaggacacggagcagccaggggaggtgtcggccttggggccgggccgggcgggggcagggccgagtagccggggccggccgggggggccgtggggggagagcccgtccagtggcccctccagccctgagagcagtgaggatgagggcccaggccgcagctccagccccctccgcctggtgcccttctccagccccaggccccccggagagccgccgggtggggagcccctgatggaggactgcgagaagagcagcgacacttgcaaccccctgtcaggcgccttctcaggagtgtccaacattttcagcttctggggggacagtcggggccgccagtaccaggagctccctcgatgccccgcccccacccccagcctcctcaacatccccctctccagcccgggtcggcggccccggggcgacgtggagagcaggctggatgccctccagcgccagctcaacaggctggagacccggctgagtgcagacatggccactgtcctgcagctgctacagaggcagatgacgctggtcccgcccgcctacagtgctgtgaccaccccggggcctggccccacttccacatccccgctgttgcccgtcagccccctccccaccctcaccttggactcgctttctcaggtttcccagttcatggcgtgtgaggagctgcccccgggggccccagagcttccccaagaaggccccacacgacgcctctccctaccgggccagctgggggccctcacctcccagcccctgcacagacacggctcggacccgggcagttagtggggctgcccagtgtggacacgtggctcacccagggatcaaggcgctgctgggccgctccccttggaggccctgctcaggaggccctgaccgtggaaggggagaggaactcgaaagcacagctcctcccccagcccttgggaccatcttctcctgcagtcccctgggccccagtgagaggggcaggggcagggccggcagtaggtggggcctgtggtccccccactgccctgagggcattagctggtctaactgcccggaggcacccggccctgggccttaggcacctcaaggacttttctgctatttactgctcttattgttaaggataataattaaggatcatatgaataattaatgaagatgctgatgactatgaataataaataattatcctgaggaga

SEQ ID NO: 470 - DNA, 3884 bp, Homo sapiens
  source 1..3884: mol_type = genomic DNA
  misc_feature 1..3884: note = cDNA of KCNH2 gene SNP c.2254C>T (p.Arg752Trp)
atgccggtgcggaggggccacgtcgcgccgcagaacaccttcctggacaccatcatccgcaagtttgagggccagagccgtaagttcatcatcgccaacgctcgggtggagaactgcgccgtcatctactgcaacgacggcttctgcgagctgtgcggctactcgcgggccgaggtgatgcagcgaccctgcacctgcgacttcctgcacgggccgcgcacgcagcgccgcgctgccgcgcagatcgcgcaggcactgctgggcgccgaggagcgcaaagtggaaatcgccttctaccggaaagatgggagctgcttcctatgtctggtggatgtggtgcccgtgaagaacgaggatggggctgtcatcatgttcatcctcaatttcgaggtggtgatggagaaggacatggtggggtccccggctcatgacaccaaccaccggggcccccccaccagctggctggccccaggccgcgccaagaccttccgcctgaagctgcccgcgctgctggcgctgacggcccgggagtcgtcggtgcggtcgggcggcgcgggcggcgcgggcgccccgggggccgtggtggtggacgtggacctgacgcccgcggcacccagcagcgagtcgctggccctggacgaagtgacagccatggacaaccacgtggcagggctcgggcccgcggaggagcggcgtgcgctggtgggtcccggctctccgccccgcagcgcgcccggccagctcccatcgccccgggcgcacagcctcaaccccgacgcctcgggctccagctgcagcctggcccggacgcgctcccgagaaagctgcgccagcgtgcgccgcgcctcgtcggccgacgacatcgaggccatgcgcgccggggtgctgcccccgccaccgcgccacgccagcaccggggccatgcacccactgcgcagcggcttgctcaactccacctcggactccgacctcgtgcgctaccgcaccattagcaagattccccaaatcaccctcaactttgtggacctcaagggcgaccccttcttggcttcgcccaccagtgaccgtgagatcatagcacctaagataaaggagcgaacccacaatgtcactgagaaggtcacccaggtcctgtccctgggcgccgacgtgctgcctgagtacaagctgcaggcaccgcgcatccaccgctggaccatcctgcattacagccccttcaaggccgtgtgggactggctcatcctgctgctggtcatctacacggctgtcttcacaccctactcggctgccttcctgctgaaggagacggaagaaggcccgcctgctaccgagtgtggctacgcctgccagccgctggctgtggtggacctcatcgtggacatcatgttcattgtggacatcctcatcaacttccgcaccacctacgtcaatgccaacgaggaggtggtcagccaccccggccgcatcgccgtccactacttcaagggctggttcctcatcgacatggtggccgccatccccttcgacctgctcatcttcggctctggctctgaggagctgatcgggctgctgaagactgcgcggctgctgcggctggtgcgcgtggcgcggaagctggatcgctactcagagtacggcgcggccgtgctgttcttgctcatgtgcacctttgcgctcatcgcgcactggctagcctgcatctggtacgccatcggcaacatggagcagccacacatggactcacgcatcggctggctgcacaacctgggcgaccagataggcaaaccctacaacagcagcggcctgggcggcccctccatcaaggacaagtatgtgacggcgctctacttcaccttcagcagcctcaccagtgtgggcttcggcaacgtctctcccaacaccaactcagagaagatcttctccatctgcgtcatgctcattggctccctcatgtatgctagcatcttcggcaacgtgtcggccatcatccagcggctgtactcgggcacagcccgctaccacacacagatgctgcgggtgcgggagttcatccgcttccaccagatccccaatcccctgcgccagcgcctcgaggagtacttccagcacgcctggtcctacaccaacggcatcgacatgaacgcggtgctgaagggcttccctgagtgcctgcaggctgacatctgcctgcacctgaaccgctcactgctgcagcactgcaaacccttccgaggggccaccaagggctgcctttgggccctggccatgaagttcaagaccacacatgcaccgccaggggacacactggtgcatgctggggacctgctcaccgccctgtacttcatctcccggggctccatcgagatcctgcggggcgacgtcgtcgtggccatcctggggaagaatgacatctttggggagcctctgaacctgtatgcaaggcctggcaagtcgaacggggatgtgcgggccctcacctactgtgacctacacaagatccatcgggacgacctgctggaggtgctggacatgtaccctgagttctccgaccacttctggtccagcctggagatcaccttcaacctgcgagataccaacatgatcccgggctcccccggcagtacggagttagagggtggcttcagtcggcaacgcaagcgcaagttgtccttccgcaggcgcacggacaaggacacggagcagccaggggaggtgtcggccttggggccgggccgggcgggggcagggccgagtagccggggccggccgggggggccgtggggggagagcccgtccagtggcccctccagccctgagagcagtgaggatgagggcccaggccgcagctccagccccctccgcctggtgcccttctccagccccaggccccccggagagccgccgggtggggagcccctgatggaggactgcgagaagagcagcgacacttgcaaccccctgtcaggcgccttctcaggagtgtccaacattttcagcttctggggggacagtcggggccgccagtaccaggagctccctcgatgccccgcccccacccccagcctcctcaacatccccctctccagcccgggtcggcggccccggggcgacgtggagagcaggctggatgccctccagcgccagctcaacaggctggagacccggctgagtgcagacatggccactgtcctgcagctgctacagaggcagatgacgctggtcccgcccgcctacagtgctgtgaccaccccggggcctggccccacttccacatccccgctgttgcccgtcagccccctccccaccctcaccttggactcgctttctcaggtttcccagttcatggcgtgtgaggagctgcccccgggggccccagagcttccccaagaaggccccacacgacgcctctccctaccgggccagctgggggccctcacctcccagcccctgcacagacacggctcggacccgggcagttagtggggctgcccagtgtggacacgtggctcacccagggatcaaggcgctgctgggccgctccccttggaggccctgctcaggaggccctgaccgtggaaggggagaggaactcgaaagcacagctcctcccccagcccttgggaccatcttctcctgcagtcccctgggccccagtgagaggggcaggggcagggccggcagtaggtggggcctgtggtccccccactgccctgagggcattagctggtctaactgcccggaggcacccggccctgggccttaggcacctcaaggacttttctgctatttactgctcttattgttaaggataataattaaggatcatatgaataattaatgaagatgctgatgactatgaataataaataattatcctgaggaga

SEQ ID NO: 471 - DNA, 3884 bp, Homo sapiens
  source 1..3884: mol_type = genomic DNA
  misc_feature 1..3884: note = cDNA of KCNH2 gene SNP c.2255G>A (p.Arg752Gln)
atgccggtgcggaggggccacgtcgcgccgcagaacaccttcctggacaccatcatccgcaagtttgagggccagagccgtaagttcatcatcgccaacgctcgggtggagaactgcgccgtcatctactgcaacgacggcttctgcgagctgtgcggctactcgcgggccgaggtgatgcagcgaccctgcacctgcgacttcctgcacgggccgcgcacgcagcgccgcgctgccgcgcagatcgcgcaggcactgctgggcgccgaggagcgcaaagtggaaatcgccttctaccggaaagatgggagctgcttcctatgtctggtggatgtggtgcccgtgaagaacgaggatggggctgtcatcatgttcatcctcaatttcgaggtggtgatggagaaggacatggtggggtccccggctcatgacaccaaccaccggggcccccccaccagctggctggccccaggccgcgccaagaccttccgcctgaagctgcccgcgctgctggcgctgacggcccgggagtcgtcggtgcggtcgggcggcgcgggcggcgcgggcgccccgggggccgtggtggtggacgtggacctgacgcccgcggcacccagcagcgagtcgctggccctggacgaagtgacagccatggacaaccacgtggcagggctcgggcccgcggaggagcggcgtgcgctggtgggtcccggctctccgccccgcagcgcgcccggccagctcccatcgccccgggcgcacagcctcaaccccgacgcctcgggctccagctgcagcctggcccggacgcgctcccgagaaagctgcgccagcgtgcgccgcgcctcgtcggccgacgacatcgaggccatgcgcgccggggtgctgcccccgccaccgcgccacgccagcaccggggccatgcacccactgcgcagcggcttgctcaactccacctcggactccgacctcgtgcgctaccgcaccattagcaagattccccaaatcaccctcaactttgtggacctcaagggcgaccccttcttggcttcgcccaccagtgaccgtgagatcatagcacctaagataaaggagcgaacccacaatgtcactgagaaggtcacccaggtcctgtccctgggcgccgacgtgctgcctgagtacaagctgcaggcaccgcgcatccaccgctggaccatcctgcattacagccccttcaaggccgtgtgggactggctcatcctgctgctggtcatctacacggctgtcttcacaccctactcggctgccttcctgctgaaggagacggaagaaggcccgcctgctaccgagtgtggctacgcctgccagccgctggctgtggtggacctcatcgtggacatcatgttcattgtggacatcctcatcaacttccgcaccacctacgtcaatgccaacgaggaggtggtcagccaccccggccgcatcgccgtccactacttcaagggctggttcctcatcgacatggtggccgccatccccttcgacctgctcatcttcggctctggctctgaggagctgatcgggctgctgaagactgcgcggctgctgcggctggtgcgcgtggcgcggaagctggatcgctactcagagtacggcgcggccgtgctgttcttgctcatgtgcacctttgcgctcatcgcgcactggctagcctgcatctggtacgccatcggcaacatggagcagccacacatggactcacgcatcggctggctgcacaacctgggcgaccagataggcaaaccctacaacagcagcggcctgggcggcccctccatcaaggacaagtatgtgacggcgctctacttcaccttcagcagcctcaccagtgtgggcttcggcaacgtctctcccaacaccaactcagagaagatcttctccatctgcgtcatgctcattggctccctcatgtatgctagcatcttcggcaacgtgtcggccatcatccagcggctgtactcgggcacagcccgctaccacacacagatgctgcgggtgcgggagttcatccgcttccaccagatccccaatcccctgcgccagcgcctcgaggagtacttccagcacgcctggtcctacaccaacggcatcgacatgaacgcggtgctgaagggcttccctgagtgcctgcaggctgacatctgcctgcacctgaaccgctcactgctgcagcactgcaaacccttccgaggggccaccaagggctgccttcaggccctggccatgaagttcaagaccacacatgcaccgccaggggacacactggtgcatgctggggacctgctcaccgccctgtacttcatctcccggggctccatcgagatcctgcggggcgacgtcgtcgtggccatcctggggaagaatgacatctttggggagcctctgaacctgtatgcaaggcctggcaagtcgaacggggatgtgcgggccctcacctactgtgacctacacaagatccatcgggacgacctgctggaggtgctggacatgtaccctgagttctccgaccacttctggtccagcctggagatcaccttcaacctgcgagataccaacatgatcccgggctcccccggcagtacggagttagagggtggcttcagtcggcaacgcaagcgcaagttgtccttccgcaggcgcacggacaaggacacggagcagccaggggaggtgtcggccttggggccgggccgggcgggggcagggccgagtagccggggccggccgggggggccgtggggggagagcccgtccagtggcccctccagccctgagagcagtgaggatgagggcccaggccgcagctccagccccctccgcctggtgcccttctccagccccaggccccccggagagccgccgggtggggagcccctgatggaggactgcgagaagagcagcgacacttgcaaccccctgtcaggcgccttctcaggagtgtccaacattttcagcttctggggggacagtcggggccgccagtaccaggagctccctcgatgccccgcccccacccccagcctcctcaacatccccctctccagcccgggtcggcggccccggggcgacgtggagagcaggctggatgccctccagcgccagctcaacaggctggagacccggctgagtgcagacatggccactgtcctgcagctgctacagaggcagatgacgctggtcccgcccgcctacagtgctgtgaccaccccggggcctggccccacttccacatccccgctgttgcccgtcagccccctccccaccctcaccttggactcgctttctcaggtttcccagttcatggcgtgtgaggagctgcccccgggggccccagagcttccccaagaaggccccacacgacgcctctccctaccgggccagctgggggccctcacctcccagcccctgcacagacacggctcggacccgggcagttagtggggctgcccagtgtggacacgtggctcacccagggatcaaggcgctgctgggccgctccccttggaggccctgctcaggaggccctgaccgtggaaggggagaggaactcgaaagcacagctcctcccccagcccttgggaccatcttctcctgcagtcccctgggccccagtgagaggggcaggggcagggccggcagtaggtggggcctgtggtccccccactgccctgagggcattagctggtctaactgcccggaggcacccggccctgggccttaggcacctcaaggacttttctgctatttactgctcttattgttaaggataataattaaggatcatatgaataattaatgaagatgctgatgactatgaataataaataattatcctgaggaga

SEQ ID NO: 472 - DNA, 3884 bp, Homo sapiens
  source 1..3884: mol_type = genomic DNA
  misc_feature 1..3884: note = cDNA of KCNH2 gene SNP c.2257G>T (p.Ala753Ser)
atgccggtgcggaggggccacgtcgcgccgcagaacaccttcctggacaccatcatccgcaagtttgagggccagagccgtaagttcatcatcgccaacgctcgggtggagaactgcgccgtcatctactgcaacgacggcttctgcgagctgtgcggctactcgcgggccgaggtgatgcagcgaccctgcacctgcgacttcctgcacgggccgcgcacgcagcgccgcgctgccgcgcagatcgcgcaggcactgctgggcgccgaggagcgcaaagtggaaatcgccttctaccggaaagatgggagctgcttcctatgtctggtggatgtggtgcccgtgaagaacgaggatggggctgtcatcatgttcatcctcaatttcgaggtggtgatggagaaggacatggtggggtccccggctcatgacaccaaccaccggggcccccccaccagctggctggccccaggccgcgccaagaccttccgcctgaagctgcccgcgctgctggcgctgacggcccgggagtcgtcggtgcggtcgggcggcgcgggcggcgcgggcgccccgggggccgtggtggtggacgtggacctgacgcccgcggcacccagcagcgagtcgctggccctggacgaagtgacagccatggacaaccacgtggcagggctcgggcccgcggaggagcggcgtgcgctggtgggtcccggctctccgccccgcagcgcgcccggccagctcccatcgccccgggcgcacagcctcaaccccgacgcctcgggctccagctgcagcctggcccggacgcgctcccgagaaagctgcgccagcgtgcgccgcgcctcgtcggccgacgacatcgaggccatgcgcgccggggtgctgcccccgccaccgcgccacgccagcaccggggccatgcacccactgcgcagcggcttgctcaactccacctcggactccgacctcgtgcgctaccgcaccattagcaagattccccaaatcaccctcaactttgtggacctcaagggcgaccccttcttggcttcgcccaccagtgaccgtgagatcatagcacctaagataaaggagcgaacccacaatgtcactgagaaggtcacccaggtcctgtccctgggcgccgacgtgctgcctgagtacaagctgcaggcaccgcgcatccaccgctggaccatcctgcattacagccccttcaaggccgtgtgggactggctcatcctgctgctggtcatctacacggctgtcttcacaccctactcggctgccttcctgctgaaggagacggaagaaggcccgcctgctaccgagtgtggctacgcctgccagccgctggctgtggtggacctcatcgtggacatcatgttcattgtggacatcctcatcaacttccgcaccacctacgtcaatgccaacgaggaggtggtcagccaccccggccgcatcgccgtccactacttcaagggctggttcctcatcgacatggtggccgccatccccttcgacctgctcatcttcggctctggctctgaggagctgatcgggctgctgaagactgcgcggctgctgcggctggtgcgcgtggcgcggaagctggatcgctactcagagtacggcgcggccgtgctgttcttgctcatgtgcacctttgcgctcatcgcgcactggctagcctgcatctggtacgccatcggcaacatggagcagccacacatggactcacgcatcggctggctgcacaacctgggcgaccagataggcaaaccctacaacagcagcggcctgggcggcccctccatcaaggacaagtatgtgacggcgctctacttcaccttcagcagcctcaccagtgtgggcttcggcaacgtctctcccaacaccaactcagagaagatcttctccatctgcgtcatgctcattggctccctcatgtatgctagcatcttcggcaacgtgtcggccatcatccagcggctgtactcgggcacagcccgctaccacacacagatgctgcgggtgcgggagttcatccgcttccaccagatccccaatcccctgcgccagcgcctcgaggagtacttccagcacgcctggtcctacaccaacggcatcgacatgaacgcggtgctgaagggcttccctgagtgcctgcaggctgacatctgcctgcacctgaaccgctcactgctgcagcactgcaaacccttccgaggggccaccaagggctgccttcggtccctggccatgaagttcaagaccacacatgcaccgccaggggacacactggtgcatgctggggacctgctcaccgccctgtacttcatctcccggggctccatcgagatcctgcggggcgacgtcgtcgtggccatcctggggaagaatgacatctttggggagcctctgaacctgtatgcaaggcctggcaagtcgaacggggatgtgcgggccctcacctactgtgacctacacaagatccatcgggacgacctgctggaggtgctggacatgtaccctgagttctccgaccacttctggtccagcctggagatcaccttcaacctgcgagataccaacatgatcccgggctcccccggcagtacggagttagagggtggcttcagtcggcaacgcaagcgcaagttgtccttccgcaggcgcacggacaaggacacggagcagccaggggaggtgtcggccttggggccgggccgggcgggggcagggccgagtagccggggccggccgggggggccgtggggggagagcccgtccagtggcccctccagccctgagagcagtgaggatgagggcccaggccgcagctccagccccctccgcctggtgcccttctccagccccaggccccccggagagccgccgggtggggagcccctgatggaggactgcgagaagagcagcgacacttgcaaccccctgtcaggcgccttctcaggagtgtccaacattttcagcttctggggggacagtcggggccgccagtaccaggagctccctcgatgccccgcccccacccccagcctcctcaacatccccctctccagcccgggtcggcggccccggggcgacgtggagagcaggctggatgccctccagcgccagctcaacaggctggagacccggctgagtgcagacatggccactgtcctgcagctgctacagaggcagatgacgctggtcccgcccgcctacagtgctgtgaccaccccggggcctggccccacttccacatccccgctgttgcccgtcagccccctccccaccctcaccttggactcgctttctcaggtttcccagttcatggcgtgtgaggagctgcccccgggggccccagagcttccccaagaaggccccacacgacgcctctccctaccgggccagctgggggccctcacctcccagcccctgcacagacacggctcggacccgggcagttagtggggctgcccagtgtggacacgtggctcacccagggatcaaggcgctgctgggccgctccccttggaggccctgctcaggaggccctgaccgtggaaggggagaggaactcgaaagcacagctcctcccccagcccttgggaccatcttctcctgcagtcccctgggccccagtgagaggggcaggggcagggccggcagtaggtggggcctgtggtccccccactgccctgagggcattagctggtctaactgcccggaggcacccggccctgggccttaggcacctcaaggacttttctgctatttactgctcttattgttaaggataataattaaggatcatatgaataattaatgaagatgctgatgactatgaataataaataattatcctgaggaga

SEQ ID NO: 473 - DNA, 3884 bp, Homo sapiens
  source 1..3884: mol_type = genomic DNA
  misc_feature 1..3884: note = cDNA of KCNH2 gene SNP c.2261T>G (p.Leu754Arg)
atgccggtgcggaggggccacgtcgcgccgcagaacaccttcctggacaccatcatccgcaagtttgagggccagagccgtaagttcatcatcgccaacgctcgggtggagaactgcgccgtcatctactgcaacgacggcttctgcgagctgtgcggctactcgcgggccgaggtgatgcagcgaccctgcacctgcgacttcctgcacgggccgcgcacgcagcgccgcgctgccgcgcagatcgcgcaggcactgctgggcgccgaggagcgcaaagtggaaatcgccttctaccggaaagatgggagctgcttcctatgtctggtggatgtggtgcccgtgaagaacgaggatggggctgtcatcatgttcatcctcaatttcgaggtggtgatggagaaggacatggtggggtccccggctcatgacaccaaccaccggggcccccccaccagctggctggccccaggccgcgccaagaccttccgcctgaagctgcccgcgctgctggcgctgacggcccgggagtcgtcggtgcggtcgggcggcgcgggcggcgcgggcgccccgggggccgtggtggtggacgtggacctgacgcccgcggcacccagcagcgagtcgctggccctggacgaagtgacagccatggacaaccacgtggcagggctcgggcccgcggaggagcggcgtgcgctggtgggtcccggctctccgccccgcagcgcgcccggccagctcccatcgccccgggcgcacagcctcaaccccgacgcctcgggctccagctgcagcctggcccggacgcgctcccgagaaagctgcgccagcgtgcgccgcgcctcgtcggccgacgacatcgaggccatgcgcgccggggtgctgcccccgccaccgcgccacgccagcaccggggccatgcacccactgcgcagcggcttgctcaactccacctcggactccgacctcgtgcgctaccgcaccattagcaagattccccaaatcaccctcaactttgtggacctcaagggcgaccccttcttggcttcgcccaccagtgaccgtgagatcatagcacctaagataaaggagcgaacccacaatgtcactgagaaggtcacccaggtcctgtccctgggcgccgacgtgctgcctgagtacaagctgcaggcaccgcgcatccaccgctggaccatcctgcattacagccccttcaaggccgtgtgggactggctcatcctgctgctggtcatctacacggctgtcttcacaccctactcggctgccttcctgctgaaggagacggaagaaggcccgcctgctaccgagtgtggctacgcctgccagccgctggctgtggtggacctcatcgtggacatcatgttcattgtggacatcctcatcaacttccgcaccacctacgtcaatgccaacgaggaggtggtcagccaccccggccgcatcgccgtccactacttcaagggctggttcctcatcgacatggtggccgccatccccttcgacctgctcatcttcggctctggctctgaggagctgatcgggctgctgaagactgcgcggctgctgcggctggtgcgcgtggcgcggaagctggatcgctactcagagtacggcgcggccgtgctgttcttgctcatgtgcacctttgcgctcatcgcgcactggctagcctgcatctggtacgccatcggcaacatggagcagccacacatggactcacgcatcggctggctgcacaacctgggcgaccagataggcaaaccctacaacagcagcggcctgggcggcccctccatcaaggacaagtatgtgacggcgctctacttcaccttcagcagcctcaccagtgtgggcttcggcaacgtctctcccaacaccaactcagagaagatcttctccatctgcgtcatgctcattggctccctcatgtatgctagcatcttcggcaacgtgtcggccatcatccagcggctgtactcgggcacagcccgctaccacacacagatgctgcgggtgcgggagttcatccgcttccaccagatccccaatcccctgcgccagcgcctcgaggagtacttccagcacgcctggtcctacaccaacggcatcgacatgaacgcggtgctgaagggcttccctgagtgcctgcaggctgacatctgcctgcacctgaaccgctcactgctgcagcactgcaaacccttccgaggggccaccaagggctgccttcgggcccgggccatgaagttcaagaccacacatgcaccgccaggggacacactggtgcatgctggggacctgctcaccgccctgtacttcatctcccggggctccatcgagatcctgcggggcgacgtcgtcgtggccatcctggggaagaatgacatctttggggagcctctgaacctgtatgcaaggcctggcaagtcgaacggggatgtgcgggccctcacctactgtgacctacacaagatccatcgggacgacctgctggaggtgctggacatgtaccctgagttctccgaccacttctggtccagcctggagatcaccttcaacctgcgagataccaacatgatcccgggctcccccggcagtacggagttagagggtggcttcagtcggcaacgcaagcgcaagttgtccttccgcaggcgcacggacaaggacacggagcagccaggggaggtgtcggccttggggccgggccgggcgggggcagggccgagtagccggggccggccgggggggccgtggggggagagcccgtccagtggcccctccagccctgagagcagtgaggatgagggcccaggccgcagctccagccccctccgcctggtgcccttctccagccccaggccccccggagagccgccgggtggggagcccctgatggaggactgcgagaagagcagcgacacttgcaaccccctgtcaggcgccttctcaggagtgtccaacattttcagcttctggggggacagtcggggccgccagtaccaggagctccctcgatgccccgcccccacccccagcctcctcaacatccccctctccagcccgggtcggcggccccggggcgacgtggagagcaggctggatgccctccagcgccagctcaacaggctggagacccggctgagtgcagacatggccactgtcctgcagctgctacagaggcagatgacgctggtcccgcccgcctacagtgctgtgaccaccccggggcctggccccacttccacatccccgctgttgcccgtcagccccctccccaccctcaccttggactcgctttctcaggtttcccagttcatggcgtgtgaggagctgcccccgggggccccagagcttccccaagaaggccccacacgacgcctctccctaccgggccagctgggggccctcacctcccagcccctgcacagacacggctcggacccgggcagttagtggggctgcccagtgtggacacgtggctcacccagggatcaaggcgctgctgggccgctccccttggaggccctgctcaggaggccctgaccgtggaaggggagaggaactcgaaagcacagctcctcccccagcccttgggaccatcttctcctgcagtcccctgggccccagtgagaggggcaggggcagggccggcagtaggtggggcctgtggtccccccactgccctgagggcattagctggtctaactgcccggaggcacccggccctgggccttaggcacctcaaggacttttctgctatttactgctcttattgttaaggataataattaaggatcatatgaataattaatgaagatgctgatgactatgaataataaataattatcctgaggaga

SEQ ID NO: 474 - DNA, 3884 bp, Homo sapiens
  source 1..3884: mol_type = genomic DNA
  misc_feature 1..3884: note = cDNA of KCNH2 gene SNP c.2263G>A (p.Ala755Thr)
atgccggtgcggaggggccacgtcgcgccgcagaacaccttcctggacaccatcatccgcaagtttgagggccagagccgtaagttcatcatcgccaacgctcgggtggagaactgcgccgtcatctactgcaacgacggcttctgcgagctgtgcggctactcgcgggccgaggtgatgcagcgaccctgcacctgcgacttcctgcacgggccgcgcacgcagcgccgcgctgccgcgcagatcgcgcaggcactgctgggcgccgaggagcgcaaagtggaaatcgccttctaccggaaagatgggagctgcttcctatgtctggtggatgtggtgcccgtgaagaacgaggatggggctgtcatcatgttcatcctcaatttcgaggtggtgatggagaaggacatggtggggtccccggctcatgacaccaaccaccggggcccccccaccagctggctggccccaggccgcgccaagaccttccgcctgaagctgcccgcgctgctggcgctgacggcccgggagtcgtcggtgcggtcgggcggcgcgggcggcgcgggcgccccgggggccgtggtggtggacgtggacctgacgcccgcggcacccagcagcgagtcgctggccctggacgaagtgacagccatggacaaccacgtggcagggctcgggcccgcggaggagcggcgtgcgctggtgggtcccggctctccgccccgcagcgcgcccggccagctcccatcgccccgggcgcacagcctcaaccccgacgcctcgggctccagctgcagcctggcccggacgcgctcccgagaaagctgcgccagcgtgcgccgcgcctcgtcggccgacgacatcgaggccatgcgcgccggggtgctgcccccgccaccgcgccacgccagcaccggggccatgcacccactgcgcagcggcttgctcaactccacctcggactccgacctcgtgcgctaccgcaccattagcaagattccccaaatcaccctcaactttgtggacctcaagggcgaccccttcttggcttcgcccaccagtgaccgtgagatcatagcacctaagataaaggagcgaacccacaatgtcactgagaaggtcacccaggtcctgtccctgggcgccgacgtgctgcctgagtacaagctgcaggcaccgcgcatccaccgctggaccatcctgcattacagccccttcaaggccgtgtgggactggctcatcctgctgctggtcatctacacggctgtcttcacaccctactcggctgccttcctgctgaaggagacggaagaaggcccgcctgctaccgagtgtggctacgcctgccagccgctggctgtggtggacctcatcgtggacatcatgttcattgtggacatcctcatcaacttccgcaccacctacgtcaatgccaacgaggaggtggtcagccaccccggccgcatcgccgtccactacttcaagggctggttcctcatcgacatggtggccgccatccccttcgacctgctcatcttcggctctggctctgaggagctgatcgggctgctgaagactgcgcggctgctgcggctggtgcgcgtggcgcggaagctggatcgctactcagagtacggcgcggccgtgctgttcttgctcatgtgcacctttgcgctcatcgcgcactggctagcctgcatctggtacgccatcggcaacatggagcagccacacatggactcacgcatcggctggctgcacaacctgggcgaccagataggcaaaccctacaacagcagcggcctgggcggcccctccatcaaggacaagtatgtgacggcgctctacttcaccttcagcagcctcaccagtgtgggcttcggcaacgtctctcccaacaccaactcagagaagatcttctccatctgcgtcatgctcattggctccctcatgtatgctagcatcttcggcaacgtgtcggccatcatccagcggctgtactcgggcacagcccgctaccacacacagatgctgcgggtgcgggagttcatccgcttccaccagatccccaatcccctgcgccagcgcctcgaggagtacttccagcacgcctggtcctacaccaacggcatcgacatgaacgcggtgctgaagggcttccctgagtgcctgcaggctgacatctgcctgcacctgaaccgctcactgctgcagcactgcaaacccttccgaggggccaccaagggctgccttcgggccctgaccatgaagttcaagaccacacatgcaccgccaggggacacactggtgcatgctggggacctgctcaccgccctgtacttcatctcccggggctccatcgagatcctgcggggcgacgtcgtcgtggccatcctggggaagaatgacatctttggggagcctctgaacctgtatgcaaggcctggcaagtcgaacggggatgtgcgggccctcacctactgtgacctacacaagatccatcgggacgacctgctggaggtgctggacatgtaccctgagttctccgaccacttctggtccagcctggagatcaccttcaacctgcgagataccaacatgatcccgggctcccccggcagtacggagttagagggtggcttcagtcggcaacgcaagcgcaagttgtccttccgcaggcgcacggacaaggacacggagcagccaggggaggtgtcggccttggggccgggccgggcgggggcagggccgagtagccggggccggccgggggggccgtggggggagagcccgtccagtggcccctccagccctgagagcagtgaggatgagggcccaggccgcagctccagccccctccgcctggtgcccttctccagccccaggccccccggagagccgccgggtggggagcccctgatggaggactgcgagaagagcagcgacacttgcaaccccctgtcaggcgccttctcaggagtgtccaacattttcagcttctggggggacagtcggggccgccagtaccaggagctccctcgatgccccgcccccacccccagcctcctcaacatccccctctccagcccgggtcggcggccccggggcgacgtggagagcaggctggatgccctccagcgccagctcaacaggctggagacccggctgagtgcagacatggccactgtcctgcagctgctacagaggcagatgacgctggtcccgcccgcctacagtgctgtgaccaccccggggcctggccccacttccacatccccgctgttgcccgtcagccccctccccaccctcaccttggactcgctttctcaggtttcccagttcatggcgtgtgaggagctgcccccgggggccccagagcttccccaagaaggccccacacgacgcctctccctaccgggccagctgggggccctcacctcccagcccctgcacagacacggctcggacccgggcagttagtggggctgcccagtgtggacacgtggctcacccagggatcaaggcgctgctgggccgctccccttggaggccctgctcaggaggccctgaccgtggaaggggagaggaactcgaaagcacagctcctcccccagcccttgggaccatcttctcctgcagtcccctgggccccagtgagaggggcaggggcagggccggcagtaggtggggcctgtggtccccccactgccctgagggcattagctggtctaactgcccggaggcacccggccctgggccttaggcacctcaaggacttttctgctatttactgctcttattgttaaggataataattaaggatcatatgaataattaatgaagatgctgatgactatgaataataaataattatcctgaggaga

SEQ ID NO: 475 - DNA, 3884 bp, Homo sapiens
  source 1..3884: mol_type = genomic DNA
  misc_feature 1..3884: note = cDNA of KCNH2 gene SNP c.2266A>G (p.Met756Val)
atgccggtgcggaggggccacgtcgcgccgcagaacaccttcctggacaccatcatccgcaagtttgagggccagagccgtaagttcatcatcgccaacgctcgggtggagaactgcgccgtcatctactgcaacgacggcttctgcgagctgtgcggctactcgcgggccgaggtgatgcagcgaccctgcacctgcgacttcctgcacgggccgcgcacgcagcgccgcgctgccgcgcagatcgcgcaggcactgctgggcgccgaggagcgcaaagtggaaatcgccttctaccggaaagatgggagctgcttcctatgtctggtggatgtggtgcccgtgaagaacgaggatggggctgtcatcatgttcatcctcaatttcgaggtggtgatggagaaggacatggtggggtccccggctcatgacaccaaccaccggggcccccccaccagctggctggccccaggccgcgccaagaccttccgcctgaagctgcccgcgctgctggcgctgacggcccgggagtcgtcggtgcggtcgggcggcgcgggcggcgcgggcgccccgggggccgtggtggtggacgtggacctgacgcccgcggcacccagcagcgagtcgctggccctggacgaagtgacagccatggacaaccacgtggcagggctcgggcccgcggaggagcggcgtgcgctggtgggtcccggctctccgccccgcagcgcgcccggccagctcccatcgccccgggcgcacagcctcaaccccgacgcctcgggctccagctgcagcctggcccggacgcgctcccgagaaagctgcgccagcgtgcgccgcgcctcgtcggccgacgacatcgaggccatgcgcgccggggtgctgcccccgccaccgcgccacgccagcaccggggccatgcacccactgcgcagcggcttgctcaactccacctcggactccgacctcgtgcgctaccgcaccattagcaagattccccaaatcaccctcaactttgtggacctcaagggcgaccccttcttggcttcgcccaccagtgaccgtgagatcatagcacctaagataaaggagcgaacccacaatgtcactgagaaggtcacccaggtcctgtccctgggcgccgacgtgctgcctgagtacaagctgcaggcaccgcgcatccaccgctggaccatcctgcattacagccccttcaaggccgtgtgggactggctcatcctgctgctggtcatctacacggctgtcttcacaccctactcggctgccttcctgctgaaggagacggaagaaggcccgcctgctaccgagtgtggctacgcctgccagccgctggctgtggtggacctcatcgtggacatcatgttcattgtggacatcctcatcaacttccgcaccacctacgtcaatgccaacgaggaggtggtcagccaccccggccgcatcgccgtccactacttcaagggctggttcctcatcgacatggtggccgccatccccttcgacctgctcatcttcggctctggctctgaggagctgatcgggctgctgaagactgcgcggctgctgcggctggtgcgcgtggcgcggaagctggatcgctactcagagtacggcgcggccgtgctgttcttgctcatgtgcacctttgcgctcatcgcgcactggctagcctgcatctggtacgccatcggcaacatggagcagccacacatggactcacgcatcggctggctgcacaacctgggcgaccagataggcaaaccctacaacagcagcggcctgggcggcccctccatcaaggacaagtatgtgacggcgctctacttcaccttcagcagcctcaccagtgtgggcttcggcaacgtctctcccaacaccaactcagagaagatcttctccatctgcgtcatgctcattggctccctcatgtatgctagcatcttcggcaacgtgtcggccatcatccagcggctgtactcgggcacagcccgctaccacacacagatgctgcgggtgcgggagttcatccgcttccaccagatccccaatcccctgcgccagcgcctcgaggagtacttccagcacgcctggtcctacaccaacggcatcgacatgaacgcggtgctgaagggcttccctgagtgcctgcaggctgacatctgcctgcacctgaaccgctcactgctgcagcactgcaaacccttccgaggggccaccaagggctgccttcgggccctggccgtgaagttcaagaccacacatgcaccgccaggggacacactggtgcatgctggggacctgctcaccgccctgtacttcatctcccggggctccatcgagatcctgcggggcgacgtcgtcgtggccatcctggggaagaatgacatctttggggagcctctgaacctgtatgcaaggcctggcaagtcgaacggggatgtgcgggccctcacctactgtgacctacacaagatccatcgggacgacctgctggaggtgctggacatgtaccctgagttctccgaccacttctggtccagcctggagatcaccttcaacctgcgagataccaacatgatcccgggctcccccggcagtacggagttagagggtggcttcagtcggcaacgcaagcgcaagttgtccttccgcaggcgcacggacaaggacacggagcagccaggggaggtgtcggccttggggccgggccgggcgggggcagggccgagtagccggggccggccgggggggccgtggggggagagcccgtccagtggcccctccagccctgagagcagtgaggatgagggcccaggccgcagctccagccccctccgcctggtgcccttctccagccccaggccccccggagagccgccgggtggggagcccctgatggaggactgcgagaagagcagcgacacttgcaaccccctgtcaggcgccttctcaggagtgtccaacattttcagcttctggggggacagtcggggccgccagtaccaggagctccctcgatgccccgcccccacccccagcctcctcaacatccccctctccagcccgggtcggcggccccggggcgacgtggagagcaggctggatgccctccagcgccagctcaacaggctggagacccggctgagtgcagacatggccactgtcctgcagctgctacagaggcagatgacgctggtcccgcccgcctacagtgctgtgaccaccccggggcctggccccacttccacatccccgctgttgcccgtcagccccctccccaccctcaccttggactcgctttctcaggtttcccagttcatggcgtgtgaggagctgcccccgggggccccagagcttccccaagaaggccccacacgacgcctctccctaccgggccagctgggggccctcacctcccagcccctgcacagacacggctcggacccgggcagttagtggggctgcccagtgtggacacgtggctcacccagggatcaaggcgctgctgggccgctccccttggaggccctgctcaggaggccctgaccgtggaaggggagaggaactcgaaagcacagctcctcccccagcccttgggaccatcttctcctgcagtcccctgggccccagtgagaggggcaggggcagggccggcagtaggtggggcctgtggtccccccactgccctgagggcattagctggtctaactgcccggaggcacccggccctgggccttaggcacctcaaggacttttctgctatttactgctcttattgttaaggataataattaaggatcatatgaataattaatgaagatgctgatgactatgaataataaataattatcctgaggaga

SEQ ID NO: 476 - DNA, 3884 bp, Homo sapiens
  source 1..3884: mol_type = genomic DNA
  misc_feature 1..3884: note = cDNA of KCNH2 gene SNP c.2271G>C (p.Lys757Asn)
atgccggtgcggaggggccacgtcgcgccgcagaacaccttcctggacaccatcatccgcaagtttgagggccagagccgtaagttcatcatcgccaacgctcgggtggagaactgcgccgtcatctactgcaacgacggcttctgcgagctgtgcggctactcgcgggccgaggtgatgcagcgaccctgcacctgcgacttcctgcacgggccgcgcacgcagcgccgcgctgccgcgcagatcgcgcaggcactgctgggcgccgaggagcgcaaagtggaaatcgccttctaccggaaagatgggagctgcttcctatgtctggtggatgtggtgcccgtgaagaacgaggatggggctgtcatcatgttcatcctcaatttcgaggtggtgatggagaaggacatggtggggtccccggctcatgacaccaaccaccggggcccccccaccagctggctggccccaggccgcgccaagaccttccgcctgaagctgcccgcgctgctggcgctgacggcccgggagtcgtcggtgcggtcgggcggcgcgggcggcgcgggcgccccgggggccgtggtggtggacgtggacctgacgcccgcggcacccagcagcgagtcgctggccctggacgaagtgacagccatggacaaccacgtggcagggctcgggcccgcggaggagcggcgtgcgctggtgggtcccggctctccgccccgcagcgcgcccggccagctcccatcgccccgggcgcacagcctcaaccccgacgcctcgggctccagctgcagcctggcccggacgcgctcccgagaaagctgcgccagcgtgcgccgcgcctcgtcggccgacgacatcgaggccatgcgcgccggggtgctgcccccgccaccgcgccacgccagcaccggggccatgcacccactgcgcagcggcttgctcaactccacctcggactccgacctcgtgcgctaccgcaccattagcaagattccccaaatcaccctcaactttgtggacctcaagggcgaccccttcttggcttcgcccaccagtgaccgtgagatcatagcacctaagataaaggagcgaacccacaatgtcactgagaaggtcacccaggtcctgtccctgggcgccgacgtgctgcctgagtacaagctgcaggcaccgcgcatccaccgctggaccatcctgcattacagccccttcaaggccgtgtgggactggctcatcctgctgctggtcatctacacggctgtcttcacaccctactcggctgccttcctgctgaaggagacggaagaaggcccgcctgctaccgagtgtggctacgcctgccagccgctggctgtggtggacctcatcgtggacatcatgttcattgtggacatcctcatcaacttccgcaccacctacgtcaatgccaacgaggaggtggtcagccaccccggccgcatcgccgtccactacttcaagggctggttcctcatcgacatggtggccgccatccccttcgacctgctcatcttcggctctggctctgaggagctgatcgggctgctgaagactgcgcggctgctgcggctggtgcgcgtggcgcggaagctggatcgctactcagagtacggcgcggccgtgctgttcttgctcatgtgcacctttgcgctcatcgcgcactggctagcctgcatctggtacgccatcggcaacatggagcagccacacatggactcacgcatcggctggctgcacaacctgggcgaccagataggcaaaccctacaacagcagcggcctgggcggcccctccatcaaggacaagtatgtgacggcgctctacttcaccttcagcagcctcaccagtgtgggcttcggcaacgtctctcccaacaccaactcagagaagatcttctccatctgcgtcatgctcattggctccctcatgtatgctagcatcttcggcaacgtgtcggccatcatccagcggctgtactcgggcacagcccgctaccacacacagatgctgcgggtgcgggagttcatccgcttccaccagatccccaatcccctgcgccagcgcctcgaggagtacttccagcacgcctggtcctacaccaacggcatcgacatgaacgcggtgctgaagggcttccctgagtgcctgcaggctgacatctgcctgcacctgaaccgctcactgctgcagcactgcaaacccttccgaggggccaccaagggctgccttcgggccctggccatgaacttcaagaccacacatgcaccgccaggggacacactggtgcatgctggggacctgctcaccgccctgtacttcatctcccggggctccatcgagatcctgcggggcgacgtcgtcgtggccatcctggggaagaatgacatctttggggagcctctgaacctgtatgcaaggcctggcaagtcgaacggggatgtgcgggccctcacctactgtgacctacacaagatccatcgggacgacctgctggaggtgctggacatgtaccctgagttctccgaccacttctggtccagcctggagatcaccttcaacctgcgagataccaacatgatcccgggctcccccggcagtacggagttagagggtggcttcagtcggcaacgcaagcgcaagttgtccttccgcaggcgcacggacaaggacacggagcagccaggggaggtgtcggccttggggccgggccgggcgggggcagggccgagtagccggggccggccgggggggccgtggggggagagcccgtccagtggcccctccagccctgagagcagtgaggatgagggcccaggccgcagctccagccccctccgcctggtgcccttctccagccccaggccccccggagagccgccgggtggggagcccctgatggaggactgcgagaagagcagcgacacttgcaaccccctgtcaggcgccttctcaggagtgtccaacattttcagcttctggggggacagtcggggccgccagtaccaggagctccctcgatgccccgcccccacccccagcctcctcaacatccccctctccagcccgggtcggcggccccggggcgacgtggagagcaggctggatgccctccagcgccagctcaacaggctggagacccggctgagtgcagacatggccactgtcctgcagctgctacagaggcagatgacgctggtcccgcccgcctacagtgctgtgaccaccccggggcctggccccacttccacatccccgctgttgcccgtcagccccctccccaccctcaccttggactcgctttctcaggtttcccagttcatggcgtgtgaggagctgcccccgggggccccagagcttccccaagaaggccccacacgacgcctctccctaccgggccagctgggggccctcacctcccagcccctgcacagacacggctcggacccgggcagttagtggggctgcccagtgtggacacgtggctcacccagggatcaaggcgctgctgggccgctccccttggaggccctgctcaggaggccctgaccgtggaaggggagaggaactcgaaagcacagctcctcccccagcccttgggaccatcttctcctgcagtcccctgggccccagtgagaggggcaggggcagggccggcagtaggtggggcctgtggtccccccactgccctgagggcattagctggtctaactgcccggaggcacccggccctgggccttaggcacctcaaggacttttctgctatttactgctcttattgttaaggataataattaaggatcatatgaataattaatgaagatgctgatgactatgaataataaataattatcctgaggaga

SEQ ID NO: 477 - DNA, 3884 bp, Homo sapiens
  source 1..3884: mol_type = genomic DNA
  misc_feature 1..3884: note = cDNA of KCNH2 gene SNP c.2276A>G (p.Lys759Arg)
atgccggtgcggaggggccacgtcgcgccgcagaacaccttcctggacaccatcatccgcaagtttgagggccagagccgtaagttcatcatcgccaacgctcgggtggagaactgcgccgtcatctactgcaacgacggcttctgcgagctgtgcggctactcgcgggccgaggtgatgcagcgaccctgcacctgcgacttcctgcacgggccgcgcacgcagcgccgcgctgccgcgcagatcgcgcaggcactgctgggcgccgaggagcgcaaagtggaaatcgccttctaccggaaagatgggagctgcttcctatgtctggtggatgtggtgcccgtgaagaacgaggatggggctgtcatcatgttcatcctcaatttcgaggtggtgatggagaaggacatggtggggtccccggctcatgacaccaaccaccggggcccccccaccagctggctggccccaggccgcgccaagaccttccgcctgaagctgcccgcgctgctggcgctgacggcccgggagtcgtcggtgcggtcgggcggcgcgggcggcgcgggcgccccgggggccgtggtggtggacgtggacctgacgcccgcggcacccagcagcgagtcgctggccctggacgaagtgacagccatggacaaccacgtggcagggctcgggcccgcggaggagcggcgtgcgctggtgggtcccggctctccgccccgcagcgcgcccggccagctcccatcgccccgggcgcacagcctcaaccccgacgcctcgggctccagctgcagcctggcccggacgcgctcccgagaaagctgcgccagcgtgcgccgcgcctcgtcggccgacgacatcgaggccatgcgcgccggggtgctgcccccgccaccgcgccacgccagcaccggggccatgcacccactgcgcagcggcttgctcaactccacctcggactccgacctcgtgcgctaccgcaccattagcaagattccccaaatcaccctcaactttgtggacctcaagggcgaccccttcttggcttcgcccaccagtgaccgtgagatcatagcacctaagataaaggagcgaacccacaatgtcactgagaaggtcacccaggtcctgtccctgggcgccgacgtgctgcctgagtacaagctgcaggcaccgcgcatccaccgctggaccatcctgcattacagccccttcaaggccgtgtgggactggctcatcctgctgctggtcatctacacggctgtcttcacaccctactcggctgccttcctgctgaaggagacggaagaaggcccgcctgctaccgagtgtggctacgcctgccagccgctggctgtggtggacctcatcgtggacatcatgttcattgtggacatcctcatcaacttccgcaccacctacgtcaatgccaacgaggaggtggtcagccaccccggccgcatcgccgtccactacttcaagggctggttcctcatcgacatggtggccgccatccccttcgacctgctcatcttcggctctggctctgaggagctgatcgggctgctgaagactgcgcggctgctgcggctggtgcgcgtggcgcggaagctggatcgctactcagagtacggcgcggccgtgctgttcttgctcatgtgcacctttgcgctcatcgcgcactggctagcctgcatctggtacgccatcggcaacatggagcagccacacatggactcacgcatcggctggctgcacaacctgggcgaccagataggcaaaccctacaacagcagcggcctgggcggcccctccatcaaggacaagtatgtgacggcgctctacttcaccttcagcagcctcaccagtgtgggcttcggcaacgtctctcccaacaccaactcagagaagatcttctccatctgcgtcatgctcattggctccctcatgtatgctagcatcttcggcaacgtgtcggccatcatccagcggctgtactcgggcacagcccgctaccacacacagatgctgcgggtgcgggagttcatccgcttccaccagatccccaatcccctgcgccagcgcctcgaggagtacttccagcacgcctggtcctacaccaacggcatcgacatgaacgcggtgctgaagggcttccctgagtgcctgcaggctgacatctgcctgcacctgaaccgctcactgctgcagcactgcaaacccttccgaggggccaccaagggctgccttcgggccctggccatgaagttcaggaccacacatgcaccgccaggggacacactggtgcatgctggggacctgctcaccgccctgtacttcatctcccggggctccatcgagatcctgcggggcgacgtcgtcgtggccatcctggggaagaatgacatctttggggagcctctgaacctgtatgcaaggcctggcaagtcgaacggggatgtgcgggccctcacctactgtgacctacacaagatccatcgggacgacctgctggaggtgctggacatgtaccctgagttctccgaccacttctggtccagcctggagatcaccttcaacctgcgagataccaacatgatcccgggctcccccggcagtacggagttagagggtggcttcagtcggcaacgcaagcgcaagttgtccttccgcaggcgcacggacaaggacacggagcagccaggggaggtgtcggccttggggccgggccgggcgggggcagggccgagtagccggggccggccgggggggccgtggggggagagcccgtccagtggcccctccagccctgagagcagtgaggatgagggcccaggccgcagctccagccccctccgcctggtgcccttctccagccccaggccccccggagagccgccgggtggggagcccctgatggaggactgcgagaagagcagcgacacttgcaaccccctgtcaggcgccttctcaggagtgtccaacattttcagcttctggggggacagtcggggccgccagtaccaggagctccctcgatgccccgcccccacccccagcctcctcaacatccccctctccagcccgggtcggcggccccggggcgacgtggagagcaggctggatgccctccagcgccagctcaacaggctggagacccggctgagtgcagacatggccactgtcctgcagctgctacagaggcagatgacgctggtcccgcccgcctacagtgctgtgaccaccccggggcctggccccacttccacatccccgctgttgcccgtcagccccctccccaccctcaccttggactcgctttctcaggtttcccagttcatggcgtgtgaggagctgcccccgggggccccagagcttccccaagaaggccccacacgacgcctctccctaccgggccagctgggggccctcacctcccagcccctgcacagacacggctcggacccgggcagttagtggggctgcccagtgtggacacgtggctcacccagggatcaaggcgctgctgggccgctccccttggaggccctgctcaggaggccctgaccgtggaaggggagaggaactcgaaagcacagctcctcccccagcccttgggaccatcttctcctgcagtcccctgggccccagtgagaggggcaggggcagggccggcagtaggtggggcctgtggtccccccactgccctgagggcattagctggtctaactgcccggaggcacccggccctgggccttaggcacctcaaggacttttctgctatttactgctcttattgttaaggataataattaaggatcatatgaataattaatgaagatgctgatgactatgaataataaataattatcctgaggaga

SEQ ID NO: 478 - DNA, 3884 bp, Homo sapiens
  source 1..3884: mol_type = genomic DNA
  misc_feature 1..3884: note = cDNA of KCNH2 gene SNP c.227G>T (p.Arg76Leu)
atgccggtgcggaggggccacgtcgcgccgcagaacaccttcctggacaccatcatccgcaagtttgagggccagagccgtaagttcatcatcgccaacgctcgggtggagaactgcgccgtcatctactgcaacgacggcttctgcgagctgtgcggctactcgcgggccgaggtgatgcagcgaccctgcacctgcgacttcctgcacgggccgcgcacgcagctccgcgctgccgcgcagatcgcgcaggcactgctgggcgccgaggagcgcaaagtggaaatcgccttctaccggaaagatgggagctgcttcctatgtctggtggatgtggtgcccgtgaagaacgaggatggggctgtcatcatgttcatcctcaatttcgaggtggtgatggagaaggacatggtggggtccccggctcatgacaccaaccaccggggcccccccaccagctggctggccccaggccgcgccaagaccttccgcctgaagctgcccgcgctgctggcgctgacggcccgggagtcgtcggtgcggtcgggcggcgcgggcggcgcgggcgccccgggggccgtggtggtggacgtggacctgacgcccgcggcacccagcagcgagtcgctggccctggacgaagtgacagccatggacaaccacgtggcagggctcgggcccgcggaggagcggcgtgcgctggtgggtcccggctctccgccccgcagcgcgcccggccagctcccatcgccccgggcgcacagcctcaaccccgacgcctcgggctccagctgcagcctggcccggacgcgctcccgagaaagctgcgccagcgtgcgccgcgcctcgtcggccgacgacatcgaggccatgcgcgccggggtgctgcccccgccaccgcgccacgccagcaccggggccatgcacccactgcgcagcggcttgctcaactccacctcggactccgacctcgtgcgctaccgcaccattagcaagattccccaaatcaccctcaactttgtggacctcaagggcgaccccttcttggcttcgcccaccagtgaccgtgagatcatagcacctaagataaaggagcgaacccacaatgtcactgagaaggtcacccaggtcctgtccctgggcgccgacgtgctgcctgagtacaagctgcaggcaccgcgcatccaccgctggaccatcctgcattacagccccttcaaggccgtgtgggactggctcatcctgctgctggtcatctacacggctgtcttcacaccctactcggctgccttcctgctgaaggagacggaagaaggcccgcctgctaccgagtgtggctacgcctgccagccgctggctgtggtggacctcatcgtggacatcatgttcattgtggacatcctcatcaacttccgcaccacctacgtcaatgccaacgaggaggtggtcagccaccccggccgcatcgccgtccactacttcaagggctggttcctcatcgacatggtggccgccatccccttcgacctgctcatcttcggctctggctctgaggagctgatcgggctgctgaagactgcgcggctgctgcggctggtgcgcgtggcgcggaagctggatcgctactcagagtacggcgcggccgtgctgttcttgctcatgtgcacctttgcgctcatcgcgcactggctagcctgcatctggtacgccatcggcaacatggagcagccacacatggactcacgcatcggctggctgcacaacctgggcgaccagataggcaaaccctacaacagcagcggcctgggcggcccctccatcaaggacaagtatgtgacggcgctctacttcaccttcagcagcctcaccagtgtgggcttcggcaacgtctctcccaacaccaactcagagaagatcttctccatctgcgtcatgctcattggctccctcatgtatgctagcatcttcggcaacgtgtcggccatcatccagcggctgtactcgggcacagcccgctaccacacacagatgctgcgggtgcgggagttcatccgcttccaccagatccccaatcccctgcgccagcgcctcgaggagtacttccagcacgcctggtcctacaccaacggcatcgacatgaacgcggtgctgaagggcttccctgagtgcctgcaggctgacatctgcctgcacctgaaccgctcactgctgcagcactgcaaacccttccgaggggccaccaagggctgccttcgggccctggccatgaagttcaagaccacacatgcaccgccaggggacacactggtgcatgctggggacctgctcaccgccctgtacttcatctcccggggctccatcgagatcctgcggggcgacgtcgtcgtggccatcctggggaagaatgacatctttggggagcctctgaacctgtatgcaaggcctggcaagtcgaacggggatgtgcgggccctcacctactgtgacctacacaagatccatcgggacgacctgctggaggtgctggacatgtaccctgagttctccgaccacttctggtccagcctggagatcaccttcaacctgcgagataccaacatgatcccgggctcccccggcagtacggagttagagggtggcttcagtcggcaacgcaagcgcaagttgtccttccgcaggcgcacggacaaggacacggagcagccaggggaggtgtcggccttggggccgggccgggcgggggcagggccgagtagccggggccggccgggggggccgtggggggagagcccgtccagtggcccctccagccctgagagcagtgaggatgagggcccaggccgcagctccagccccctccgcctggtgcccttctccagccccaggccccccggagagccgccgggtggggagcccctgatggaggactgcgagaagagcagcgacacttgcaaccccctgtcaggcgccttctcaggagtgtccaacattttcagcttctggggggacagtcggggccgccagtaccaggagctccctcgatgccccgcccccacccccagcctcctcaacatccccctctccagcccgggtcggcggccccggggcgacgtggagagcaggctggatgccctccagcgccagctcaacaggctggagacccggctgagtgcagacatggccactgtcctgcagctgctacagaggcagatgacgctggtcccgcccgcctacagtgctgtgaccaccccggggcctggccccacttccacatccccgctgttgcccgtcagccccctccccaccctcaccttggactcgctttctcaggtttcccagttcatggcgtgtgaggagctgcccccgggggccccagagcttccccaagaaggccccacacgacgcctctccctaccgggccagctgggggccctcacctcccagcccctgcacagacacggctcggacccgggcagttagtggggctgcccagtgtggacacgtggctcacccagggatcaaggcgctgctgggccgctccccttggaggccctgctcaggaggccctgaccgtggaaggggagaggaactcgaaagcacagctcctcccccagcccttgggaccatcttctcctgcagtcccctgggccccagtgagaggggcaggggcagggccggcagtaggtggggcctgtggtccccccactgccctgagggcattagctggtctaactgcccggaggcacccggccctgggccttaggcacctcaaggacttttctgctatttactgctcttattgttaaggataataattaaggatcatatgaataattaatgaagatgctgatgactatgaataataaataattatcctgaggaga

SEQ ID NO: 479 - DNA, 3884 bp, Homo sapiens
  source 1..3884: mol_type = genomic DNA
  misc_feature 1..3884: note = cDNA of KCNH2 gene SNP c.2291C>G (p.Pro764Arg)
atgccggtgcggaggggccacgtcgcgccgcagaacaccttcctggacaccatcatccgcaagtttgagggccagagccgtaagttcatcatcgccaacgctcgggtggagaactgcgccgtcatctactgcaacgacggcttctgcgagctgtgcggctactcgcgggccgaggtgatgcagcgaccctgcacctgcgacttcctgcacgggccgcgcacgcagcgccgcgctgccgcgcagatcgcgcaggcactgctgggcgccgaggagcgcaaagtggaaatcgccttctaccggaaagatgggagctgcttcctatgtctggtggatgtggtgcccgtgaagaacgaggatggggctgtcatcatgttcatcctcaatttcgaggtggtgatggagaaggacatggtggggtccccggctcatgacaccaaccaccggggcccccccaccagctggctggccccaggccgcgccaagaccttccgcctgaagctgcccgcgctgctggcgctgacggcccgggagtcgtcggtgcggtcgggcggcgcgggcggcgcgggcgccccgggggccgtggtggtggacgtggacctgacgcccgcggcacccagcagcgagtcgctggccctggacgaagtgacagccatggacaaccacgtggcagggctcgggcccgcggaggagcggcgtgcgctggtgggtcccggctctccgccccgcagcgcgcccggccagctcccatcgccccgggcgcacagcctcaaccccgacgcctcgggctccagctgcagcctggcccggacgcgctcccgagaaagctgcgccagcgtgcgccgcgcctcgtcggccgacgacatcgaggccatgcgcgccggggtgctgcccccgccaccgcgccacgccagcaccggggccatgcacccactgcgcagcggcttgctcaactccacctcggactccgacctcgtgcgctaccgcaccattagcaagattccccaaatcaccctcaactttgtggacctcaagggcgaccccttcttggcttcgcccaccagtgaccgtgagatcatagcacctaagataaaggagcgaacccacaatgtcactgagaaggtcacccaggtcctgtccctgggcgccgacgtgctgcctgagtacaagctgcaggcaccgcgcatccaccgctggaccatcctgcattacagccccttcaaggccgtgtgggactggctcatcctgctgctggtcatctacacggctgtcttcacaccctactcggctgccttcctgctgaaggagacggaagaaggcccgcctgctaccgagtgtggctacgcctgccagccgctggctgtggtggacctcatcgtggacatcatgttcattgtggacatcctcatcaacttccgcaccacctacgtcaatgccaacgaggaggtggtcagccaccccggccgcatcgccgtccactacttcaagggctggttcctcatcgacatggtggccgccatccccttcgacctgctcatcttcggctctggctctgaggagctgatcgggctgctgaagactgcgcggctgctgcggctggtgcgcgtggcgcggaagctggatcgctactcagagtacggcgcggccgtgctgttcttgctcatgtgcacctttgcgctcatcgcgcactggctagcctgcatctggtacgccatcggcaacatggagcagccacacatggactcacgcatcggctggctgcacaacctgggcgaccagataggcaaaccctacaacagcagcggcctgggcggcccctccatcaaggacaagtatgtgacggcgctctacttcaccttcagcagcctcaccagtgtgggcttcggcaacgtctctcccaacaccaactcagagaagatcttctccatctgcgtcatgctcattggctccctcatgtatgctagcatcttcggcaacgtgtcggccatcatccagcggctgtactcgggcacagcccgctaccacacacagatgctgcgggtgcgggagttcatccgcttccaccagatccccaatcccctgcgccagcgcctcgaggagtacttccagcacgcctggtcctacaccaacggcatcgacatgaacgcggtgctgaagggcttccctgagtgcctgcaggctgacatctgcctgcacctgaaccgctcactgctgcagcactgcaaacccttccgaggggccaccaagggctgccttcgggccctggccatgaagttcaagaccacacatgcacggccaggggacacactggtgcatgctggggacctgctcaccgccctgtacttcatctcccggggctccatcgagatcctgcggggcgacgtcgtcgtggccatcctggggaagaatgacatctttggggagcctctgaacctgtatgcaaggcctggcaagtcgaacggggatgtgcgggccctcacctactgtgacctacacaagatccatcgggacgacctgctggaggtgctggacatgtaccctgagttctccgaccacttctggtccagcctggagatcaccttcaacctgcgagataccaacatgatcccgggctcccccggcagtacggagttagagggtggcttcagtcggcaacgcaagcgcaagttgtccttccgcaggcgcacggacaaggacacggagcagccaggggaggtgtcggccttggggccgggccgggcgggggcagggccgagtagccggggccggccgggggggccgtggggggagagcccgtccagtggcccctccagccctgagagcagtgaggatgagggcccaggccgcagctccagccccctccgcctggtgcccttctccagccccaggccccccggagagccgccgggtggggagcccctgatggaggactgcgagaagagcagcgacacttgcaaccccctgtcaggcgccttctcaggagtgtccaacattttcagcttctggggggacagtcggggccgccagtaccaggagctccctcgatgccccgcccccacccccagcctcctcaacatccccctctccagcccgggtcggcggccccggggcgacgtggagagcaggctggatgccctccagcgccagctcaacaggctggagacccggctgagtgcagacatggccactgtcctgcagctgctacagaggcagatgacgctggtcccgcccgcctacagtgctgtgaccaccccggggcctggccccacttccacatccccgctgttgcccgtcagccccctccccaccctcaccttggactcgctttctcaggtttcccagttcatggcgtgtgaggagctgcccccgggggccccagagcttccccaagaaggccccacacgacgcctctccctaccgggccagctgggggccctcacctcccagcccctgcacagacacggctcggacccgggcagttagtggggctgcccagtgtggacacgtggctcacccagggatcaaggcgctgctgggccgctccccttggaggccctgctcaggaggccctgaccgtggaaggggagaggaactcgaaagcacagctcctcccccagcccttgggaccatcttctcctgcagtcccctgggccccagtgagaggggcaggggcagggccggcagtaggtggggcctgtggtccccccactgccctgagggcattagctggtctaactgcccggaggcacccggccctgggccttaggcacctcaaggacttttctgctatttactgctcttattgttaaggataataattaaggatcatatgaataattaatgaagatgctgatgactatgaataataaataattatcctgaggaga

SEQ ID NO: 480 - DNA, 3884 bp, Homo sapiens
  source 1..3884: mol_type = genomic DNA
  misc_feature 1..3884: note = cDNA of KCNH2 gene SNP c.2291C>T (p.Pro764Leu)
atgccggtgcggaggggccacgtcgcgccgcagaacaccttcctggacaccatcatccgcaagtttgagggccagagccgtaagttcatcatcgccaacgctcgggtggagaactgcgccgtcatctactgcaacgacggcttctgcgagctgtgcggctactcgcgggccgaggtgatgcagcgaccctgcacctgcgacttcctgcacgggccgcgcacgcagcgccgcgctgccgcgcagatcgcgcaggcactgctgggcgccgaggagcgcaaagtggaaatcgccttctaccggaaagatgggagctgcttcctatgtctggtggatgtggtgcccgtgaagaacgaggatggggctgtcatcatgttcatcctcaatttcgaggtggtgatggagaaggacatggtggggtccccggctcatgacaccaaccaccggggcccccccaccagctggctggccccaggccgcgccaagaccttccgcctgaagctgcccgcgctgctggcgctgacggcccgggagtcgtcggtgcggtcgggcggcgcgggcggcgcgggcgccccgggggccgtggtggtggacgtggacctgacgcccgcggcacccagcagcgagtcgctggccctggacgaagtgacagccatggacaaccacgtggcagggctcgggcccgcggaggagcggcgtgcgctggtgggtcccggctctccgccccgcagcgcgcccggccagctcccatcgccccgggcgcacagcctcaaccccgacgcctcgggctccagctgcagcctggcccggacgcgctcccgagaaagctgcgccagcgtgcgccgcgcctcgtcggccgacgacatcgaggccatgcgcgccggggtgctgcccccgccaccgcgccacgccagcaccggggccatgcacccactgcgcagcggcttgctcaactccacctcggactccgacctcgtgcgctaccgcaccattagcaagattccccaaatcaccctcaactttgtggacctcaagggcgaccccttcttggcttcgcccaccagtgaccgtgagatcatagcacctaagataaaggagcgaacccacaatgtcactgagaaggtcacccaggtcctgtccctgggcgccgacgtgctgcctgagtacaagctgcaggcaccgcgcatccaccgctggaccatcctgcattacagccccttcaaggccgtgtgggactggctcatcctgctgctggtcatctacacggctgtcttcacaccctactcggctgccttcctgctgaaggagacggaagaaggcccgcctgctaccgagtgtggctacgcctgccagccgctggctgtggtggacctcatcgtggacatcatgttcattgtggacatcctcatcaacttccgcaccacctacgtcaatgccaacgaggaggtggtcagccaccccggccgcatcgccgtccactacttcaagggctggttcctcatcgacatggtggccgccatccccttcgacctgctcatcttcggctctggctctgaggagctgatcgggctgctgaagactgcgcggctgctgcggctggtgcgcgtggcgcggaagctggatcgctactcagagtacggcgcggccgtgctgttcttgctcatgtgcacctttgcgctcatcgcgcactggctagcctgcatctggtacgccatcggcaacatggagcagccacacatggactcacgcatcggctggctgcacaacctgggcgaccagataggcaaaccctacaacagcagcggcctgggcggcccctccatcaaggacaagtatgtgacggcgctctacttcaccttcagcagcctcaccagtgtgggcttcggcaacgtctctcccaacaccaactcagagaagatcttctccatctgcgtcatgctcattggctccctcatgtatgctagcatcttcggcaacgtgtcggccatcatccagcggctgtactcgggcacagcccgctaccacacacagatgctgcgggtgcgggagttcatccgcttccaccagatccccaatcccctgcgccagcgcctcgaggagtacttccagcacgcctggtcctacaccaacggcatcgacatgaacgcggtgctgaagggcttccctgagtgcctgcaggctgacatctgcctgcacctgaaccgctcactgctgcagcactgcaaacccttccgaggggccaccaagggctgccttcgggccctggccatgaagttcaagaccacacatgcactgccaggggacacactggtgcatgctggggacctgctcaccgccctgtacttcatctcccggggctccatcgagatcctgcggggcgacgtcgtcgtggccatcctggggaagaatgacatctttggggagcctctgaacctgtatgcaaggcctggcaagtcgaacggggatgtgcgggccctcacctactgtgacctacacaagatccatcgggacgacctgctggaggtgctggacatgtaccctgagttctccgaccacttctggtccagcctggagatcaccttcaacctgcgagataccaacatgatcccgggctcccccggcagtacggagttagagggtggcttcagtcggcaacgcaagcgcaagttgtccttccgcaggcgcacggacaaggacacggagcagccaggggaggtgtcggccttggggccgggccgggcgggggcagggccgagtagccggggccggccgggggggccgtggggggagagcccgtccagtggcccctccagccctgagagcagtgaggatgagggcccaggccgcagctccagccccctccgcctggtgcccttctccagccccaggccccccggagagccgccgggtggggagcccctgatggaggactgcgagaagagcagcgacacttgcaaccccctgtcaggcgccttctcaggagtgtccaacattttcagcttctggggggacagtcggggccgccagtaccaggagctccctcgatgccccgcccccacccccagcctcctcaacatccccctctccagcccgggtcggcggccccggggcgacgtggagagcaggctggatgccctccagcgccagctcaacaggctggagacccggctgagtgcagacatggccactgtcctgcagctgctacagaggcagatgacgctggtcccgcccgcctacagtgctgtgaccaccccggggcctggccccacttccacatccccgctgttgcccgtcagccccctccccaccctcaccttggactcgctttctcaggtttcccagttcatggcgtgtgaggagctgcccccgggggccccagagcttccccaagaaggccccacacgacgcctctccctaccgggccagctgggggccctcacctcccagcccctgcacagacacggctcggacccgggcagttagtggggctgcccagtgtggacacgtggctcacccagggatcaaggcgctgctgggccgctccccttggaggccctgctcaggaggccctgaccgtggaaggggagaggaactcgaaagcacagctcctcccccagcccttgggaccatcttctcctgcagtcccctgggccccagtgagaggggcaggggcagggccggcagtaggtggggcctgtggtccccccactgccctgagggcattagctggtctaactgcccggaggcacccggccctgggccttaggcacctcaaggacttttctgctatttactgctcttattgttaaggataataattaaggatcatatgaataattaatgaagatgctgatgactatgaataataaataattatcctgaggaga

SEQ ID NO: 481 - DNA, 3884 bp, Homo sapiens
  source 1..3884: mol_type = genomic DNA
  misc_feature 1..3884: note = cDNA of KCNH2 gene SNP c.2296G>A (p.Gly766Arg)
atgccggtgcggaggggccacgtcgcgccgcagaacaccttcctggacaccatcatccgcaagtttgagggccagagccgtaagttcatcatcgccaacgctcgggtggagaactgcgccgtcatctactgcaacgacggcttctgcgagctgtgcggctactcgcgggccgaggtgatgcagcgaccctgcacctgcgacttcctgcacgggccgcgcacgcagcgccgcgctgccgcgcagatcgcgcaggcactgctgggcgccgaggagcgcaaagtggaaatcgccttctaccggaaagatgggagctgcttcctatgtctggtggatgtggtgcccgtgaagaacgaggatggggctgtcatcatgttcatcctcaatttcgaggtggtgatggagaaggacatggtggggtccccggctcatgacaccaaccaccggggcccccccaccagctggctggccccaggccgcgccaagaccttccgcctgaagctgcccgcgctgctggcgctgacggcccgggagtcgtcggtgcggtcgggcggcgcgggcggcgcgggcgccccgggggccgtggtggtggacgtggacctgacgcccgcggcacccagcagcgagtcgctggccctggacgaagtgacagccatggacaaccacgtggcagggctcgggcccgcggaggagcggcgtgcgctggtgggtcccggctctccgccccgcagcgcgcccggccagctcccatcgccccgggcgcacagcctcaaccccgacgcctcgggctccagctgcagcctggcccggacgcgctcccgagaaagctgcgccagcgtgcgccgcgcctcgtcggccgacgacatcgaggccatgcgcgccggggtgctgcccccgccaccgcgccacgccagcaccggggccatgcacccactgcgcagcggcttgctcaactccacctcggactccgacctcgtgcgctaccgcaccattagcaagattccccaaatcaccctcaactttgtggacctcaagggcgaccccttcttggcttcgcccaccagtgaccgtgagatcatagcacctaagataaaggagcgaacccacaatgtcactgagaaggtcacccaggtcctgtccctgggcgccgacgtgctgcctgagtacaagctgcaggcaccgcgcatccaccgctggaccatcctgcattacagccccttcaaggccgtgtgggactggctcatcctgctgctggtcatctacacggctgtcttcacaccctactcggctgccttcctgctgaaggagacggaagaaggcccgcctgctaccgagtgtggctacgcctgccagccgctggctgtggtggacctcatcgtggacatcatgttcattgtggacatcctcatcaacttccgcaccacctacgtcaatgccaacgaggaggtggtcagccaccccggccgcatcgccgtccactacttcaagggctggttcctcatcgacatggtggccgccatccccttcgacctgctcatcttcggctctggctctgaggagctgatcgggctgctgaagactgcgcggctgctgcggctggtgcgcgtggcgcggaagctggatcgctactcagagtacggcgcggccgtgctgttcttgctcatgtgcacctttgcgctcatcgcgcactggctagcctgcatctggtacgccatcggcaacatggagcagccacacatggactcacgcatcggctggctgcacaacctgggcgaccagataggcaaaccctacaacagcagcggcctgggcggcccctccatcaaggacaagtatgtgacggcgctctacttcaccttcagcagcctcaccagtgtgggcttcggcaacgtctctcccaacaccaactcagagaagatcttctccatctgcgtcatgctcattggctccctcatgtatgctagcatcttcggcaacgtgtcggccatcatccagcggctgtactcgggcacagcccgctaccacacacagatgctgcgggtgcgggagttcatccgcttccaccagatccccaatcccctgcgccagcgcctcgaggagtacttccagcacgcctggtcctacaccaacggcatcgacatgaacgcggtgctgaagggcttccctgagtgcctgcaggctgacatctgcctgcacctgaaccgctcactgctgcagcactgcaaacccttccgaggggccaccaagggctgccttcgggccctggccatgaagttcaagaccacacatgcaccgccaagggacacactggtgcatgctggggacctgctcaccgccctgtacttcatctcccggggctccatcgagatcctgcggggcgacgtcgtcgtggccatcctggggaagaatgacatctttggggagcctctgaacctgtatgcaaggcctggcaagtcgaacggggatgtgcgggccctcacctactgtgacctacacaagatccatcgggacgacctgctggaggtgctggacatgtaccctgagttctccgaccacttctggtccagcctggagatcaccttcaacctgcgagataccaacatgatcccgggctcccccggcagtacggagttagagggtggcttcagtcggcaacgcaagcgcaagttgtccttccgcaggcgcacggacaaggacacggagcagccaggggaggtgtcggccttggggccgggccgggcgggggcagggccgagtagccggggccggccgggggggccgtggggggagagcccgtccagtggcccctccagccctgagagcagtgaggatgagggcccaggccgcagctccagccccctccgcctggtgcccttctccagccccaggccccccggagagccgccgggtggggagcccctgatggaggactgcgagaagagcagcgacacttgcaaccccctgtcaggcgccttctcaggagtgtccaacattttcagcttctggggggacagtcggggccgccagtaccaggagctccctcgatgccccgcccccacccccagcctcctcaacatccccctctccagcccgggtcggcggccccggggcgacgtggagagcaggctggatgccctccagcgccagctcaacaggctggagacccggctgagtgcagacatggccactgtcctgcagctgctacagaggcagatgacgctggtcccgcccgcctacagtgctgtgaccaccccggggcctggccccacttccacatccccgctgttgcccgtcagccccctccccaccctcaccttggactcgctttctcaggtttcccagttcatggcgtgtgaggagctgcccccgggggccccagagcttccccaagaaggccccacacgacgcctctccctaccgggccagctgggggccctcacctcccagcccctgcacagacacggctcggacccgggcagttagtggggctgcccagtgtggacacgtggctcacccagggatcaaggcgctgctgggccgctccccttggaggccctgctcaggaggccctgaccgtggaaggggagaggaactcgaaagcacagctcctcccccagcccttgggaccatcttctcctgcagtcccctgggccccagtgagaggggcaggggcagggccggcagtaggtggggcctgtggtccccccactgccctgagggcattagctggtctaactgcccggaggcacccggccctgggccttaggcacctcaaggacttttctgctatttactgctcttattgttaaggataataattaaggatcatatgaataattaatgaagatgctgatgactatgaataataaataattatcctgaggaga

SEQ ID NO: 482 - DNA, 3884 bp, Homo sapiens
  source 1..3884: mol_type = genomic DNA
  misc_feature 1..3884: note = cDNA of KCNH2 gene SNP c.2296G>T (p.Gly766Trp)
atgccggtgcggaggggccacgtcgcgccgcagaacaccttcctggacaccatcatccgcaagtttgagggccagagccgtaagttcatcatcgccaacgctcgggtggagaactgcgccgtcatctactgcaacgacggcttctgcgagctgtgcggctactcgcgggccgaggtgatgcagcgaccctgcacctgcgacttcctgcacgggccgcgcacgcagcgccgcgctgccgcgcagatcgcgcaggcactgctgggcgccgaggagcgcaaagtggaaatcgccttctaccggaaagatgggagctgcttcctatgtctggtggatgtggtgcccgtgaagaacgaggatggggctgtcatcatgttcatcctcaatttcgaggtggtgatggagaaggacatggtggggtccccggctcatgacaccaaccaccggggcccccccaccagctggctggccccaggccgcgccaagaccttccgcctgaagctgcccgcgctgctggcgctgacggcccgggagtcgtcggtgcggtcgggcggcgcgggcggcgcgggcgccccgggggccgtggtggtggacgtggacctgacgcccgcggcacccagcagcgagtcgctggccctggacgaagtgacagccatggacaaccacgtggcagggctcgggcccgcggaggagcggcgtgcgctggtgggtcccggctctccgccccgcagcgcgcccggccagctcccatcgccccgggcgcacagcctcaaccccgacgcctcgggctccagctgcagcctggcccggacgcgctcccgagaaagctgcgccagcgtgcgccgcgcctcgtcggccgacgacatcgaggccatgcgcgccggggtgctgcccccgccaccgcgccacgccagcaccggggccatgcacccactgcgcagcggcttgctcaactccacctcggactccgacctcgtgcgctaccgcaccattagcaagattccccaaatcaccctcaactttgtggacctcaagggcgaccccttcttggcttcgcccaccagtgaccgtgagatcatagcacctaagataaaggagcgaacccacaatgtcactgagaaggtcacccaggtcctgtccctgggcgccgacgtgctgcctgagtacaagctgcaggcaccgcgcatccaccgctggaccatcctgcattacagccccttcaaggccgtgtgggactggctcatcctgctgctggtcatctacacggctgtcttcacaccctactcggctgccttcctgctgaaggagacggaagaaggcccgcctgctaccgagtgtggctacgcctgccagccgctggctgtggtggacctcatcgtggacatcatgttcattgtggacatcctcatcaacttccgcaccacctacgtcaatgccaacgaggaggtggtcagccaccccggccgcatcgccgtccactacttcaagggctggttcctcatcgacatggtggccgccatccccttcgacctgctcatcttcggctctggctctgaggagctgatcgggctgctgaagactgcgcggctgctgcggctggtgcgcgtggcgcggaagctggatcgctactcagagtacggcgcggccgtgctgttcttgctcatgtgcacctttgcgctcatcgcgcactggctagcctgcatctggtacgccatcggcaacatggagcagccacacatggactcacgcatcggctggctgcacaacctgggcgaccagataggcaaaccctacaacagcagcggcctgggcggcccctccatcaaggacaagtatgtgacggcgctctacttcaccttcagcagcctcaccagtgtgggcttcggcaacgtctctcccaacaccaactcagagaagatcttctccatctgcgtcatgctcattggctccctcatgtatgctagcatcttcggcaacgtgtcggccatcatccagcggctgtactcgggcacagcccgctaccacacacagatgctgcgggtgcgggagttcatccgcttccaccagatccccaatcccctgcgccagcgcctcgaggagtacttccagcacgcctggtcctacaccaacggcatcgacatgaacgcggtgctgaagggcttccctgagtgcctgcaggctgacatctgcctgcacctgaaccgctcactgctgcagcactgcaaacccttccgaggggccaccaagggctgccttcgggccctggccatgaagttcaagaccacacatgcaccgccatgggacacactggtgcatgctggggacctgctcaccgccctgtacttcatctcccggggctccatcgagatcctgcggggcgacgtcgtcgtggccatcctggggaagaatgacatctttggggagcctctgaacctgtatgcaaggcctggcaagtcgaacggggatgtgcgggccctcacctactgtgacctacacaagatccatcgggacgacctgctggaggtgctggacatgtaccctgagttctccgaccacttctggtccagcctggagatcaccttcaacctgcgagataccaacatgatcccgggctcccccggcagtacggagttagagggtggcttcagtcggcaacgcaagcgcaagttgtccttccgcaggcgcacggacaaggacacggagcagccaggggaggtgtcggccttggggccgggccgggcgggggcagggccgagtagccggggccggccgggggggccgtggggggagagcccgtccagtggcccctccagccctgagagcagtgaggatgagggcccaggccgcagctccagccccctccgcctggtgcccttctccagccccaggccccccggagagccgccgggtggggagcccctgatggaggactgcgagaagagcagcgacacttgcaaccccctgtcaggcgccttctcaggagtgtccaacattttcagcttctggggggacagtcggggccgccagtaccaggagctccctcgatgccccgcccccacccccagcctcctcaacatccccctctccagcccgggtcggcggccccggggcgacgtggagagcaggctggatgccctccagcgccagctcaacaggctggagacccggctgagtgcagacatggccactgtcctgcagctgctacagaggcagatgacgctggtcccgcccgcctacagtgctgtgaccaccccggggcctggccccacttccacatccccgctgttgcccgtcagccccctccccaccctcaccttggactcgctttctcaggtttcccagttcatggcgtgtgaggagctgcccccgggggccccagagcttccccaagaaggccccacacgacgcctctccctaccgggccagctgggggccctcacctcccagcccctgcacagacacggctcggacccgggcagttagtggggctgcccagtgtggacacgtggctcacccagggatcaaggcgctgctgggccgctccccttggaggccctgctcaggaggccctgaccgtggaaggggagaggaactcgaaagcacagctcctcccccagcccttgggaccatcttctcctgcagtcccctgggccccagtgagaggggcaggggcagggccggcagtaggtggggcctgtggtccccccactgccctgagggcattagctggtctaactgcccggaggcacccggccctgggccttaggcacctcaaggacttttctgctatttactgctcttattgttaaggataataattaaggatcatatgaataattaatgaagatgctgatgactatgaataataaataattatcctgaggaga

SEQ ID NO: 483 - DNA, 3884 bp, Homo sapiens
  source 1..3884: mol_type = genomic DNA
  misc_feature 1..3884: note = cDNA of KCNH2 gene SNP c.2299G>T (p.Asp767Tyr)
atgccggtgcggaggggccacgtcgcgccgcagaacaccttcctggacaccatcatccgcaagtttgagggccagagccgtaagttcatcatcgccaacgctcgggtggagaactgcgccgtcatctactgcaacgacggcttctgcgagctgtgcggctactcgcgggccgaggtgatgcagcgaccctgcacctgcgacttcctgcacgggccgcgcacgcagcgccgcgctgccgcgcagatcgcgcaggcactgctgggcgccgaggagcgcaaagtggaaatcgccttctaccggaaagatgggagctgcttcctatgtctggtggatgtggtgcccgtgaagaacgaggatggggctgtcatcatgttcatcctcaatttcgaggtggtgatggagaaggacatggtggggtccccggctcatgacaccaaccaccggggcccccccaccagctggctggccccaggccgcgccaagaccttccgcctgaagctgcccgcgctgctggcgctgacggcccgggagtcgtcggtgcggtcgggcggcgcgggcggcgcgggcgccccgggggccgtggtggtggacgtggacctgacgcccgcggcacccagcagcgagtcgctggccctggacgaagtgacagccatggacaaccacgtggcagggctcgggcccgcggaggagcggcgtgcgctggtgggtcccggctctccgccccgcagcgcgcccggccagctcccatcgccccgggcgcacagcctcaaccccgacgcctcgggctccagctgcagcctggcccggacgcgctcccgagaaagctgcgccagcgtgcgccgcgcctcgtcggccgacgacatcgaggccatgcgcgccggggtgctgcccccgccaccgcgccacgccagcaccggggccatgcacccactgcgcagcggcttgctcaactccacctcggactccgacctcgtgcgctaccgcaccattagcaagattccccaaatcaccctcaactttgtggacctcaagggcgaccccttcttggcttcgcccaccagtgaccgtgagatcatagcacctaagataaaggagcgaacccacaatgtcactgagaaggtcacccaggtcctgtccctgggcgccgacgtgctgcctgagtacaagctgcaggcaccgcgcatccaccgctggaccatcctgcattacagccccttcaaggccgtgtgggactggctcatcctgctgctggtcatctacacggctgtcttcacaccctactcggctgccttcctgctgaaggagacggaagaaggcccgcctgctaccgagtgtggctacgcctgccagccgctggctgtggtggacctcatcgtggacatcatgttcattgtggacatcctcatcaacttccgcaccacctacgtcaatgccaacgaggaggtggtcagccaccccggccgcatcgccgtccactacttcaagggctggttcctcatcgacatggtggccgccatccccttcgacctgctcatcttcggctctggctctgaggagctgatcgggctgctgaagactgcgcggctgctgcggctggtgcgcgtggcgcggaagctggatcgctactcagagtacggcgcggccgtgctgttcttgctcatgtgcacctttgcgctcatcgcgcactggctagcctgcatctggtacgccatcggcaacatggagcagccacacatggactcacgcatcggctggctgcacaacctgggcgaccagataggcaaaccctacaacagcagcggcctgggcggcccctccatcaaggacaagtatgtgacggcgctctacttcaccttcagcagcctcaccagtgtgggcttcggcaacgtctctcccaacaccaactcagagaagatcttctccatctgcgtcatgctcattggctccctcatgtatgctagcatcttcggcaacgtgtcggccatcatccagcggctgtactcgggcacagcccgctaccacacacagatgctgcgggtgcgggagttcatccgcttccaccagatccccaatcccctgcgccagcgcctcgaggagtacttccagcacgcctggtcctacaccaacggcatcgacatgaacgcggtgctgaagggcttccctgagtgcctgcaggctgacatctgcctgcacctgaaccgctcactgctgcagcactgcaaacccttccgaggggccaccaagggctgccttcgggccctggccatgaagttcaagaccacacatgcaccgccagggtacacactggtgcatgctggggacctgctcaccgccctgtacttcatctcccggggctccatcgagatcctgcggggcgacgtcgtcgtggccatcctggggaagaatgacatctttggggagcctctgaacctgtatgcaaggcctggcaagtcgaacggggatgtgcgggccctcacctactgtgacctacacaagatccatcgggacgacctgctggaggtgctggacatgtaccctgagttctccgaccacttctggtccagcctggagatcaccttcaacctgcgagataccaacatgatcccgggctcccccggcagtacggagttagagggtggcttcagtcggcaacgcaagcgcaagttgtccttccgcaggcgcacggacaaggacacggagcagccaggggaggtgtcggccttggggccgggccgggcgggggcagggccgagtagccggggccggccgggggggccgtggggggagagcccgtccagtggcccctccagccctgagagcagtgaggatgagggcccaggccgcagctccagccccctccgcctggtgcccttctccagccccaggccccccggagagccgccgggtggggagcccctgatggaggactgcgagaagagcagcgacacttgcaaccccctgtcaggcgccttctcaggagtgtccaacattttcagcttctggggggacagtcggggccgccagtaccaggagctccctcgatgccccgcccccacccccagcctcctcaacatccccctctccagcccgggtcggcggccccggggcgacgtggagagcaggctggatgccctccagcgccagctcaacaggctggagacccggctgagtgcagacatggccactgtcctgcagctgctacagaggcagatgacgctggtcccgcccgcctacagtgctgtgaccaccccggggcctggccccacttccacatccccgctgttgcccgtcagccccctccccaccctcaccttggactcgctttctcaggtttcccagttcatggcgtgtgaggagctgcccccgggggccccagagcttccccaagaaggccccacacgacgcctctccctaccgggccagctgggggccctcacctcccagcccctgcacagacacggctcggacccgggcagttagtggggctgcccagtgtggacacgtggctcacccagggatcaaggcgctgctgggccgctccccttggaggccctgctcaggaggccctgaccgtggaaggggagaggaactcgaaagcacagctcctcccccagcccttgggaccatcttctcctgcagtcccctgggccccagtgagaggggcaggggcagggccggcagtaggtggggcctgtggtccccccactgccctgagggcattagctggtctaactgcccggaggcacccggccctgggccttaggcacctcaaggacttttctgctatttactgctcttattgttaaggataataattaaggatcatatgaataattaatgaagatgctgatgactatgaataataaataattatcctgaggaga

SEQ ID NO: 484 - DNA, 3884 bp, Homo sapiens
  source 1..3884: mol_type = genomic DNA
  misc_feature 1..3884: note = cDNA of KCNH2 gene SNP c.2309T>C (p.Val770Ala)
atgccggtgcggaggggccacgtcgcgccgcagaacaccttcctggacaccatcatccgcaagtttgagggccagagccgtaagttcatcatcgccaacgctcgggtggagaactgcgccgtcatctactgcaacgacggcttctgcgagctgtgcggctactcgcgggccgaggtgatgcagcgaccctgcacctgcgacttcctgcacgggccgcgcacgcagcgccgcgctgccgcgcagatcgcgcaggcactgctgggcgccgaggagcgcaaagtggaaatcgccttctaccggaaagatgggagctgcttcctatgtctggtggatgtggtgcccgtgaagaacgaggatggggctgtcatcatgttcatcctcaatttcgaggtggtgatggagaaggacatggtggggtccccggctcatgacaccaaccaccggggcccccccaccagctggctggccccaggccgcgccaagaccttccgcctgaagctgcccgcgctgctggcgctgacggcccgggagtcgtcggtgcggtcgggcggcgcgggcggcgcgggcgccccgggggccgtggtggtggacgtggacctgacgcccgcggcacccagcagcgagtcgctggccctggacgaagtgacagccatggacaaccacgtggcagggctcgggcccgcggaggagcggcgtgcgctggtgggtcccggctctccgccccgcagcgcgcccggccagctcccatcgccccgggcgcacagcctcaaccccgacgcctcgggctccagctgcagcctggcccggacgcgctcccgagaaagctgcgccagcgtgcgccgcgcctcgtcggccgacgacatcgaggccatgcgcgccggggtgctgcccccgccaccgcgccacgccagcaccggggccatgcacccactgcgcagcggcttgctcaactccacctcggactccgacctcgtgcgctaccgcaccattagcaagattccccaaatcaccctcaactttgtggacctcaagggcgaccccttcttggcttcgcccaccagtgaccgtgagatcatagcacctaagataaaggagcgaacccacaatgtcactgagaaggtcacccaggtcctgtccctgggcgccgacgtgctgcctgagtacaagctgcaggcaccgcgcatccaccgctggaccatcctgcattacagccccttcaaggccgtgtgggactggctcatcctgctgctggtcatctacacggctgtcttcacaccctactcggctgccttcctgctgaaggagacggaagaaggcccgcctgctaccgagtgtggctacgcctgccagccgctggctgtggtggacctcatcgtggacatcatgttcattgtggacatcctcatcaacttccgcaccacctacgtcaatgccaacgaggaggtggtcagccaccccggccgcatcgccgtccactacttcaagggctggttcctcatcgacatggtggccgccatccccttcgacctgctcatcttcggctctggctctgaggagctgatcgggctgctgaagactgcgcggctgctgcggctggtgcgcgtggcgcggaagctggatcgctactcagagtacggcgcggccgtgctgttcttgctcatgtgcacctttgcgctcatcgcgcactggctagcctgcatctggtacgccatcggcaacatggagcagccacacatggactcacgcatcggctggctgcacaacctgggcgaccagataggcaaaccctacaacagcagcggcctgggcggcccctccatcaaggacaagtatgtgacggcgctctacttcaccttcagcagcctcaccagtgtgggcttcggcaacgtctctcccaacaccaactcagagaagatcttctccatctgcgtcatgctcattggctccctcatgtatgctagcatcttcggcaacgtgtcggccatcatccagcggctgtactcgggcacagcccgctaccacacacagatgctgcgggtgcgggagttcatccgcttccaccagatccccaatcccctgcgccagcgcctcgaggagtacttccagcacgcctggtcctacaccaacggcatcgacatgaacgcggtgctgaagggcttccctgagtgcctgcaggctgacatctgcctgcacctgaaccgctcactgctgcagcactgcaaacccttccgaggggccaccaagggctgccttcgggccctggccatgaagttcaagaccacacatgcaccgccaggggacacactggcgcatgctggggacctgctcaccgccctgtacttcatctcccggggctccatcgagatcctgcggggcgacgtcgtcgtggccatcctggggaagaatgacatctttggggagcctctgaacctgtatgcaaggcctggcaagtcgaacggggatgtgcgggccctcacctactgtgacctacacaagatccatcgggacgacctgctggaggtgctggacatgtaccctgagttctccgaccacttctggtccagcctggagatcaccttcaacctgcgagataccaacatgatcccgggctcccccggcagtacggagttagagggtggcttcagtcggcaacgcaagcgcaagttgtccttccgcaggcgcacggacaaggacacggagcagccaggggaggtgtcggccttggggccgggccgggcgggggcagggccgagtagccggggccggccgggggggccgtggggggagagcccgtccagtggcccctccagccctgagagcagtgaggatgagggcccaggccgcagctccagccccctccgcctggtgcccttctccagccccaggccccccggagagccgccgggtggggagcccctgatggaggactgcgagaagagcagcgacacttgcaaccccctgtcaggcgccttctcaggagtgtccaacattttcagcttctggggggacagtcggggccgccagtaccaggagctccctcgatgccccgcccccacccccagcctcctcaacatccccctctccagcccgggtcggcggccccggggcgacgtggagagcaggctggatgccctccagcgccagctcaacaggctggagacccggctgagtgcagacatggccactgtcctgcagctgctacagaggcagatgacgctggtcccgcccgcctacagtgctgtgaccaccccggggcctggccccacttccacatccccgctgttgcccgtcagccccctccccaccctcaccttggactcgctttctcaggtttcccagttcatggcgtgtgaggagctgcccccgggggccccagagcttccccaagaaggccccacacgacgcctctccctaccgggccagctgggggccctcacctcccagcccctgcacagacacggctcggacccgggcagttagtggggctgcccagtgtggacacgtggctcacccagggatcaaggcgctgctgggccgctccccttggaggccctgctcaggaggccctgaccgtggaaggggagaggaactcgaaagcacagctcctcccccagcccttgggaccatcttctcctgcagtcccctgggccccagtgagaggggcaggggcagggccggcagtaggtggggcctgtggtccccccactgccctgagggcattagctggtctaactgcccggaggcacccggccctgggccttaggcacctcaaggacttttctgctatttactgctcttattgttaaggataataattaaggatcatatgaataattaatgaagatgctgatgactatgaataataaataattatcctgaggaga

SEQ ID NO: 485 - DNA, 3884 bp, Homo sapiens
  source 1..3884: mol_type = genomic DNA
  misc_feature 1..3884: note = cDNA of KCNH2 gene SNP c.2312A>C (p.His771Pro)
atgccggtgcggaggggccacgtcgcgccgcagaacaccttcctggacaccatcatccgcaagtttgagggccagagccgtaagttcatcatcgccaacgctcgggtggagaactgcgccgtcatctactgcaacgacggcttctgcgagctgtgcggctactcgcgggccgaggtgatgcagcgaccctgcacctgcgacttcctgcacgggccgcgcacgcagcgccgcgctgccgcgcagatcgcgcaggcactgctgggcgccgaggagcgcaaagtggaaatcgccttctaccggaaagatgggagctgcttcctatgtctggtggatgtggtgcccgtgaagaacgaggatggggctgtcatcatgttcatcctcaatttcgaggtggtgatggagaaggacatggtggggtccccggctcatgacaccaaccaccggggcccccccaccagctggctggccccaggccgcgccaagaccttccgcctgaagctgcccgcgctgctggcgctgacggcccgggagtcgtcggtgcggtcgggcggcgcgggcggcgcgggcgccccgggggccgtggtggtggacgtggacctgacgcccgcggcacccagcagcgagtcgctggccctggacgaagtgacagccatggacaaccacgtggcagggctcgggcccgcggaggagcggcgtgcgctggtgggtcccggctctccgccccgcagcgcgcccggccagctcccatcgccccgggcgcacagcctcaaccccgacgcctcgggctccagctgcagcctggcccggacgcgctcccgagaaagctgcgccagcgtgcgccgcgcctcgtcggccgacgacatcgaggccatgcgcgccggggtgctgcccccgccaccgcgccacgccagcaccggggccatgcacccactgcgcagcggcttgctcaactccacctcggactccgacctcgtgcgctaccgcaccattagcaagattccccaaatcaccctcaactttgtggacctcaagggcgaccccttcttggcttcgcccaccagtgaccgtgagatcatagcacctaagataaaggagcgaacccacaatgtcactgagaaggtcacccaggtcctgtccctgggcgccgacgtgctgcctgagtacaagctgcaggcaccgcgcatccaccgctggaccatcctgcattacagccccttcaaggccgtgtgggactggctcatcctgctgctggtcatctacacggctgtcttcacaccctactcggctgccttcctgctgaaggagacggaagaaggcccgcctgctaccgagtgtggctacgcctgccagccgctggctgtggtggacctcatcgtggacatcatgttcattgtggacatcctcatcaacttccgcaccacctacgtcaatgccaacgaggaggtggtcagccaccccggccgcatcgccgtccactacttcaagggctggttcctcatcgacatggtggccgccatccccttcgacctgctcatcttcggctctggctctgaggagctgatcgggctgctgaagactgcgcggctgctgcggctggtgcgcgtggcgcggaagctggatcgctactcagagtacggcgcggccgtgctgttcttgctcatgtgcacctttgcgctcatcgcgcactggctagcctgcatctggtacgccatcggcaacatggagcagccacacatggactcacgcatcggctggctgcacaacctgggcgaccagataggcaaaccctacaacagcagcggcctgggcggcccctccatcaaggacaagtatgtgacggcgctctacttcaccttcagcagcctcaccagtgtgggcttcggcaacgtctctcccaacaccaactcagagaagatcttctccatctgcgtcatgctcattggctccctcatgtatgctagcatcttcggcaacgtgtcggccatcatccagcggctgtactcgggcacagcccgctaccacacacagatgctgcgggtgcgggagttcatccgcttccaccagatccccaatcccctgcgccagcgcctcgaggagtacttccagcacgcctggtcctacaccaacggcatcgacatgaacgcggtgctgaagggcttccctgagtgcctgcaggctgacatctgcctgcacctgaaccgctcactgctgcagcactgcaaacccttccgaggggccaccaagggctgccttcgggccctggccatgaagttcaagaccacacatgcaccgccaggggacacactggtgcctgctggggacctgctcaccgccctgtacttcatctcccggggctccatcgagatcctgcggggcgacgtcgtcgtggccatcctggggaagaatgacatctttggggagcctctgaacctgtatgcaaggcctggcaagtcgaacggggatgtgcgggccctcacctactgtgacctacacaagatccatcgggacgacctgctggaggtgctggacatgtaccctgagttctccgaccacttctggtccagcctggagatcaccttcaacctgcgagataccaacatgatcccgggctcccccggcagtacggagttagagggtggcttcagtcggcaacgcaagcgcaagttgtccttccgcaggcgcacggacaaggacacggagcagccaggggaggtgtcggccttggggccgggccgggcgggggcagggccgagtagccggggccggccgggggggccgtggggggagagcccgtccagtggcccctccagccctgagagcagtgaggatgagggcccaggccgcagctccagccccctccgcctggtgcccttctccagccccaggccccccggagagccgccgggtggggagcccctgatggaggactgcgagaagagcagcgacacttgcaaccccctgtcaggcgccttctcaggagtgtccaacattttcagcttctggggggacagtcggggccgccagtaccaggagctccctcgatgccccgcccccacccccagcctcctcaacatccccctctccagcccgggtcggcggccccggggcgacgtggagagcaggctggatgccctccagcgccagctcaacaggctggagacccggctgagtgcagacatggccactgtcctgcagctgctacagaggcagatgacgctggtcccgcccgcctacagtgctgtgaccaccccggggcctggccccacttccacatccccgctgttgcccgtcagccccctccccaccctcaccttggactcgctttctcaggtttcccagttcatggcgtgtgaggagctgcccccgggggccccagagcttccccaagaaggccccacacgacgcctctccctaccgggccagctgggggccctcacctcccagcccctgcacagacacggctcggacccgggcagttagtggggctgcccagtgtggacacgtggctcacccagggatcaaggcgctgctgggccgctccccttggaggccctgctcaggaggccctgaccgtggaaggggagaggaactcgaaagcacagctcctcccccagcccttgggaccatcttctcctgcagtcccctgggccccagtgagaggggcaggggcagggccggcagtaggtggggcctgtggtccccccactgccctgagggcattagctggtctaactgcccggaggcacccggccctgggccttaggcacctcaaggacttttctgctatttactgctcttattgttaaggataataattaaggatcatatgaataattaatgaagatgctgatgactatgaataataaataattatcctgaggaga

SEQ ID NO: 486 - DNA, 3884 bp, Homo sapiens
  source 1..3884: mol_type = genomic DNA
  misc_feature 1..3884: note = cDNA of KCNH2 gene SNP c.2312A>G (p.His771Arg)
atgccggtgcggaggggccacgtcgcgccgcagaacaccttcctggacaccatcatccgcaagtttgagggccagagccgtaagttcatcatcgccaacgctcgggtggagaactgcgccgtcatctactgcaacgacggcttctgcgagctgtgcggctactcgcgggccgaggtgatgcagcgaccctgcacctgcgacttcctgcacgggccgcgcacgcagcgccgcgctgccgcgcagatcgcgcaggcactgctgggcgccgaggagcgcaaagtggaaatcgccttctaccggaaagatgggagctgcttcctatgtctggtggatgtggtgcccgtgaagaacgaggatggggctgtcatcatgttcatcctcaatttcgaggtggtgatggagaaggacatggtggggtccccggctcatgacaccaaccaccggggcccccccaccagctggctggccccaggccgcgccaagaccttccgcctgaagctgcccgcgctgctggcgctgacggcccgggagtcgtcggtgcggtcgggcggcgcgggcggcgcgggcgccccgggggccgtggtggtggacgtggacctgacgcccgcggcacccagcagcgagtcgctggccctggacgaagtgacagccatggacaaccacgtggcagggctcgggcccgcggaggagcggcgtgcgctggtgggtcccggctctccgccccgcagcgcgcccggccagctcccatcgccccgggcgcacagcctcaaccccgacgcctcgggctccagctgcagcctggcccggacgcgctcccgagaaagctgcgccagcgtgcgccgcgcctcgtcggccgacgacatcgaggccatgcgcgccggggtgctgcccccgccaccgcgccacgccagcaccggggccatgcacccactgcgcagcggcttgctcaactccacctcggactccgacctcgtgcgctaccgcaccattagcaagattccccaaatcaccctcaactttgtggacctcaagggcgaccccttcttggcttcgcccaccagtgaccgtgagatcatagcacctaagataaaggagcgaacccacaatgtcactgagaaggtcacccaggtcctgtccctgggcgccgacgtgctgcctgagtacaagctgcaggcaccgcgcatccaccgctggaccatcctgcattacagccccttcaaggccgtgtgggactggctcatcctgctgctggtcatctacacggctgtcttcacaccctactcggctgccttcctgctgaaggagacggaagaaggcccgcctgctaccgagtgtggctacgcctgccagccgctggctgtggtggacctcatcgtggacatcatgttcattgtggacatcctcatcaacttccgcaccacctacgtcaatgccaacgaggaggtggtcagccaccccggccgcatcgccgtccactacttcaagggctggttcctcatcgacatggtggccgccatccccttcgacctgctcatcttcggctctggctctgaggagctgatcgggctgctgaagactgcgcggctgctgcggctggtgcgcgtggcgcggaagctggatcgctactcagagtacggcgcggccgtgctgttcttgctcatgtgcacctttgcgctcatcgcgcactggctagcctgcatctggtacgccatcggcaacatggagcagccacacatggactcacgcatcggctggctgcacaacctgggcgaccagataggcaaaccctacaacagcagcggcctgggcggcccctccatcaaggacaagtatgtgacggcgctctacttcaccttcagcagcctcaccagtgtgggcttcggcaacgtctctcccaacaccaactcagagaagatcttctccatctgcgtcatgctcattggctccctcatgtatgctagcatcttcggcaacgtgtcggccatcatccagcggctgtactcgggcacagcccgctaccacacacagatgctgcgggtgcgggagttcatccgcttccaccagatccccaatcccctgcgccagcgcctcgaggagtacttccagcacgcctggtcctacaccaacggcatcgacatgaacgcggtgctgaagggcttccctgagtgcctgcaggctgacatctgcctgcacctgaaccgctcactgctgcagcactgcaaacccttccgaggggccaccaagggctgccttcgggccctggccatgaagttcaagaccacacatgcaccgccaggggacacactggtgcgtgctggggacctgctcaccgccctgtacttcatctcccggggctccatcgagatcctgcggggcgacgtcgtcgtggccatcctggggaagaatgacatctttggggagcctctgaacctgtatgcaaggcctggcaagtcgaacggggatgtgcgggccctcacctactgtgacctacacaagatccatcgggacgacctgctggaggtgctggacatgtaccctgagttctccgaccacttctggtccagcctggagatcaccttcaacctgcgagataccaacatgatcccgggctcccccggcagtacggagttagagggtggcttcagtcggcaacgcaagcgcaagttgtccttccgcaggcgcacggacaaggacacggagcagccaggggaggtgtcggccttggggccgggccgggcgggggcagggccgagtagccggggccggccgggggggccgtggggggagagcccgtccagtggcccctccagccctgagagcagtgaggatgagggcccaggccgcagctccagccccctccgcctggtgcccttctccagccccaggccccccggagagccgccgggtggggagcccctgatggaggactgcgagaagagcagcgacacttgcaaccccctgtcaggcgccttctcaggagtgtccaacattttcagcttctggggggacagtcggggccgccagtaccaggagctccctcgatgccccgcccccacccccagcctcctcaacatccccctctccagcccgggtcggcggccccggggcgacgtggagagcaggctggatgccctccagcgccagctcaacaggctggagacccggctgagtgcagacatggccactgtcctgcagctgctacagaggcagatgacgctggtcccgcccgcctacagtgctgtgaccaccccggggcctggccccacttccacatccccgctgttgcccgtcagccccctccccaccctcaccttggactcgctttctcaggtttcccagttcatggcgtgtgaggagctgcccccgggggccccagagcttccccaagaaggccccacacgacgcctctccctaccgggccagctgggggccctcacctcccagcccctgcacagacacggctcggacccgggcagttagtggggctgcccagtgtggacacgtggctcacccagggatcaaggcgctgctgggccgctccccttggaggccctgctcaggaggccctgaccgtggaaggggagaggaactcgaaagcacagctcctcccccagcccttgggaccatcttctcctgcagtcccctgggccccagtgagaggggcaggggcagggccggcagtaggtggggcctgtggtccccccactgccctgagggcattagctggtctaactgcccggaggcacccggccctgggccttaggcacctcaaggacttttctgctatttactgctcttattgttaaggataataattaaggatcatatgaataattaatgaagatgctgatgactatgaataataaataattatcctgaggaga

SEQ ID NO: 487 - DNA, 3884 bp, Homo sapiens
  source 1..3884: mol_type = genomic DNA
  misc_feature 1..3884: note = cDNA of KCNH2 gene SNP c.2320G>T (p.Asp774Tyr)
atgccggtgcggaggggccacgtcgcgccgcagaacaccttcctggacaccatcatccgcaagtttgagggccagagccgtaagttcatcatcgccaacgctcgggtggagaactgcgccgtcatctactgcaacgacggcttctgcgagctgtgcggctactcgcgggccgaggtgatgcagcgaccctgcacctgcgacttcctgcacgggccgcgcacgcagcgccgcgctgccgcgcagatcgcgcaggcactgctgggcgccgaggagcgcaaagtggaaatcgccttctaccggaaagatgggagctgcttcctatgtctggtggatgtggtgcccgtgaagaacgaggatggggctgtcatcatgttcatcctcaatttcgaggtggtgatggagaaggacatggtggggtccccggctcatgacaccaaccaccggggcccccccaccagctggctggccccaggccgcgccaagaccttccgcctgaagctgcccgcgctgctggcgctgacggcccgggagtcgtcggtgcggtcgggcggcgcgggcggcgcgggcgccccgggggccgtggtggtggacgtggacctgacgcccgcggcacccagcagcgagtcgctggccctggacgaagtgacagccatggacaaccacgtggcagggctcgggcccgcggaggagcggcgtgcgctggtgggtcccggctctccgccccgcagcgcgcccggccagctcccatcgccccgggcgcacagcctcaaccccgacgcctcgggctccagctgcagcctggcccggacgcgctcccgagaaagctgcgccagcgtgcgccgcgcctcgtcggccgacgacatcgaggccatgcgcgccggggtgctgcccccgccaccgcgccacgccagcaccggggccatgcacccactgcgcagcggcttgctcaactccacctcggactccgacctcgtgcgctaccgcaccattagcaagattccccaaatcaccctcaactttgtggacctcaagggcgaccccttcttggcttcgcccaccagtgaccgtgagatcatagcacctaagataaaggagcgaacccacaatgtcactgagaaggtcacccaggtcctgtccctgggcgccgacgtgctgcctgagtacaagctgcaggcaccgcgcatccaccgctggaccatcctgcattacagccccttcaaggccgtgtgggactggctcatcctgctgctggtcatctacacggctgtcttcacaccctactcggctgccttcctgctgaaggagacggaagaaggcccgcctgctaccgagtgtggctacgcctgccagccgctggctgtggtggacctcatcgtggacatcatgttcattgtggacatcctcatcaacttccgcaccacctacgtcaatgccaacgaggaggtggtcagccaccccggccgcatcgccgtccactacttcaagggctggttcctcatcgacatggtggccgccatccccttcgacctgctcatcttcggctctggctctgaggagctgatcgggctgctgaagactgcgcggctgctgcggctggtgcgcgtggcgcggaagctggatcgctactcagagtacggcgcggccgtgctgttcttgctcatgtgcacctttgcgctcatcgcgcactggctagcctgcatctggtacgccatcggcaacatggagcagccacacatggactcacgcatcggctggctgcacaacctgggcgaccagataggcaaaccctacaacagcagcggcctgggcggcccctccatcaaggacaagtatgtgacggcgctctacttcaccttcagcagcctcaccagtgtgggcttcggcaacgtctctcccaacaccaactcagagaagatcttctccatctgcgtcatgctcattggctccctcatgtatgctagcatcttcggcaacgtgtcggccatcatccagcggctgtactcgggcacagcccgctaccacacacagatgctgcgggtgcgggagttcatccgcttccaccagatccccaatcccctgcgccagcgcctcgaggagtacttccagcacgcctggtcctacaccaacggcatcgacatgaacgcggtgctgaagggcttccctgagtgcctgcaggctgacatctgcctgcacctgaaccgctcactgctgcagcactgcaaacccttccgaggggccaccaagggctgccttcgggccctggccatgaagttcaagaccacacatgcaccgccaggggacacactggtgcatgctgggtacctgctcaccgccctgtacttcatctcccggggctccatcgagatcctgcggggcgacgtcgtcgtggccatcctggggaagaatgacatctttggggagcctctgaacctgtatgcaaggcctggcaagtcgaacggggatgtgcgggccctcacctactgtgacctacacaagatccatcgggacgacctgctggaggtgctggacatgtaccctgagttctccgaccacttctggtccagcctggagatcaccttcaacctgcgagataccaacatgatcccgggctcccccggcagtacggagttagagggtggcttcagtcggcaacgcaagcgcaagttgtccttccgcaggcgcacggacaaggacacggagcagccaggggaggtgtcggccttggggccgggccgggcgggggcagggccgagtagccggggccggccgggggggccgtggggggagagcccgtccagtggcccctccagccctgagagcagtgaggatgagggcccaggccgcagctccagccccctccgcctggtgcccttctccagccccaggccccccggagagccgccgggtggggagcccctgatggaggactgcgagaagagcagcgacacttgcaaccccctgtcaggcgccttctcaggagtgtccaacattttcagcttctggggggacagtcggggccgccagtaccaggagctccctcgatgccccgcccccacccccagcctcctcaacatccccctctccagcccgggtcggcggccccggggcgacgtggagagcaggctggatgccctccagcgccagctcaacaggctggagacccggctgagtgcagacatggccactgtcctgcagctgctacagaggcagatgacgctggtcccgcccgcctacagtgctgtgaccaccccggggcctggccccacttccacatccccgctgttgcccgtcagccccctccccaccctcaccttggactcgctttctcaggtttcccagttcatggcgtgtgaggagctgcccccgggggccccagagcttccccaagaaggccccacacgacgcctctccctaccgggccagctgggggccctcacctcccagcccctgcacagacacggctcggacccgggcagttagtggggctgcccagtgtggacacgtggctcacccagggatcaaggcgctgctgggccgctccccttggaggccctgctcaggaggccctgaccgtggaaggggagaggaactcgaaagcacagctcctcccccagcccttgggaccatcttctcctgcagtcccctgggccccagtgagaggggcaggggcagggccggcagtaggtggggcctgtggtccccccactgccctgagggcattagctggtctaactgcccggaggcacccggccctgggccttaggcacctcaaggacttttctgctatttactgctcttattgttaaggataataattaaggatcatatgaataattaatgaagatgctgatgactatgaataataaataattatcctgaggaga

SEQ ID NO: 488 - DNA, 3884 bp, Homo sapiens
  source 1..3884: mol_type = genomic DNA
  misc_feature 1..3884: note = cDNA of KCNH2 gene SNP c.2326C>T (p.Leu776Phe)
atgccggtgcggaggggccacgtcgcgccgcagaacaccttcctggacaccatcatccgcaagtttgagggccagagccgtaagttcatcatcgccaacgctcgggtggagaactgcgccgtcatctactgcaacgacggcttctgcgagctgtgcggctactcgcgggccgaggtgatgcagcgaccctgcacctgcgacttcctgcacgggccgcgcacgcagcgccgcgctgccgcgcagatcgcgcaggcactgctgggcgccgaggagcgcaaagtggaaatcgccttctaccggaaagatgggagctgcttcctatgtctggtggatgtggtgcccgtgaagaacgaggatggggctgtcatcatgttcatcctcaatttcgaggtggtgatggagaaggacatggtggggtccccggctcatgacaccaaccaccggggcccccccaccagctggctggccccaggccgcgccaagaccttccgcctgaagctgcccgcgctgctggcgctgacggcccgggagtcgtcggtgcggtcgggcggcgcgggcggcgcgggcgccccgggggccgtggtggtggacgtggacctgacgcccgcggcacccagcagcgagtcgctggccctggacgaagtgacagccatggacaaccacgtggcagggctcgggcccgcggaggagcggcgtgcgctggtgggtcccggctctccgccccgcagcgcgcccggccagctcccatcgccccgggcgcacagcctcaaccccgacgcctcgggctccagctgcagcctggcccggacgcgctcccgagaaagctgcgccagcgtgcgccgcgcctcgtcggccgacgacatcgaggccatgcgcgccggggtgctgcccccgccaccgcgccacgccagcaccggggccatgcacccactgcgcagcggcttgctcaactccacctcggactccgacctcgtgcgctaccgcaccattagcaagattccccaaatcaccctcaactttgtggacctcaagggcgaccccttcttggcttcgcccaccagtgaccgtgagatcatagcacctaagataaaggagcgaacccacaatgtcactgagaaggtcacccaggtcctgtccctgggcgccgacgtgctgcctgagtacaagctgcaggcaccgcgcatccaccgctggaccatcctgcattacagccccttcaaggccgtgtgggactggctcatcctgctgctggtcatctacacggctgtcttcacaccctactcggctgccttcctgctgaaggagacggaagaaggcccgcctgctaccgagtgtggctacgcctgccagccgctggctgtggtggacctcatcgtggacatcatgttcattgtggacatcctcatcaacttccgcaccacctacgtcaatgccaacgaggaggtggtcagccaccccggccgcatcgccgtccactacttcaagggctggttcctcatcgacatggtggccgccatccccttcgacctgctcatcttcggctctggctctgaggagctgatcgggctgctgaagactgcgcggctgctgcggctggtgcgcgtggcgcggaagctggatcgctactcagagtacggcgcggccgtgctgttcttgctcatgtgcacctttgcgctcatcgcgcactggctagcctgcatctggtacgccatcggcaacatggagcagccacacatggactcacgcatcggctggctgcacaacctgggcgaccagataggcaaaccctacaacagcagcggcctgggcggcccctccatcaaggacaagtatgtgacggcgctctacttcaccttcagcagcctcaccagtgtgggcttcggcaacgtctctcccaacaccaactcagagaagatcttctccatctgcgtcatgctcattggctccctcatgtatgctagcatcttcggcaacgtgtcggccatcatccagcggctgtactcgggcacagcccgctaccacacacagatgctgcgggtgcgggagttcatccgcttccaccagatccccaatcccctgcgccagcgcctcgaggagtacttccagcacgcctggtcctacaccaacggcatcgacatgaacgcggtgctgaagggcttccctgagtgcctgcaggctgacatctgcctgcacctgaaccgctcactgctgcagcactgcaaacccttccgaggggccaccaagggctgccttcgggccctggccatgaagttcaagaccacacatgcaccgccaggggacacactggtgcatgctggggacctgttcaccgccctgtacttcatctcccggggctccatcgagatcctgcggggcgacgtcgtcgtggccatcctggggaagaatgacatctttggggagcctctgaacctgtatgcaaggcctggcaagtcgaacggggatgtgcgggccctcacctactgtgacctacacaagatccatcgggacgacctgctggaggtgctggacatgtaccctgagttctccgaccacttctggtccagcctggagatcaccttcaacctgcgagataccaacatgatcccgggctcccccggcagtacggagttagagggtggcttcagtcggcaacgcaagcgcaagttgtccttccgcaggcgcacggacaaggacacggagcagccaggggaggtgtcggccttggggccgggccgggcgggggcagggccgagtagccggggccggccgggggggccgtggggggagagcccgtccagtggcccctccagccctgagagcagtgaggatgagggcccaggccgcagctccagccccctccgcctggtgcccttctccagccccaggccccccggagagccgccgggtggggagcccctgatggaggactgcgagaagagcagcgacacttgcaaccccctgtcaggcgccttctcaggagtgtccaacattttcagcttctggggggacagtcggggccgccagtaccaggagctccctcgatgccccgcccccacccccagcctcctcaacatccccctctccagcccgggtcggcggccccggggcgacgtggagagcaggctggatgccctccagcgccagctcaacaggctggagacccggctgagtgcagacatggccactgtcctgcagctgctacagaggcagatgacgctggtcccgcccgcctacagtgctgtgaccaccccggggcctggccccacttccacatccccgctgttgcccgtcagccccctccccaccctcaccttggactcgctttctcaggtttcccagttcatggcgtgtgaggagctgcccccgggggccccagagcttccccaagaaggccccacacgacgcctctccctaccgggccagctgggggccctcacctcccagcccctgcacagacacggctcggacccgggcagttagtggggctgcccagtgtggacacgtggctcacccagggatcaaggcgctgctgggccgctccccttggaggccctgctcaggaggccctgaccgtggaaggggagaggaactcgaaagcacagctcctcccccagcccttgggaccatcttctcctgcagtcccctgggccccagtgagaggggcaggggcagggccggcagtaggtggggcctgtggtccccccactgccctgagggcattagctggtctaactgcccggaggcacccggccctgggccttaggcacctcaaggacttttctgctatttactgctcttattgttaaggataataattaaggatcatatgaataattaatgaagatgctgatgactatgaataataaataattatcctgaggaga

SEQ ID NO: 489 - DNA, 3884 bp, Homo sapiens
  source 1..3884: mol_type = genomic DNA
  misc_feature 1..3884: note = cDNA of KCNH2 gene SNP c.232G>A (p.Ala78Thr)
atgccggtgcggaggggccacgtcgcgccgcagaacaccttcctggacaccatcatccgcaagtttgagggccagagccgtaagttcatcatcgccaacgctcgggtggagaactgcgccgtcatctactgcaacgacggcttctgcgagctgtgcggctactcgcgggccgaggtgatgcagcgaccctgcacctgcgacttcctgcacgggccgcgcacgcagcgccgcactgccgcgcagatcgcgcaggcactgctgggcgccgaggagcgcaaagtggaaatcgccttctaccggaaagatgggagctgcttcctatgtctggtggatgtggtgcccgtgaagaacgaggatggggctgtcatcatgttcatcctcaatttcgaggtggtgatggagaaggacatggtggggtccccggctcatgacaccaaccaccggggcccccccaccagctggctggccccaggccgcgccaagaccttccgcctgaagctgcccgcgctgctggcgctgacggcccgggagtcgtcggtgcggtcgggcggcgcgggcggcgcgggcgccccgggggccgtggtggtggacgtggacctgacgcccgcggcacccagcagcgagtcgctggccctggacgaagtgacagccatggacaaccacgtggcagggctcgggcccgcggaggagcggcgtgcgctggtgggtcccggctctccgccccgcagcgcgcccggccagctcccatcgccccgggcgcacagcctcaaccccgacgcctcgggctccagctgcagcctggcccggacgcgctcccgagaaagctgcgccagcgtgcgccgcgcctcgtcggccgacgacatcgaggccatgcgcgccggggtgctgcccccgccaccgcgccacgccagcaccggggccatgcacccactgcgcagcggcttgctcaactccacctcggactccgacctcgtgcgctaccgcaccattagcaagattccccaaatcaccctcaactttgtggacctcaagggcgaccccttcttggcttcgcccaccagtgaccgtgagatcatagcacctaagataaaggagcgaacccacaatgtcactgagaaggtcacccaggtcctgtccctgggcgccgacgtgctgcctgagtacaagctgcaggcaccgcgcatccaccgctggaccatcctgcattacagccccttcaaggccgtgtgggactggctcatcctgctgctggtcatctacacggctgtcttcacaccctactcggctgccttcctgctgaaggagacggaagaaggcccgcctgctaccgagtgtggctacgcctgccagccgctggctgtggtggacctcatcgtggacatcatgttcattgtggacatcctcatcaacttccgcaccacctacgtcaatgccaacgaggaggtggtcagccaccccggccgcatcgccgtccactacttcaagggctggttcctcatcgacatggtggccgccatccccttcgacctgctcatcttcggctctggctctgaggagctgatcgggctgctgaagactgcgcggctgctgcggctggtgcgcgtggcgcggaagctggatcgctactcagagtacggcgcggccgtgctgttcttgctcatgtgcacctttgcgctcatcgcgcactggctagcctgcatctggtacgccatcggcaacatggagcagccacacatggactcacgcatcggctggctgcacaacctgggcgaccagataggcaaaccctacaacagcagcggcctgggcggcccctccatcaaggacaagtatgtgacggcgctctacttcaccttcagcagcctcaccagtgtgggcttcggcaacgtctctcccaacaccaactcagagaagatcttctccatctgcgtcatgctcattggctccctcatgtatgctagcatcttcggcaacgtgtcggccatcatccagcggctgtactcgggcacagcccgctaccacacacagatgctgcgggtgcgggagttcatccgcttccaccagatccccaatcccctgcgccagcgcctcgaggagtacttccagcacgcctggtcctacaccaacggcatcgacatgaacgcggtgctgaagggcttccctgagtgcctgcaggctgacatctgcctgcacctgaaccgctcactgctgcagcactgcaaacccttccgaggggccaccaagggctgccttcgggccctggccatgaagttcaagaccacacatgcaccgccaggggacacactggtgcatgctggggacctgctcaccgccctgtacttcatctcccggggctccatcgagatcctgcggggcgacgtcgtcgtggccatcctggggaagaatgacatctttggggagcctctgaacctgtatgcaaggcctggcaagtcgaacggggatgtgcgggccctcacctactgtgacctacacaagatccatcgggacgacctgctggaggtgctggacatgtaccctgagttctccgaccacttctggtccagcctggagatcaccttcaacctgcgagataccaacatgatcccgggctcccccggcagtacggagttagagggtggcttcagtcggcaacgcaagcgcaagttgtccttccgcaggcgcacggacaaggacacggagcagccaggggaggtgtcggccttggggccgggccgggcgggggcagggccgagtagccggggccggccgggggggccgtggggggagagcccgtccagtggcccctccagccctgagagcagtgaggatgagggcccaggccgcagctccagccccctccgcctggtgcccttctccagccccaggccccccggagagccgccgggtggggagcccctgatggaggactgcgagaagagcagcgacacttgcaaccccctgtcaggcgccttctcaggagtgtccaacattttcagcttctggggggacagtcggggccgccagtaccaggagctccctcgatgccccgcccccacccccagcctcctcaacatccccctctccagcccgggtcggcggccccggggcgacgtggagagcaggctggatgccctccagcgccagctcaacaggctggagacccggctgagtgcagacatggccactgtcctgcagctgctacagaggcagatgacgctggtcccgcccgcctacagtgctgtgaccaccccggggcctggccccacttccacatccccgctgttgcccgtcagccccctccccaccctcaccttggactcgctttctcaggtttcccagttcatggcgtgtgaggagctgcccccgggggccccagagcttccccaagaaggccccacacgacgcctctccctaccgggccagctgggggccctcacctcccagcccctgcacagacacggctcggacccgggcagttagtggggctgcccagtgtggacacgtggctcacccagggatcaaggcgctgctgggccgctccccttggaggccctgctcaggaggccctgaccgtggaaggggagaggaactcgaaagcacagctcctcccccagcccttgggaccatcttctcctgcagtcccctgggccccagtgagaggggcaggggcagggccggcagtaggtggggcctgtggtccccccactgccctgagggcattagctggtctaactgcccggaggcacccggccctgggccttaggcacctcaaggacttttctgctatttactgctcttattgttaaggataataattaaggatcatatgaataattaatgaagatgctgatgactatgaataataaataattatcctgaggaga

SEQ ID NO: 490 - DNA, 3884 bp, Homo sapiens
  source 1..3884: mol_type = genomic DNA
  misc_feature 1..3884: note = cDNA of KCNH2 gene SNP c.232G>C (p.Ala78Pro)
atgccggtgcggaggggccacgtcgcgccgcagaacaccttcctggacaccatcatccgcaagtttgagggccagagccgtaagttcatcatcgccaacgctcgggtggagaactgcgccgtcatctactgcaacgacggcttctgcgagctgtgcggctactcgcgggccgaggtgatgcagcgaccctgcacctgcgacttcctgcacgggccgcgcacgcagcgccgccctgccgcgcagatcgcgcaggcactgctgggcgccgaggagcgcaaagtggaaatcgccttctaccggaaagatgggagctgcttcctatgtctggtggatgtggtgcccgtgaagaacgaggatggggctgtcatcatgttcatcctcaatttcgaggtggtgatggagaaggacatggtggggtccccggctcatgacaccaaccaccggggcccccccaccagctggctggccccaggccgcgccaagaccttccgcctgaagctgcccgcgctgctggcgctgacggcccgggagtcgtcggtgcggtcgggcggcgcgggcggcgcgggcgccccgggggccgtggtggtggacgtggacctgacgcccgcggcacccagcagcgagtcgctggccctggacgaagtgacagccatggacaaccacgtggcagggctcgggcccgcggaggagcggcgtgcgctggtgggtcccggctctccgccccgcagcgcgcccggccagctcccatcgccccgggcgcacagcctcaaccccgacgcctcgggctccagctgcagcctggcccggacgcgctcccgagaaagctgcgccagcgtgcgccgcgcctcgtcggccgacgacatcgaggccatgcgcgccggggtgctgcccccgccaccgcgccacgccagcaccggggccatgcacccactgcgcagcggcttgctcaactccacctcggactccgacctcgtgcgctaccgcaccattagcaagattccccaaatcaccctcaactttgtggacctcaagggcgaccccttcttggcttcgcccaccagtgaccgtgagatcatagcacctaagataaaggagcgaacccacaatgtcactgagaaggtcacccaggtcctgtccctgggcgccgacgtgctgcctgagtacaagctgcaggcaccgcgcatccaccgctggaccatcctgcattacagccccttcaaggccgtgtgggactggctcatcctgctgctggtcatctacacggctgtcttcacaccctactcggctgccttcctgctgaaggagacggaagaaggcccgcctgctaccgagtgtggctacgcctgccagccgctggctgtggtggacctcatcgtggacatcatgttcattgtggacatcctcatcaacttccgcaccacctacgtcaatgccaacgaggaggtggtcagccaccccggccgcatcgccgtccactacttcaagggctggttcctcatcgacatggtggccgccatccccttcgacctgctcatcttcggctctggctctgaggagctgatcgggctgctgaagactgcgcggctgctgcggctggtgcgcgtggcgcggaagctggatcgctactcagagtacggcgcggccgtgctgttcttgctcatgtgcacctttgcgctcatcgcgcactggctagcctgcatctggtacgccatcggcaacatggagcagccacacatggactcacgcatcggctggctgcacaacctgggcgaccagataggcaaaccctacaacagcagcggcctgggcggcccctccatcaaggacaagtatgtgacggcgctctacttcaccttcagcagcctcaccagtgtgggcttcggcaacgtctctcccaacaccaactcagagaagatcttctccatctgcgtcatgctcattggctccctcatgtatgctagcatcttcggcaacgtgtcggccatcatccagcggctgtactcgggcacagcccgctaccacacacagatgctgcgggtgcgggagttcatccgcttccaccagatccccaatcccctgcgccagcgcctcgaggagtacttccagcacgcctggtcctacaccaacggcatcgacatgaacgcggtgctgaagggcttccctgagtgcctgcaggctgacatctgcctgcacctgaaccgctcactgctgcagcactgcaaacccttccgaggggccaccaagggctgccttcgggccctggccatgaagttcaagaccacacatgcaccgccaggggacacactggtgcatgctggggacctgctcaccgccctgtacttcatctcccggggctccatcgagatcctgcggggcgacgtcgtcgtggccatcctggggaagaatgacatctttggggagcctctgaacctgtatgcaaggcctggcaagtcgaacggggatgtgcgggccctcacctactgtgacctacacaagatccatcgggacgacctgctggaggtgctggacatgtaccctgagttctccgaccacttctggtccagcctggagatcaccttcaacctgcgagataccaacatgatcccgggctcccccggcagtacggagttagagggtggcttcagtcggcaacgcaagcgcaagttgtccttccgcaggcgcacggacaaggacacggagcagccaggggaggtgtcggccttggggccgggccgggcgggggcagggccgagtagccggggccggccgggggggccgtggggggagagcccgtccagtggcccctccagccctgagagcagtgaggatgagggcccaggccgcagctccagccccctccgcctggtgcccttctccagccccaggccccccggagagccgccgggtggggagcccctgatggaggactgcgagaagagcagcgacacttgcaaccccctgtcaggcgccttctcaggagtgtccaacattttcagcttctggggggacagtcggggccgccagtaccaggagctccctcgatgccccgcccccacccccagcctcctcaacatccccctctccagcccgggtcggcggccccggggcgacgtggagagcaggctggatgccctccagcgccagctcaacaggctggagacccggctgagtgcagacatggccactgtcctgcagctgctacagaggcagatgacgctggtcccgcccgcctacagtgctgtgaccaccccggggcctggccccacttccacatccccgctgttgcccgtcagccccctccccaccctcaccttggactcgctttctcaggtttcccagttcatggcgtgtgaggagctgcccccgggggccccagagcttccccaagaaggccccacacgacgcctctccctaccgggccagctgggggccctcacctcccagcccctgcacagacacggctcggacccgggcagttagtggggctgcccagtgtggacacgtggctcacccagggatcaaggcgctgctgggccgctccccttggaggccctgctcaggaggccctgaccgtggaaggggagaggaactcgaaagcacagctcctcccccagcccttgggaccatcttctcctgcagtcccctgggccccagtgagaggggcaggggcagggccggcagtaggtggggcctgtggtccccccactgccctgagggcattagctggtctaactgcccggaggcacccggccctgggccttaggcacctcaaggacttttctgctatttactgctcttattgttaaggataataattaaggatcatatgaataattaatgaagatgctgatgactatgaataataaataattatcctgaggaga

SEQ ID NO: 491 - DNA, 3884 bp, Homo sapiens
  source 1..3884: mol_type = genomic DNA
  misc_feature 1..3884: note = cDNA of KCNH2 gene SNP c.2332G>A (p.Ala778Thr)
atgccggtgcggaggggccacgtcgcgccgcagaacaccttcctggacaccatcatccgcaagtttgagggccagagccgtaagttcatcatcgccaacgctcgggtggagaactgcgccgtcatctactgcaacgacggcttctgcgagctgtgcggctactcgcgggccgaggtgatgcagcgaccctgcacctgcgacttcctgcacgggccgcgcacgcagcgccgcgctgccgcgcagatcgcgcaggcactgctgggcgccgaggagcgcaaagtggaaatcgccttctaccggaaagatgggagctgcttcctatgtctggtggatgtggtgcccgtgaagaacgaggatggggctgtcatcatgttcatcctcaatttcgaggtggtgatggagaaggacatggtggggtccccggctcatgacaccaaccaccggggcccccccaccagctggctggccccaggccgcgccaagaccttccgcctgaagctgcccgcgctgctggcgctgacggcccgggagtcgtcggtgcggtcgggcggcgcgggcggcgcgggcgccccgggggccgtggtggtggacgtggacctgacgcccgcggcacccagcagcgagtcgctggccctggacgaagtgacagccatggacaaccacgtggcagggctcgggcccgcggaggagcggcgtgcgctggtgggtcccggctctccgccccgcagcgcgcccggccagctcccatcgccccgggcgcacagcctcaaccccgacgcctcgggctccagctgcagcctggcccggacgcgctcccgagaaagctgcgccagcgtgcgccgcgcctcgtcggccgacgacatcgaggccatgcgcgccggggtgctgcccccgccaccgcgccacgccagcaccggggccatgcacccactgcgcagcggcttgctcaactccacctcggactccgacctcgtgcgctaccgcaccattagcaagattccccaaatcaccctcaactttgtggacctcaagggcgaccccttcttggcttcgcccaccagtgaccgtgagatcatagcacctaagataaaggagcgaacccacaatgtcactgagaaggtcacccaggtcctgtccctgggcgccgacgtgctgcctgagtacaagctgcaggcaccgcgcatccaccgctggaccatcctgcattacagccccttcaaggccgtgtgggactggctcatcctgctgctggtcatctacacggctgtcttcacaccctactcggctgccttcctgctgaaggagacggaagaaggcccgcctgctaccgagtgtggctacgcctgccagccgctggctgtggtggacctcatcgtggacatcatgttcattgtggacatcctcatcaacttccgcaccacctacgtcaatgccaacgaggaggtggtcagccaccccggccgcatcgccgtccactacttcaagggctggttcctcatcgacatggtggccgccatccccttcgacctgctcatcttcggctctggctctgaggagctgatcgggctgctgaagactgcgcggctgctgcggctggtgcgcgtggcgcggaagctggatcgctactcagagtacggcgcggccgtgctgttcttgctcatgtgcacctttgcgctcatcgcgcactggctagcctgcatctggtacgccatcggcaacatggagcagccacacatggactcacgcatcggctggctgcacaacctgggcgaccagataggcaaaccctacaacagcagcggcctgggcggcccctccatcaaggacaagtatgtgacggcgctctacttcaccttcagcagcctcaccagtgtgggcttcggcaacgtctctcccaacaccaactcagagaagatcttctccatctgcgtcatgctcattggctccctcatgtatgctagcatcttcggcaacgtgtcggccatcatccagcggctgtactcgggcacagcccgctaccacacacagatgctgcgggtgcgggagttcatccgcttccaccagatccccaatcccctgcgccagcgcctcgaggagtacttccagcacgcctggtcctacaccaacggcatcgacatgaacgcggtgctgaagggcttccctgagtgcctgcaggctgacatctgcctgcacctgaaccgctcactgctgcagcactgcaaacccttccgaggggccaccaagggctgccttcgggccctggccatgaagttcaagaccacacatgcaccgccaggggacacactggtgcatgctggggacctgctcaccaccctgtacttcatctcccggggctccatcgagatcctgcggggcgacgtcgtcgtggccatcctggggaagaatgacatctttggggagcctctgaacctgtatgcaaggcctggcaagtcgaacggggatgtgcgggccctcacctactgtgacctacacaagatccatcgggacgacctgctggaggtgctggacatgtaccctgagttctccgaccacttctggtccagcctggagatcaccttcaacctgcgagataccaacatgatcccgggctcccccggcagtacggagttagagggtggcttcagtcggcaacgcaagcgcaagttgtccttccgcaggcgcacggacaaggacacggagcagccaggggaggtgtcggccttggggccgggccgggcgggggcagggccgagtagccggggccggccgggggggccgtggggggagagcccgtccagtggcccctccagccctgagagcagtgaggatgagggcccaggccgcagctccagccccctccgcctggtgcccttctccagccccaggccccccggagagccgccgggtggggagcccctgatggaggactgcgagaagagcagcgacacttgcaaccccctgtcaggcgccttctcaggagtgtccaacattttcagcttctggggggacagtcggggccgccagtaccaggagctccctcgatgccccgcccccacccccagcctcctcaacatccccctctccagcccgggtcggcggccccggggcgacgtggagagcaggctggatgccctccagcgccagctcaacaggctggagacccggctgagtgcagacatggccactgtcctgcagctgctacagaggcagatgacgctggtcccgcccgcctacagtgctgtgaccaccccggggcctggccccacttccacatccccgctgttgcccgtcagccccctccccaccctcaccttggactcgctttctcaggtttcccagttcatggcgtgtgaggagctgcccccgggggccccagagcttccccaagaaggccccacacgacgcctctccctaccgggccagctgggggccctcacctcccagcccctgcacagacacggctcggacccgggcagttagtggggctgcccagtgtggacacgtggctcacccagggatcaaggcgctgctgggccgctccccttggaggccctgctcaggaggccctgaccgtggaaggggagaggaactcgaaagcacagctcctcccccagcccttgggaccatcttctcctgcagtcccctgggccccagtgagaggggcaggggcagggccggcagtaggtggggcctgtggtccccccactgccctgagggcattagctggtctaactgcccggaggcacccggccctgggccttaggcacctcaaggacttttctgctatttactgctcttattgttaaggataataattaaggatcatatgaataattaatgaagatgctgatgactatgaataataaataattatcctgaggaga

SEQ ID NO: 492 - DNA, 3884 bp, Homo sapiens
  source 1..3884: mol_type = genomic DNA
  misc_feature 1..3884: note = cDNA of KCNH2 gene SNP c.233C>T (p.Ala78Val)
atgccggtgcggaggggccacgtcgcgccgcagaacaccttcctggacaccatcatccgcaagtttgagggccagagccgtaagttcatcatcgccaacgctcgggtggagaactgcgccgtcatctactgcaacgacggcttctgcgagctgtgcggctactcgcgggccgaggtgatgcagcgaccctgcacctgcgacttcctgcacgggccgcgcacgcagcgccgcgttgccgcgcagatcgcgcaggcactgctgggcgccgaggagcgcaaagtggaaatcgccttctaccggaaagatgggagctgcttcctatgtctggtggatgtggtgcccgtgaagaacgaggatggggctgtcatcatgttcatcctcaatttcgaggtggtgatggagaaggacatggtggggtccccggctcatgacaccaaccaccggggcccccccaccagctggctggccccaggccgcgccaagaccttccgcctgaagctgcccgcgctgctggcgctgacggcccgggagtcgtcggtgcggtcgggcggcgcgggcggcgcgggcgccccgggggccgtggtggtggacgtggacctgacgcccgcggcacccagcagcgagtcgctggccctggacgaagtgacagccatggacaaccacgtggcagggctcgggcccgcggaggagcggcgtgcgctggtgggtcccggctctccgccccgcagcgcgcccggccagctcccatcgccccgggcgcacagcctcaaccccgacgcctcgggctccagctgcagcctggcccggacgcgctcccgagaaagctgcgccagcgtgcgccgcgcctcgtcggccgacgacatcgaggccatgcgcgccggggtgctgcccccgccaccgcgccacgccagcaccggggccatgcacccactgcgcagcggcttgctcaactccacctcggactccgacctcgtgcgctaccgcaccattagcaagattccccaaatcaccctcaactttgtggacctcaagggcgaccccttcttggcttcgcccaccagtgaccgtgagatcatagcacctaagataaaggagcgaacccacaatgtcactgagaaggtcacccaggtcctgtccctgggcgccgacgtgctgcctgagtacaagctgcaggcaccgcgcatccaccgctggaccatcctgcattacagccccttcaaggccgtgtgggactggctcatcctgctgctggtcatctacacggctgtcttcacaccctactcggctgccttcctgctgaaggagacggaagaaggcccgcctgctaccgagtgtggctacgcctgccagccgctggctgtggtggacctcatcgtggacatcatgttcattgtggacatcctcatcaacttccgcaccacctacgtcaatgccaacgaggaggtggtcagccaccccggccgcatcgccgtccactacttcaagggctggttcctcatcgacatggtggccgccatccccttcgacctgctcatcttcggctctggctctgaggagctgatcgggctgctgaagactgcgcggctgctgcggctggtgcgcgtggcgcggaagctggatcgctactcagagtacggcgcggccgtgctgttcttgctcatgtgcacctttgcgctcatcgcgcactggctagcctgcatctggtacgccatcggcaacatggagcagccacacatggactcacgcatcggctggctgcacaacctgggcgaccagataggcaaaccctacaacagcagcggcctgggcggcccctccatcaaggacaagtatgtgacggcgctctacttcaccttcagcagcctcaccagtgtgggcttcggcaacgtctctcccaacaccaactcagagaagatcttctccatctgcgtcatgctcattggctccctcatgtatgctagcatcttcggcaacgtgtcggccatcatccagcggctgtactcgggcacagcccgctaccacacacagatgctgcgggtgcgggagttcatccgcttccaccagatccccaatcccctgcgccagcgcctcgaggagtacttccagcacgcctggtcctacaccaacggcatcgacatgaacgcggtgctgaagggcttccctgagtgcctgcaggctgacatctgcctgcacctgaaccgctcactgctgcagcactgcaaacccttccgaggggccaccaagggctgccttcgggccctggccatgaagttcaagaccacacatgcaccgccaggggacacactggtgcatgctggggacctgctcaccgccctgtacttcatctcccggggctccatcgagatcctgcggggcgacgtcgtcgtggccatcctggggaagaatgacatctttggggagcctctgaacctgtatgcaaggcctggcaagtcgaacggggatgtgcgggccctcacctactgtgacctacacaagatccatcgggacgacctgctggaggtgctggacatgtaccctgagttctccgaccacttctggtccagcctggagatcaccttcaacctgcgagataccaacatgatcccgggctcccccggcagtacggagttagagggtggcttcagtcggcaacgcaagcgcaagttgtccttccgcaggcgcacggacaaggacacggagcagccaggggaggtgtcggccttggggccgggccgggcgggggcagggccgagtagccggggccggccgggggggccgtggggggagagcccgtccagtggcccctccagccctgagagcagtgaggatgagggcccaggccgcagctccagccccctccgcctggtgcccttctccagccccaggccccccggagagccgccgggtggggagcccctgatggaggactgcgagaagagcagcgacacttgcaaccccctgtcaggcgccttctcaggagtgtccaacattttcagcttctggggggacagtcggggccgccagtaccaggagctccctcgatgccccgcccccacccccagcctcctcaacatccccctctccagcccgggtcggcggccccggggcgacgtggagagcaggctggatgccctccagcgccagctcaacaggctggagacccggctgagtgcagacatggccactgtcctgcagctgctacagaggcagatgacgctggtcccgcccgcctacagtgctgtgaccaccccggggcctggccccacttccacatccccgctgttgcccgtcagccccctccccaccctcaccttggactcgctttctcaggtttcccagttcatggcgtgtgaggagctgcccccgggggccccagagcttccccaagaaggccccacacgacgcctctccctaccgggccagctgggggccctcacctcccagcccctgcacagacacggctcggacccgggcagttagtggggctgcccagtgtggacacgtggctcacccagggatcaaggcgctgctgggccgctccccttggaggccctgctcaggaggccctgaccgtggaaggggagaggaactcgaaagcacagctcctcccccagcccttgggaccatcttctcctgcagtcccctgggccccagtgagaggggcaggggcagggccggcagtaggtggggcctgtggtccccccactgccctgagggcattagctggtctaactgcccggaggcacccggccctgggccttaggcacctcaaggacttttctgctatttactgctcttattgttaaggataataattaaggatcatatgaataattaatgaagatgctgatgactatgaataataaataattatcctgaggaga

SEQ ID NO: 493 - DNA, 3884 bp, Homo sapiens
  source 1..3884: mol_type = genomic DNA
  misc_feature 1..3884: note = cDNA of KCNH2 gene SNP c.2343C>G (p.Phe781Leu)
atgccggtgcggaggggccacgtcgcgccgcagaacaccttcctggacaccatcatccgcaagtttgagggccagagccgtaagttcatcatcgccaacgctcgggtggagaactgcgccgtcatctactgcaacgacggcttctgcgagctgtgcggctactcgcgggccgaggtgatgcagcgaccctgcacctgcgacttcctgcacgggccgcgcacgcagcgccgcgctgccgcgcagatcgcgcaggcactgctgggcgccgaggagcgcaaagtggaaatcgccttctaccggaaagatgggagctgcttcctatgtctggtggatgtggtgcccgtgaagaacgaggatggggctgtcatcatgttcatcctcaatttcgaggtggtgatggagaaggacatggtggggtccccggctcatgacaccaaccaccggggcccccccaccagctggctggccccaggccgcgccaagaccttccgcctgaagctgcccgcgctgctggcgctgacggcccgggagtcgtcggtgcggtcgggcggcgcgggcggcgcgggcgccccgggggccgtggtggtggacgtggacctgacgcccgcggcacccagcagcgagtcgctggccctggacgaagtgacagccatggacaaccacgtggcagggctcgggcccgcggaggagcggcgtgcgctggtgggtcccggctctccgccccgcagcgcgcccggccagctcccatcgccccgggcgcacagcctcaaccccgacgcctcgggctccagctgcagcctggcccggacgcgctcccgagaaagctgcgccagcgtgcgccgcgcctcgtcggccgacgacatcgaggccatgcgcgccggggtgctgcccccgccaccgcgccacgccagcaccggggccatgcacccactgcgcagcggcttgctcaactccacctcggactccgacctcgtgcgctaccgcaccattagcaagattccccaaatcaccctcaactttgtggacctcaagggcgaccccttcttggcttcgcccaccagtgaccgtgagatcatagcacctaagataaaggagcgaacccacaatgtcactgagaaggtcacccaggtcctgtccctgggcgccgacgtgctgcctgagtacaagctgcaggcaccgcgcatccaccgctggaccatcctgcattacagccccttcaaggccgtgtgggactggctcatcctgctgctggtcatctacacggctgtcttcacaccctactcggctgccttcctgctgaaggagacggaagaaggcccgcctgctaccgagtgtggctacgcctgccagccgctggctgtggtggacctcatcgtggacatcatgttcattgtggacatcctcatcaacttccgcaccacctacgtcaatgccaacgaggaggtggtcagccaccccggccgcatcgccgtccactacttcaagggctggttcctcatcgacatggtggccgccatccccttcgacctgctcatcttcggctctggctctgaggagctgatcgggctgctgaagactgcgcggctgctgcggctggtgcgcgtggcgcggaagctggatcgctactcagagtacggcgcggccgtgctgttcttgctcatgtgcacctttgcgctcatcgcgcactggctagcctgcatctggtacgccatcggcaacatggagcagccacacatggactcacgcatcggctggctgcacaacctgggcgaccagataggcaaaccctacaacagcagcggcctgggcggcccctccatcaaggacaagtatgtgacggcgctctacttcaccttcagcagcctcaccagtgtgggcttcggcaacgtctctcccaacaccaactcagagaagatcttctccatctgcgtcatgctcattggctccctcatgtatgctagcatcttcggcaacgtgtcggccatcatccagcggctgtactcgggcacagcccgctaccacacacagatgctgcgggtgcgggagttcatccgcttccaccagatccccaatcccctgcgccagcgcctcgaggagtacttccagcacgcctggtcctacaccaacggcatcgacatgaacgcggtgctgaagggcttccctgagtgcctgcaggctgacatctgcctgcacctgaaccgctcactgctgcagcactgcaaacccttccgaggggccaccaagggctgccttcgggccctggccatgaagttcaagaccacacatgcaccgccaggggacacactggtgcatgctggggacctgctcaccgccctgtacttgatctcccggggctccatcgagatcctgcggggcgacgtcgtcgtggccatcctggggaagaatgacatctttggggagcctctgaacctgtatgcaaggcctggcaagtcgaacggggatgtgcgggccctcacctactgtgacctacacaagatccatcgggacgacctgctggaggtgctggacatgtaccctgagttctccgaccacttctggtccagcctggagatcaccttcaacctgcgagataccaacatgatcccgggctcccccggcagtacggagttagagggtggcttcagtcggcaacgcaagcgcaagttgtccttccgcaggcgcacggacaaggacacggagcagccaggggaggtgtcggccttggggccgggccgggcgggggcagggccgagtagccggggccggccgggggggccgtggggggagagcccgtccagtggcccctccagccctgagagcagtgaggatgagggcccaggccgcagctccagccccctccgcctggtgcccttctccagccccaggccccccggagagccgccgggtggggagcccctgatggaggactgcgagaagagcagcgacacttgcaaccccctgtcaggcgccttctcaggagtgtccaacattttcagcttctggggggacagtcggggccgccagtaccaggagctccctcgatgccccgcccccacccccagcctcctcaacatccccctctccagcccgggtcggcggccccggggcgacgtggagagcaggctggatgccctccagcgccagctcaacaggctggagacccggctgagtgcagacatggccactgtcctgcagctgctacagaggcagatgacgctggtcccgcccgcctacagtgctgtgaccaccccggggcctggccccacttccacatccccgctgttgcccgtcagccccctccccaccctcaccttggactcgctttctcaggtttcccagttcatggcgtgtgaggagctgcccccgggggccccagagcttccccaagaaggccccacacgacgcctctccctaccgggccagctgggggccctcacctcccagcccctgcacagacacggctcggacccgggcagttagtggggctgcccagtgtggacacgtggctcacccagggatcaaggcgctgctgggccgctccccttggaggccctgctcaggaggccctgaccgtggaaggggagaggaactcgaaagcacagctcctcccccagcccttgggaccatcttctcctgcagtcccctgggccccagtgagaggggcaggggcagggccggcagtaggtggggcctgtggtccccccactgccctgagggcattagctggtctaactgcccggaggcacccggccctgggccttaggcacctcaaggacttttctgctatttactgctcttattgttaaggataataattaaggatcatatgaataattaatgaagatgctgatgactatgaataataaataattatcctgaggaga

SEQ ID NO: 494 - DNA, 3884 bp, Homo sapiens
  source 1..3884: mol_type = genomic DNA
  misc_feature 1..3884: note = cDNA of KCNH2 gene SNP c.2345T>C (p.Ile782Thr)
atgccggtgcggaggggccacgtcgcgccgcagaacaccttcctggacaccatcatccgcaagtttgagggccagagccgtaagttcatcatcgccaacgctcgggtggagaactgcgccgtcatctactgcaacgacggcttctgcgagctgtgcggctactcgcgggccgaggtgatgcagcgaccctgcacctgcgacttcctgcacgggccgcgcacgcagcgccgcgctgccgcgcagatcgcgcaggcactgctgggcgccgaggagcgcaaagtggaaatcgccttctaccggaaagatgggagctgcttcctatgtctggtggatgtggtgcccgtgaagaacgaggatggggctgtcatcatgttcatcctcaatttcgaggtggtgatggagaaggacatggtggggtccccggctcatgacaccaaccaccggggcccccccaccagctggctggccccaggccgcgccaagaccttccgcctgaagctgcccgcgctgctggcgctgacggcccgggagtcgtcggtgcggtcgggcggcgcgggcggcgcgggcgccccgggggccgtggtggtggacgtggacctgacgcccgcggcacccagcagcgagtcgctggccctggacgaagtgacagccatggacaaccacgtggcagggctcgggcccgcggaggagcggcgtgcgctggtgggtcccggctctccgccccgcagcgcgcccggccagctcccatcgccccgggcgcacagcctcaaccccgacgcctcgggctccagctgcagcctggcccggacgcgctcccgagaaagctgcgccagcgtgcgccgcgcctcgtcggccgacgacatcgaggccatgcgcgccggggtgctgcccccgccaccgcgccacgccagcaccggggccatgcacccactgcgcagcggcttgctcaactccacctcggactccgacctcgtgcgctaccgcaccattagcaagattccccaaatcaccctcaactttgtggacctcaagggcgaccccttcttggcttcgcccaccagtgaccgtgagatcatagcacctaagataaaggagcgaacccacaatgtcactgagaaggtcacccaggtcctgtccctgggcgccgacgtgctgcctgagtacaagctgcaggcaccgcgcatccaccgctggaccatcctgcattacagccccttcaaggccgtgtgggactggctcatcctgctgctggtcatctacacggctgtcttcacaccctactcggctgccttcctgctgaaggagacggaagaaggcccgcctgctaccgagtgtggctacgcctgccagccgctggctgtggtggacctcatcgtggacatcatgttcattgtggacatcctcatcaacttccgcaccacctacgtcaatgccaacgaggaggtggtcagccaccccggccgcatcgccgtccactacttcaagggctggttcctcatcgacatggtggccgccatccccttcgacctgctcatcttcggctctggctctgaggagctgatcgggctgctgaagactgcgcggctgctgcggctggtgcgcgtggcgcggaagctggatcgctactcagagtacggcgcggccgtgctgttcttgctcatgtgcacctttgcgctcatcgcgcactggctagcctgcatctggtacgccatcggcaacatggagcagccacacatggactcacgcatcggctggctgcacaacctgggcgaccagataggcaaaccctacaacagcagcggcctgggcggcccctccatcaaggacaagtatgtgacggcgctctacttcaccttcagcagcctcaccagtgtgggcttcggcaacgtctctcccaacaccaactcagagaagatcttctccatctgcgtcatgctcattggctccctcatgtatgctagcatcttcggcaacgtgtcggccatcatccagcggctgtactcgggcacagcccgctaccacacacagatgctgcgggtgcgggagttcatccgcttccaccagatccccaatcccctgcgccagcgcctcgaggagtacttccagcacgcctggtcctacaccaacggcatcgacatgaacgcggtgctgaagggcttccctgagtgcctgcaggctgacatctgcctgcacctgaaccgctcactgctgcagcactgcaaacccttccgaggggccaccaagggctgccttcgggccctggccatgaagttcaagaccacacatgcaccgccaggggacacactggtgcatgctggggacctgctcaccgccctgtacttcacctcccggggctccatcgagatcctgcggggcgacgtcgtcgtggccatcctggggaagaatgacatctttggggagcctctgaacctgtatgcaaggcctggcaagtcgaacggggatgtgcgggccctcacctactgtgacctacacaagatccatcgggacgacctgctggaggtgctggacatgtaccctgagttctccgaccacttctggtccagcctggagatcaccttcaacctgcgagataccaacatgatcccgggctcccccggcagtacggagttagagggtggcttcagtcggcaacgcaagcgcaagttgtccttccgcaggcgcacggacaaggacacggagcagccaggggaggtgtcggccttggggccgggccgggcgggggcagggccgagtagccggggccggccgggggggccgtggggggagagcccgtccagtggcccctccagccctgagagcagtgaggatgagggcccaggccgcagctccagccccctccgcctggtgcccttctccagccccaggccccccggagagccgccgggtggggagcccctgatggaggactgcgagaagagcagcgacacttgcaaccccctgtcaggcgccttctcaggagtgtccaacattttcagcttctggggggacagtcggggccgccagtaccaggagctccctcgatgccccgcccccacccccagcctcctcaacatccccctctccagcccgggtcggcggccccggggcgacgtggagagcaggctggatgccctccagcgccagctcaacaggctggagacccggctgagtgcagacatggccactgtcctgcagctgctacagaggcagatgacgctggtcccgcccgcctacagtgctgtgaccaccccggggcctggccccacttccacatccccgctgttgcccgtcagccccctccccaccctcaccttggactcgctttctcaggtttcccagttcatggcgtgtgaggagctgcccccgggggccccagagcttccccaagaaggccccacacgacgcctctccctaccgggccagctgggggccctcacctcccagcccctgcacagacacggctcggacccgggcagttagtggggctgcccagtgtggacacgtggctcacccagggatcaaggcgctgctgggccgctccccttggaggccctgctcaggaggccctgaccgtggaaggggagaggaactcgaaagcacagctcctcccccagcccttgggaccatcttctcctgcagtcccctgggccccagtgagaggggcaggggcagggccggcagtaggtggggcctgtggtccccccactgccctgagggcattagctggtctaactgcccggaggcacccggccctgggccttaggcacctcaaggacttttctgctatttactgctcttattgttaaggataataattaaggatcatatgaataattaatgaagatgctgatgactatgaataataaataattatcctgaggaga

SEQ ID NO: 495 - DNA, 3884 bp, Homo sapiens
  source 1..3884: mol_type = genomic DNA
  misc_feature 1..3884: note = cDNA of KCNH2 gene SNP c.2350C>T (p.Arg784Trp)
atgccggtgcggaggggccacgtcgcgccgcagaacaccttcctggacaccatcatccgcaagtttgagggccagagccgtaagttcatcatcgccaacgctcgggtggagaactgcgccgtcatctactgcaacgacggcttctgcgagctgtgcggctactcgcgggccgaggtgatgcagcgaccctgcacctgcgacttcctgcacgggccgcgcacgcagcgccgcgctgccgcgcagatcgcgcaggcactgctgggcgccgaggagcgcaaagtggaaatcgccttctaccggaaagatgggagctgcttcctatgtctggtggatgtggtgcccgtgaagaacgaggatggggctgtcatcatgttcatcctcaatttcgaggtggtgatggagaaggacatggtggggtccccggctcatgacaccaaccaccggggcccccccaccagctggctggccccaggccgcgccaagaccttccgcctgaagctgcccgcgctgctggcgctgacggcccgggagtcgtcggtgcggtcgggcggcgcgggcggcgcgggcgccccgggggccgtggtggtggacgtggacctgacgcccgcggcacccagcagcgagtcgctggccctggacgaagtgacagccatggacaaccacgtggcagggctcgggcccgcggaggagcggcgtgcgctggtgggtcccggctctccgccccgcagcgcgcccggccagctcccatcgccccgggcgcacagcctcaaccccgacgcctcgggctccagctgcagcctggcccggacgcgctcccgagaaagctgcgccagcgtgcgccgcgcctcgtcggccgacgacatcgaggccatgcgcgccggggtgctgcccccgccaccgcgccacgccagcaccggggccatgcacccactgcgcagcggcttgctcaactccacctcggactccgacctcgtgcgctaccgcaccattagcaagattccccaaatcaccctcaactttgtggacctcaagggcgaccccttcttggcttcgcccaccagtgaccgtgagatcatagcacctaagataaaggagcgaacccacaatgtcactgagaaggtcacccaggtcctgtccctgggcgccgacgtgctgcctgagtacaagctgcaggcaccgcgcatccaccgctggaccatcctgcattacagccccttcaaggccgtgtgggactggctcatcctgctgctggtcatctacacggctgtcttcacaccctactcggctgccttcctgctgaaggagacggaagaaggcccgcctgctaccgagtgtggctacgcctgccagccgctggctgtggtggacctcatcgtggacatcatgttcattgtggacatcctcatcaacttccgcaccacctacgtcaatgccaacgaggaggtggtcagccaccccggccgcatcgccgtccactacttcaagggctggttcctcatcgacatggtggccgccatccccttcgacctgctcatcttcggctctggctctgaggagctgatcgggctgctgaagactgcgcggctgctgcggctggtgcgcgtggcgcggaagctggatcgctactcagagtacggcgcggccgtgctgttcttgctcatgtgcacctttgcgctcatcgcgcactggctagcctgcatctggtacgccatcggcaacatggagcagccacacatggactcacgcatcggctggctgcacaacctgggcgaccagataggcaaaccctacaacagcagcggcctgggcggcccctccatcaaggacaagtatgtgacggcgctctacttcaccttcagcagcctcaccagtgtgggcttcggcaacgtctctcccaacaccaactcagagaagatcttctccatctgcgtcatgctcattggctccctcatgtatgctagcatcttcggcaacgtgtcggccatcatccagcggctgtactcgggcacagcccgctaccacacacagatgctgcgggtgcgggagttcatccgcttccaccagatccccaatcccctgcgccagcgcctcgaggagtacttccagcacgcctggtcctacaccaacggcatcgacatgaacgcggtgctgaagggcttccctgagtgcctgcaggctgacatctgcctgcacctgaaccgctcactgctgcagcactgcaaacccttccgaggggccaccaagggctgccttcgggccctggccatgaagttcaagaccacacatgcaccgccaggggacacactggtgcatgctggggacctgctcaccgccctgtacttcatctcctggggctccatcgagatcctgcggggcgacgtcgtcgtggccatcctggggaagaatgacatctttggggagcctctgaacctgtatgcaaggcctggcaagtcgaacggggatgtgcgggccctcacctactgtgacctacacaagatccatcgggacgacctgctggaggtgctggacatgtaccctgagttctccgaccacttctggtccagcctggagatcaccttcaacctgcgagataccaacatgatcccgggctcccccggcagtacggagttagagggtggcttcagtcggcaacgcaagcgcaagttgtccttccgcaggcgcacggacaaggacacggagcagccaggggaggtgtcggccttggggccgggccgggcgggggcagggccgagtagccggggccggccgggggggccgtggggggagagcccgtccagtggcccctccagccctgagagcagtgaggatgagggcccaggccgcagctccagccccctccgcctggtgcccttctccagccccaggccccccggagagccgccgggtggggagcccctgatggaggactgcgagaagagcagcgacacttgcaaccccctgtcaggcgccttctcaggagtgtccaacattttcagcttctggggggacagtcggggccgccagtaccaggagctccctcgatgccccgcccccacccccagcctcctcaacatccccctctccagcccgggtcggcggccccggggcgacgtggagagcaggctggatgccctccagcgccagctcaacaggctggagacccggctgagtgcagacatggccactgtcctgcagctgctacagaggcagatgacgctggtcccgcccgcctacagtgctgtgaccaccccggggcctggccccacttccacatccccgctgttgcccgtcagccccctccccaccctcaccttggactcgctttctcaggtttcccagttcatggcgtgtgaggagctgcccccgggggccccagagcttccccaagaaggccccacacgacgcctctccctaccgggccagctgggggccctcacctcccagcccctgcacagacacggctcggacccgggcagttagtggggctgcccagtgtggacacgtggctcacccagggatcaaggcgctgctgggccgctccccttggaggccctgctcaggaggccctgaccgtggaaggggagaggaactcgaaagcacagctcctcccccagcccttgggaccatcttctcctgcagtcccctgggccccagtgagaggggcaggggcagggccggcagtaggtggggcctgtggtccccccactgccctgagggcattagctggtctaactgcccggaggcacccggccctgggccttaggcacctcaaggacttttctgctatttactgctcttattgttaaggataataattaaggatcatatgaataattaatgaagatgctgatgactatgaataataaataattatcctgaggaga

SEQ ID NO: 496 - DNA, 3884 bp, Homo sapiens
  source 1..3884: mol_type = genomic DNA
  misc_feature 1..3884: note = cDNA of KCNH2 gene SNP c.2354G>C (p.Gly785Ala)
atgccggtgcggaggggccacgtcgcgccgcagaacaccttcctggacaccatcatccgcaagtttgagggccagagccgtaagttcatcatcgccaacgctcgggtggagaactgcgccgtcatctactgcaacgacggcttctgcgagctgtgcggctactcgcgggccgaggtgatgcagcgaccctgcacctgcgacttcctgcacgggccgcgcacgcagcgccgcgctgccgcgcagatcgcgcaggcactgctgggcgccgaggagcgcaaagtggaaatcgccttctaccggaaagatgggagctgcttcctatgtctggtggatgtggtgcccgtgaagaacgaggatggggctgtcatcatgttcatcctcaatttcgaggtggtgatggagaaggacatggtggggtccccggctcatgacaccaaccaccggggcccccccaccagctggctggccccaggccgcgccaagaccttccgcctgaagctgcccgcgctgctggcgctgacggcccgggagtcgtcggtgcggtcgggcggcgcgggcggcgcgggcgccccgggggccgtggtggtggacgtggacctgacgcccgcggcacccagcagcgagtcgctggccctggacgaagtgacagccatggacaaccacgtggcagggctcgggcccgcggaggagcggcgtgcgctggtgggtcccggctctccgccccgcagcgcgcccggccagctcccatcgccccgggcgcacagcctcaaccccgacgcctcgggctccagctgcagcctggcccggacgcgctcccgagaaagctgcgccagcgtgcgccgcgcctcgtcggccgacgacatcgaggccatgcgcgccggggtgctgcccccgccaccgcgccacgccagcaccggggccatgcacccactgcgcagcggcttgctcaactccacctcggactccgacctcgtgcgctaccgcaccattagcaagattccccaaatcaccctcaactttgtggacctcaagggcgaccccttcttggcttcgcccaccagtgaccgtgagatcatagcacctaagataaaggagcgaacccacaatgtcactgagaaggtcacccaggtcctgtccctgggcgccgacgtgctgcctgagtacaagctgcaggcaccgcgcatccaccgctggaccatcctgcattacagccccttcaaggccgtgtgggactggctcatcctgctgctggtcatctacacggctgtcttcacaccctactcggctgccttcctgctgaaggagacggaagaaggcccgcctgctaccgagtgtggctacgcctgccagccgctggctgtggtggacctcatcgtggacatcatgttcattgtggacatcctcatcaacttccgcaccacctacgtcaatgccaacgaggaggtggtcagccaccccggccgcatcgccgtccactacttcaagggctggttcctcatcgacatggtggccgccatccccttcgacctgctcatcttcggctctggctctgaggagctgatcgggctgctgaagactgcgcggctgctgcggctggtgcgcgtggcgcggaagctggatcgctactcagagtacggcgcggccgtgctgttcttgctcatgtgcacctttgcgctcatcgcgcactggctagcctgcatctggtacgccatcggcaacatggagcagccacacatggactcacgcatcggctggctgcacaacctgggcgaccagataggcaaaccctacaacagcagcggcctgggcggcccctccatcaaggacaagtatgtgacggcgctctacttcaccttcagcagcctcaccagtgtgggcttcggcaacgtctctcccaacaccaactcagagaagatcttctccatctgcgtcatgctcattggctccctcatgtatgctagcatcttcggcaacgtgtcggccatcatccagcggctgtactcgggcacagcccgctaccacacacagatgctgcgggtgcgggagttcatccgcttccaccagatccccaatcccctgcgccagcgcctcgaggagtacttccagcacgcctggtcctacaccaacggcatcgacatgaacgcggtgctgaagggcttccctgagtgcctgcaggctgacatctgcctgcacctgaaccgctcactgctgcagcactgcaaacccttccgaggggccaccaagggctgccttcgggccctggccatgaagttcaagaccacacatgcaccgccaggggacacactggtgcatgctggggacctgctcaccgccctgtacttcatctcccgggcctccatcgagatcctgcggggcgacgtcgtcgtggccatcctggggaagaatgacatctttggggagcctctgaacctgtatgcaaggcctggcaagtcgaacggggatgtgcgggccctcacctactgtgacctacacaagatccatcgggacgacctgctggaggtgctggacatgtaccctgagttctccgaccacttctggtccagcctggagatcaccttcaacctgcgagataccaacatgatcccgggctcccccggcagtacggagttagagggtggcttcagtcggcaacgcaagcgcaagttgtccttccgcaggcgcacggacaaggacacggagcagccaggggaggtgtcggccttggggccgggccgggcgggggcagggccgagtagccggggccggccgggggggccgtggggggagagcccgtccagtggcccctccagccctgagagcagtgaggatgagggcccaggccgcagctccagccccctccgcctggtgcccttctccagccccaggccccccggagagccgccgggtggggagcccctgatggaggactgcgagaagagcagcgacacttgcaaccccctgtcaggcgccttctcaggagtgtccaacattttcagcttctggggggacagtcggggccgccagtaccaggagctccctcgatgccccgcccccacccccagcctcctcaacatccccctctccagcccgggtcggcggccccggggcgacgtggagagcaggctggatgccctccagcgccagctcaacaggctggagacccggctgagtgcagacatggccactgtcctgcagctgctacagaggcagatgacgctggtcccgcccgcctacagtgctgtgaccaccccggggcctggccccacttccacatccccgctgttgcccgtcagccccctccccaccctcaccttggactcgctttctcaggtttcccagttcatggcgtgtgaggagctgcccccgggggccccagagcttccccaagaaggccccacacgacgcctctccctaccgggccagctgggggccctcacctcccagcccctgcacagacacggctcggacccgggcagttagtggggctgcccagtgtggacacgtggctcacccagggatcaaggcgctgctgggccgctccccttggaggccctgctcaggaggccctgaccgtggaaggggagaggaactcgaaagcacagctcctcccccagcccttgggaccatcttctcctgcagtcccctgggccccagtgagaggggcaggggcagggccggcagtaggtggggcctgtggtccccccactgccctgagggcattagctggtctaactgcccggaggcacccggccctgggccttaggcacctcaaggacttttctgctatttactgctcttattgttaaggataataattaaggatcatatgaataattaatgaagatgctgatgactatgaataataaataattatcctgaggaga

SEQ ID NO: 497 - DNA, 3884 bp, Homo sapiens
  source 1..3884: mol_type = genomic DNA
  misc_feature 1..3884: note = cDNA of KCNH2 gene SNP c.2354G>T (p.Gly785Val)
atgccggtgcggaggggccacgtcgcgccgcagaacaccttcctggacaccatcatccgcaagtttgagggccagagccgtaagttcatcatcgccaacgctcgggtggagaactgcgccgtcatctactgcaacgacggcttctgcgagctgtgcggctactcgcgggccgaggtgatgcagcgaccctgcacctgcgacttcctgcacgggccgcgcacgcagcgccgcgctgccgcgcagatcgcgcaggcactgctgggcgccgaggagcgcaaagtggaaatcgccttctaccggaaagatgggagctgcttcctatgtctggtggatgtggtgcccgtgaagaacgaggatggggctgtcatcatgttcatcctcaatttcgaggtggtgatggagaaggacatggtggggtccccggctcatgacaccaaccaccggggcccccccaccagctggctggccccaggccgcgccaagaccttccgcctgaagctgcccgcgctgctggcgctgacggcccgggagtcgtcggtgcggtcgggcggcgcgggcggcgcgggcgccccgggggccgtggtggtggacgtggacctgacgcccgcggcacccagcagcgagtcgctggccctggacgaagtgacagccatggacaaccacgtggcagggctcgggcccgcggaggagcggcgtgcgctggtgggtcccggctctccgccccgcagcgcgcccggccagctcccatcgccccgggcgcacagcctcaaccccgacgcctcgggctccagctgcagcctggcccggacgcgctcccgagaaagctgcgccagcgtgcgccgcgcctcgtcggccgacgacatcgaggccatgcgcgccggggtgctgcccccgccaccgcgccacgccagcaccggggccatgcacccactgcgcagcggcttgctcaactccacctcggactccgacctcgtgcgctaccgcaccattagcaagattccccaaatcaccctcaactttgtggacctcaagggcgaccccttcttggcttcgcccaccagtgaccgtgagatcatagcacctaagataaaggagcgaacccacaatgtcactgagaaggtcacccaggtcctgtccctgggcgccgacgtgctgcctgagtacaagctgcaggcaccgcgcatccaccgctggaccatcctgcattacagccccttcaaggccgtgtgggactggctcatcctgctgctggtcatctacacggctgtcttcacaccctactcggctgccttcctgctgaaggagacggaagaaggcccgcctgctaccgagtgtggctacgcctgccagccgctggctgtggtggacctcatcgtggacatcatgttcattgtggacatcctcatcaacttccgcaccacctacgtcaatgccaacgaggaggtggtcagccaccccggccgcatcgccgtccactacttcaagggctggttcctcatcgacatggtggccgccatccccttcgacctgctcatcttcggctctggctctgaggagctgatcgggctgctgaagactgcgcggctgctgcggctggtgcgcgtggcgcggaagctggatcgctactcagagtacggcgcggccgtgctgttcttgctcatgtgcacctttgcgctcatcgcgcactggctagcctgcatctggtacgccatcggcaacatggagcagccacacatggactcacgcatcggctggctgcacaacctgggcgaccagataggcaaaccctacaacagcagcggcctgggcggcccctccatcaaggacaagtatgtgacggcgctctacttcaccttcagcagcctcaccagtgtgggcttcggcaacgtctctcccaacaccaactcagagaagatcttctccatctgcgtcatgctcattggctccctcatgtatgctagcatcttcggcaacgtgtcggccatcatccagcggctgtactcgggcacagcccgctaccacacacagatgctgcgggtgcgggagttcatccgcttccaccagatccccaatcccctgcgccagcgcctcgaggagtacttccagcacgcctggtcctacaccaacggcatcgacatgaacgcggtgctgaagggcttccctgagtgcctgcaggctgacatctgcctgcacctgaaccgctcactgctgcagcactgcaaacccttccgaggggccaccaagggctgccttcgggccctggccatgaagttcaagaccacacatgcaccgccaggggacacactggtgcatgctggggacctgctcaccgccctgtacttcatctcccgggtctccatcgagatcctgcggggcgacgtcgtcgtggccatcctggggaagaatgacatctttggggagcctctgaacctgtatgcaaggcctggcaagtcgaacggggatgtgcgggccctcacctactgtgacctacacaagatccatcgggacgacctgctggaggtgctggacatgtaccctgagttctccgaccacttctggtccagcctggagatcaccttcaacctgcgagataccaacatgatcccgggctcccccggcagtacggagttagagggtggcttcagtcggcaacgcaagcgcaagttgtccttccgcaggcgcacggacaaggacacggagcagccaggggaggtgtcggccttggggccgggccgggcgggggcagggccgagtagccggggccggccgggggggccgtggggggagagcccgtccagtggcccctccagccctgagagcagtgaggatgagggcccaggccgcagctccagccccctccgcctggtgcccttctccagccccaggccccccggagagccgccgggtggggagcccctgatggaggactgcgagaagagcagcgacacttgcaaccccctgtcaggcgccttctcaggagtgtccaacattttcagcttctggggggacagtcggggccgccagtaccaggagctccctcgatgccccgcccccacccccagcctcctcaacatccccctctccagcccgggtcggcggccccggggcgacgtggagagcaggctggatgccctccagcgccagctcaacaggctggagacccggctgagtgcagacatggccactgtcctgcagctgctacagaggcagatgacgctggtcccgcccgcctacagtgctgtgaccaccccggggcctggccccacttccacatccccgctgttgcccgtcagccccctccccaccctcaccttggactcgctttctcaggtttcccagttcatggcgtgtgaggagctgcccccgggggccccagagcttccccaagaaggccccacacgacgcctctccctaccgggccagctgggggccctcacctcccagcccctgcacagacacggctcggacccgggcagttagtggggctgcccagtgtggacacgtggctcacccagggatcaaggcgctgctgggccgctccccttggaggccctgctcaggaggccctgaccgtggaaggggagaggaactcgaaagcacagctcctcccccagcccttgggaccatcttctcctgcagtcccctgggccccagtgagaggggcaggggcagggccggcagtaggtggggcctgtggtccccccactgccctgagggcattagctggtctaactgcccggaggcacccggccctgggccttaggcacctcaaggacttttctgctatttactgctcttattgttaaggataataattaaggatcatatgaataattaatgaagatgctgatgactatgaataataaataattatcctgaggaga

SEQ ID NO: 498 - DNA, 3884 bp, Homo sapiens
  source 1..3884: mol_type = genomic DNA
  misc_feature 1..3884: note = cDNA of KCNH2 gene SNP c.235G>A (p.Ala79Thr)
atgccggtgcggaggggccacgtcgcgccgcagaacaccttcctggacaccatcatccgcaagtttgagggccagagccgtaagttcatcatcgccaacgctcgggtggagaactgcgccgtcatctactgcaacgacggcttctgcgagctgtgcggctactcgcgggccgaggtgatgcagcgaccctgcacctgcgacttcctgcacgggccgcgcacgcagcgccgcgctaccgcgcagatcgcgcaggcactgctgggcgccgaggagcgcaaagtggaaatcgccttctaccggaaagatgggagctgcttcctatgtctggtggatgtggtgcccgtgaagaacgaggatggggctgtcatcatgttcatcctcaatttcgaggtggtgatggagaaggacatggtggggtccccggctcatgacaccaaccaccggggcccccccaccagctggctggccccaggccgcgccaagaccttccgcctgaagctgcccgcgctgctggcgctgacggcccgggagtcgtcggtgcggtcgggcggcgcgggcggcgcgggcgccccgggggccgtggtggtggacgtggacctgacgcccgcggcacccagcagcgagtcgctggccctggacgaagtgacagccatggacaaccacgtggcagggctcgggcccgcggaggagcggcgtgcgctggtgggtcccggctctccgccccgcagcgcgcccggccagctcccatcgccccgggcgcacagcctcaaccccgacgcctcgggctccagctgcagcctggcccggacgcgctcccgagaaagctgcgccagcgtgcgccgcgcctcgtcggccgacgacatcgaggccatgcgcgccggggtgctgcccccgccaccgcgccacgccagcaccggggccatgcacccactgcgcagcggcttgctcaactccacctcggactccgacctcgtgcgctaccgcaccattagcaagattccccaaatcaccctcaactttgtggacctcaagggcgaccccttcttggcttcgcccaccagtgaccgtgagatcatagcacctaagataaaggagcgaacccacaatgtcactgagaaggtcacccaggtcctgtccctgggcgccgacgtgctgcctgagtacaagctgcaggcaccgcgcatccaccgctggaccatcctgcattacagccccttcaaggccgtgtgggactggctcatcctgctgctggtcatctacacggctgtcttcacaccctactcggctgccttcctgctgaaggagacggaagaaggcccgcctgctaccgagtgtggctacgcctgccagccgctggctgtggtggacctcatcgtggacatcatgttcattgtggacatcctcatcaacttccgcaccacctacgtcaatgccaacgaggaggtggtcagccaccccggccgcatcgccgtccactacttcaagggctggttcctcatcgacatggtggccgccatccccttcgacctgctcatcttcggctctggctctgaggagctgatcgggctgctgaagactgcgcggctgctgcggctggtgcgcgtggcgcggaagctggatcgctactcagagtacggcgcggccgtgctgttcttgctcatgtgcacctttgcgctcatcgcgcactggctagcctgcatctggtacgccatcggcaacatggagcagccacacatggactcacgcatcggctggctgcacaacctgggcgaccagataggcaaaccctacaacagcagcggcctgggcggcccctccatcaaggacaagtatgtgacggcgctctacttcaccttcagcagcctcaccagtgtgggcttcggcaacgtctctcccaacaccaactcagagaagatcttctccatctgcgtcatgctcattggctccctcatgtatgctagcatcttcggcaacgtgtcggccatcatccagcggctgtactcgggcacagcccgctaccacacacagatgctgcgggtgcgggagttcatccgcttccaccagatccccaatcccctgcgccagcgcctcgaggagtacttccagcacgcctggtcctacaccaacggcatcgacatgaacgcggtgctgaagggcttccctgagtgcctgcaggctgacatctgcctgcacctgaaccgctcactgctgcagcactgcaaacccttccgaggggccaccaagggctgccttcgggccctggccatgaagttcaagaccacacatgcaccgccaggggacacactggtgcatgctggggacctgctcaccgccctgtacttcatctcccggggctccatcgagatcctgcggggcgacgtcgtcgtggccatcctggggaagaatgacatctttggggagcctctgaacctgtatgcaaggcctggcaagtcgaacggggatgtgcgggccctcacctactgtgacctacacaagatccatcgggacgacctgctggaggtgctggacatgtaccctgagttctccgaccacttctggtccagcctggagatcaccttcaacctgcgagataccaacatgatcccgggctcccccggcagtacggagttagagggtggcttcagtcggcaacgcaagcgcaagttgtccttccgcaggcgcacggacaaggacacggagcagccaggggaggtgtcggccttggggccgggccgggcgggggcagggccgagtagccggggccggccgggggggccgtggggggagagcccgtccagtggcccctccagccctgagagcagtgaggatgagggcccaggccgcagctccagccccctccgcctggtgcccttctccagccccaggccccccggagagccgccgggtggggagcccctgatggaggactgcgagaagagcagcgacacttgcaaccccctgtcaggcgccttctcaggagtgtccaacattttcagcttctggggggacagtcggggccgccagtaccaggagctccctcgatgccccgcccccacccccagcctcctcaacatccccctctccagcccgggtcggcggccccggggcgacgtggagagcaggctggatgccctccagcgccagctcaacaggctggagacccggctgagtgcagacatggccactgtcctgcagctgctacagaggcagatgacgctggtcccgcccgcctacagtgctgtgaccaccccggggcctggccccacttccacatccccgctgttgcccgtcagccccctccccaccctcaccttggactcgctttctcaggtttcccagttcatggcgtgtgaggagctgcccccgggggccccagagcttccccaagaaggccccacacgacgcctctccctaccgggccagctgggggccctcacctcccagcccctgcacagacacggctcggacccgggcagttagtggggctgcccagtgtggacacgtggctcacccagggatcaaggcgctgctgggccgctccccttggaggccctgctcaggaggccctgaccgtggaaggggagaggaactcgaaagcacagctcctcccccagcccttgggaccatcttctcctgcagtcccctgggccccagtgagaggggcaggggcagggccggcagtaggtggggcctgtggtccccccactgccctgagggcattagctggtctaactgcccggaggcacccggccctgggccttaggcacctcaaggacttttctgctatttactgctcttattgttaaggataataattaaggatcatatgaataattaatgaagatgctgatgactatgaataataaataattatcctgaggaga

SEQ ID NO: 499 - DNA, 3884 bp, Homo sapiens
  source 1..3884: mol_type = genomic DNA
  misc_feature 1..3884: note = cDNA of KCNH2 gene SNP c.235G>C (p.Ala79Pro)
atgccggtgcggaggggccacgtcgcgccgcagaacaccttcctggacaccatcatccgcaagtttgagggccagagccgtaagttcatcatcgccaacgctcgggtggagaactgcgccgtcatctactgcaacgacggcttctgcgagctgtgcggctactcgcgggccgaggtgatgcagcgaccctgcacctgcgacttcctgcacgggccgcgcacgcagcgccgcgctcccgcgcagatcgcgcaggcactgctgggcgccgaggagcgcaaagtggaaatcgccttctaccggaaagatgggagctgcttcctatgtctggtggatgtggtgcccgtgaagaacgaggatggggctgtcatcatgttcatcctcaatttcgaggtggtgatggagaaggacatggtggggtccccggctcatgacaccaaccaccggggcccccccaccagctggctggccccaggccgcgccaagaccttccgcctgaagctgcccgcgctgctggcgctgacggcccgggagtcgtcggtgcggtcgggcggcgcgggcggcgcgggcgccccgggggccgtggtggtggacgtggacctgacgcccgcggcacccagcagcgagtcgctggccctggacgaagtgacagccatggacaaccacgtggcagggctcgggcccgcggaggagcggcgtgcgctggtgggtcccggctctccgccccgcagcgcgcccggccagctcccatcgccccgggcgcacagcctcaaccccgacgcctcgggctccagctgcagcctggcccggacgcgctcccgagaaagctgcgccagcgtgcgccgcgcctcgtcggccgacgacatcgaggccatgcgcgccggggtgctgcccccgccaccgcgccacgccagcaccggggccatgcacccactgcgcagcggcttgctcaactccacctcggactccgacctcgtgcgctaccgcaccattagcaagattccccaaatcaccctcaactttgtggacctcaagggcgaccccttcttggcttcgcccaccagtgaccgtgagatcatagcacctaagataaaggagcgaacccacaatgtcactgagaaggtcacccaggtcctgtccctgggcgccgacgtgctgcctgagtacaagctgcaggcaccgcgcatccaccgctggaccatcctgcattacagccccttcaaggccgtgtgggactggctcatcctgctgctggtcatctacacggctgtcttcacaccctactcggctgccttcctgctgaaggagacggaagaaggcccgcctgctaccgagtgtggctacgcctgccagccgctggctgtggtggacctcatcgtggacatcatgttcattgtggacatcctcatcaacttccgcaccacctacgtcaatgccaacgaggaggtggtcagccaccccggccgcatcgccgtccactacttcaagggctggttcctcatcgacatggtggccgccatccccttcgacctgctcatcttcggctctggctctgaggagctgatcgggctgctgaagactgcgcggctgctgcggctggtgcgcgtggcgcggaagctggatcgctactcagagtacggcgcggccgtgctgttcttgctcatgtgcacctttgcgctcatcgcgcactggctagcctgcatctggtacgccatcggcaacatggagcagccacacatggactcacgcatcggctggctgcacaacctgggcgaccagataggcaaaccctacaacagcagcggcctgggcggcccctccatcaaggacaagtatgtgacggcgctctacttcaccttcagcagcctcaccagtgtgggcttcggcaacgtctctcccaacaccaactcagagaagatcttctccatctgcgtcatgctcattggctccctcatgtatgctagcatcttcggcaacgtgtcggccatcatccagcggctgtactcgggcacagcccgctaccacacacagatgctgcgggtgcgggagttcatccgcttccaccagatccccaatcccctgcgccagcgcctcgaggagtacttccagcacgcctggtcctacaccaacggcatcgacatgaacgcggtgctgaagggcttccctgagtgcctgcaggctgacatctgcctgcacctgaaccgctcactgctgcagcactgcaaacccttccgaggggccaccaagggctgccttcgggccctggccatgaagttcaagaccacacatgcaccgccaggggacacactggtgcatgctggggacctgctcaccgccctgtacttcatctcccggggctccatcgagatcctgcggggcgacgtcgtcgtggccatcctggggaagaatgacatctttggggagcctctgaacctgtatgcaaggcctggcaagtcgaacggggatgtgcgggccctcacctactgtgacctacacaagatccatcgggacgacctgctggaggtgctggacatgtaccctgagttctccgaccacttctggtccagcctggagatcaccttcaacctgcgagataccaacatgatcccgggctcccccggcagtacggagttagagggtggcttcagtcggcaacgcaagcgcaagttgtccttccgcaggcgcacggacaaggacacggagcagccaggggaggtgtcggccttggggccgggccgggcgggggcagggccgagtagccggggccggccgggggggccgtggggggagagcccgtccagtggcccctccagccctgagagcagtgaggatgagggcccaggccgcagctccagccccctccgcctggtgcccttctccagccccaggccccccggagagccgccgggtggggagcccctgatggaggactgcgagaagagcagcgacacttgcaaccccctgtcaggcgccttctcaggagtgtccaacattttcagcttctggggggacagtcggggccgccagtaccaggagctccctcgatgccccgcccccacccccagcctcctcaacatccccctctccagcccgggtcggcggccccggggcgacgtggagagcaggctggatgccctccagcgccagctcaacaggctggagacccggctgagtgcagacatggccactgtcctgcagctgctacagaggcagatgacgctggtcccgcccgcctacagtgctgtgaccaccccggggcctggccccacttccacatccccgctgttgcccgtcagccccctccccaccctcaccttggactcgctttctcaggtttcccagttcatggcgtgtgaggagctgcccccgggggccccagagcttccccaagaaggccccacacgacgcctctccctaccgggccagctgggggccctcacctcccagcccctgcacagacacggctcggacccgggcagttagtggggctgcccagtgtggacacgtggctcacccagggatcaaggcgctgctgggccgctccccttggaggccctgctcaggaggccctgaccgtggaaggggagaggaactcgaaagcacagctcctcccccagcccttgggaccatcttctcctgcagtcccctgggccccagtgagaggggcaggggcagggccggcagtaggtggggcctgtggtccccccactgccctgagggcattagctggtctaactgcccggaggcacccggccctgggccttaggcacctcaaggacttttctgctatttactgctcttattgttaaggataataattaaggatcatatgaataattaatgaagatgctgatgactatgaataataaataattatcctgaggaga

SEQ ID NO: 500 - DNA, 3884 bp, Homo sapiens
  source 1..3884: mol_type = genomic DNA
  misc_feature 1..3884: note = cDNA of KCNH2 gene SNP c.235G>T (p.Ala79Ser)
atgccggtgcggaggggccacgtcgcgccgcagaacaccttcctggacaccatcatccgcaagtttgagggccagagccgtaagttcatcatcgccaacgctcgggtggagaactgcgccgtcatctactgcaacgacggcttctgcgagctgtgcggctactcgcgggccgaggtgatgcagcgaccctgcacctgcgacttcctgcacgggccgcgcacgcagcgccgcgcttccgcgcagatcgcgcaggcactgctgggcgccgaggagcgcaaagtggaaatcgccttctaccggaaagatgggagctgcttcctatgtctggtggatgtggtgcccgtgaagaacgaggatggggctgtcatcatgttcatcctcaatttcgaggtggtgatggagaaggacatggtggggtccccggctcatgacaccaaccaccggggcccccccaccagctggctggccccaggccgcgccaagaccttccgcctgaagctgcccgcgctgctggcgctgacggcccgggagtcgtcggtgcggtcgggcggcgcgggcggcgcgggcgccccgggggccgtggtggtggacgtggacctgacgcccgcggcacccagcagcgagtcgctggccctggacgaagtgacagccatggacaaccacgtggcagggctcgggcccgcggaggagcggcgtgcgctggtgggtcccggctctccgccccgcagcgcgcccggccagctcccatcgccccgggcgcacagcctcaaccccgacgcctcgggctccagctgcagcctggcccggacgcgctcccgagaaagctgcgccagcgtgcgccgcgcctcgtcggccgacgacatcgaggccatgcgcgccggggtgctgcccccgccaccgcgccacgccagcaccggggccatgcacccactgcgcagcggcttgctcaactccacctcggactccgacctcgtgcgctaccgcaccattagcaagattccccaaatcaccctcaactttgtggacctcaagggcgaccccttcttggcttcgcccaccagtgaccgtgagatcatagcacctaagataaaggagcgaacccacaatgtcactgagaaggtcacccaggtcctgtccctgggcgccgacgtgctgcctgagtacaagctgcaggcaccgcgcatccaccgctggaccatcctgcattacagccccttcaaggccgtgtgggactggctcatcctgctgctggtcatctacacggctgtcttcacaccctactcggctgccttcctgctgaaggagacggaagaaggcccgcctgctaccgagtgtggctacgcctgccagccgctggctgtggtggacctcatcgtggacatcatgttcattgtggacatcctcatcaacttccgcaccacctacgtcaatgccaacgaggaggtggtcagccaccccggccgcatcgccgtccactacttcaagggctggttcctcatcgacatggtggccgccatccccttcgacctgctcatcttcggctctggctctgaggagctgatcgggctgctgaagactgcgcggctgctgcggctggtgcgcgtggcgcggaagctggatcgctactcagagtacggcgcggccgtgctgttcttgctcatgtgcacctttgcgctcatcgcgcactggctagcctgcatctggtacgccatcggcaacatggagcagccacacatggactcacgcatcggctggctgcacaacctgggcgaccagataggcaaaccctacaacagcagcggcctgggcggcccctccatcaaggacaagtatgtgacggcgctctacttcaccttcagcagcctcaccagtgtgggcttcggcaacgtctctcccaacaccaactcagagaagatcttctccatctgcgtcatgctcattggctccctcatgtatgctagcatcttcggcaacgtgtcggccatcatccagcggctgtactcgggcacagcccgctaccacacacagatgctgcgggtgcgggagttcatccgcttccaccagatccccaatcccctgcgccagcgcctcgaggagtacttccagcacgcctggtcctacaccaacggcatcgacatgaacgcggtgctgaagggcttccctgagtgcctgcaggctgacatctgcctgcacctgaaccgctcactgctgcagcactgcaaacccttccgaggggccaccaagggctgccttcgggccctggccatgaagttcaagaccacacatgcaccgccaggggacacactggtgcatgctggggacctgctcaccgccctgtacttcatctcccggggctccatcgagatcctgcggggcgacgtcgtcgtggccatcctggggaagaatgacatctttggggagcctctgaacctgtatgcaaggcctggcaagtcgaacggggatgtgcgggccctcacctactgtgacctacacaagatccatcgggacgacctgctggaggtgctggacatgtaccctgagttctccgaccacttctggtccagcctggagatcaccttcaacctgcgagataccaacatgatcccgggctcccccggcagtacggagttagagggtggcttcagtcggcaacgcaagcgcaagttgtccttccgcaggcgcacggacaaggacacggagcagccaggggaggtgtcggccttggggccgggccgggcgggggcagggccgagtagccggggccggccgggggggccgtggggggagagcccgtccagtggcccctccagccctgagagcagtgaggatgagggcccaggccgcagctccagccccctccgcctggtgcccttctccagccccaggccccccggagagccgccgggtggggagcccctgatggaggactgcgagaagagcagcgacacttgcaaccccctgtcaggcgccttctcaggagtgtccaacattttcagcttctggggggacagtcggggccgccagtaccaggagctccctcgatgccccgcccccacccccagcctcctcaacatccccctctccagcccgggtcggcggccccggggcgacgtggagagcaggctggatgccctccagcgccagctcaacaggctggagacccggctgagtgcagacatggccactgtcctgcagctgctacagaggcagatgacgctggtcccgcccgcctacagtgctgtgaccaccccggggcctggccccacttccacatccccgctgttgcccgtcagccccctccccaccctcaccttggactcgctttctcaggtttcccagttcatggcgtgtgaggagctgcccccgggggccccagagcttccccaagaaggccccacacgacgcctctccctaccgggccagctgggggccctcacctcccagcccctgcacagacacggctcggacccgggcagttagtggggctgcccagtgtggacacgtggctcacccagggatcaaggcgctgctgggccgctccccttggaggccctgctcaggaggccctgaccgtggaaggggagaggaactcgaaagcacagctcctcccccagcccttgggaccatcttctcctgcagtcccctgggccccagtgagaggggcaggggcagggccggcagtaggtggggcctgtggtccccccactgccctgagggcattagctggtctaactgcccggaggcacccggccctgggccttaggcacctcaaggacttttctgctatttactgctcttattgttaaggataataattaaggatcatatgaataattaatgaagatgctgatgactatgaataataaataattatcctgaggaga

SEQ ID NO: 501 - DNA, 3884 bp, Homo sapiens
  source 1..3884: mol_type = genomic DNA
  misc_feature 1..3884: note = cDNA of KCNH2 gene SNP c.2360T>A (p.Ile787Asn)
atgccggtgcggaggggccacgtcgcgccgcagaacaccttcctggacaccatcatccgcaagtttgagggccagagccgtaagttcatcatcgccaacgctcgggtggagaactgcgccgtcatctactgcaacgacggcttctgcgagctgtgcggctactcgcgggccgaggtgatgcagcgaccctgcacctgcgacttcctgcacgggccgcgcacgcagcgccgcgctgccgcgcagatcgcgcaggcactgctgggcgccgaggagcgcaaagtggaaatcgccttctaccggaaagatgggagctgcttcctatgtctggtggatgtggtgcccgtgaagaacgaggatggggctgtcatcatgttcatcctcaatttcgaggtggtgatggagaaggacatggtggggtccccggctcatgacaccaaccaccggggcccccccaccagctggctggccccaggccgcgccaagaccttccgcctgaagctgcccgcgctgctggcgctgacggcccgggagtcgtcggtgcggtcgggcggcgcgggcggcgcgggcgccccgggggccgtggtggtggacgtggacctgacgcccgcggcacccagcagcgagtcgctggccctggacgaagtgacagccatggacaaccacgtggcagggctcgggcccgcggaggagcggcgtgcgctggtgggtcccggctctccgccccgcagcgcgcccggccagctcccatcgccccgggcgcacagcctcaaccccgacgcctcgggctccagctgcagcctggcccggacgcgctcccgagaaagctgcgccagcgtgcgccgcgcctcgtcggccgacgacatcgaggccatgcgcgccggggtgctgcccccgccaccgcgccacgccagcaccggggccatgcacccactgcgcagcggcttgctcaactccacctcggactccgacctcgtgcgctaccgcaccattagcaagattccccaaatcaccctcaactttgtggacctcaagggcgaccccttcttggcttcgcccaccagtgaccgtgagatcatagcacctaagataaaggagcgaacccacaatgtcactgagaaggtcacccaggtcctgtccctgggcgccgacgtgctgcctgagtacaagctgcaggcaccgcgcatccaccgctggaccatcctgcattacagccccttcaaggccgtgtgggactggctcatcctgctgctggtcatctacacggctgtcttcacaccctactcggctgccttcctgctgaaggagacggaagaaggcccgcctgctaccgagtgtggctacgcctgccagccgctggctgtggtggacctcatcgtggacatcatgttcattgtggacatcctcatcaacttccgcaccacctacgtcaatgccaacgaggaggtggtcagccaccccggccgcatcgccgtccactacttcaagggctggttcctcatcgacatggtggccgccatccccttcgacctgctcatcttcggctctggctctgaggagctgatcgggctgctgaagactgcgcggctgctgcggctggtgcgcgtggcgcggaagctggatcgctactcagagtacggcgcggccgtgctgttcttgctcatgtgcacctttgcgctcatcgcgcactggctagcctgcatctggtacgccatcggcaacatggagcagccacacatggactcacgcatcggctggctgcacaacctgggcgaccagataggcaaaccctacaacagcagcggcctgggcggcccctccatcaaggacaagtatgtgacggcgctctacttcaccttcagcagcctcaccagtgtgggcttcggcaacgtctctcccaacaccaactcagagaagatcttctccatctgcgtcatgctcattggctccctcatgtatgctagcatcttcggcaacgtgtcggccatcatccagcggctgtactcgggcacagcccgctaccacacacagatgctgcgggtgcgggagttcatccgcttccaccagatccccaatcccctgcgccagcgcctcgaggagtacttccagcacgcctggtcctacaccaacggcatcgacatgaacgcggtgctgaagggcttccctgagtgcctgcaggctgacatctgcctgcacctgaaccgctcactgctgcagcactgcaaacccttccgaggggccaccaagggctgccttcgggccctggccatgaagttcaagaccacacatgcaccgccaggggacacactggtgcatgctggggacctgctcaccgccctgtacttcatctcccggggctccaacgagatcctgcggggcgacgtcgtcgtggccatcctggggaagaatgacatctttggggagcctctgaacctgtatgcaaggcctggcaagtcgaacggggatgtgcgggccctcacctactgtgacctacacaagatccatcgggacgacctgctggaggtgctggacatgtaccctgagttctccgaccacttctggtccagcctggagatcaccttcaacctgcgagataccaacatgatcccgggctcccccggcagtacggagttagagggtggcttcagtcggcaacgcaagcgcaagttgtccttccgcaggcgcacggacaaggacacggagcagccaggggaggtgtcggccttggggccgggccgggcgggggcagggccgagtagccggggccggccgggggggccgtggggggagagcccgtccagtggcccctccagccctgagagcagtgaggatgagggcccaggccgcagctccagccccctccgcctggtgcccttctccagccccaggccccccggagagccgccgggtggggagcccctgatggaggactgcgagaagagcagcgacacttgcaaccccctgtcaggcgccttctcaggagtgtccaacattttcagcttctggggggacagtcggggccgccagtaccaggagctccctcgatgccccgcccccacccccagcctcctcaacatccccctctccagcccgggtcggcggccccggggcgacgtggagagcaggctggatgccctccagcgccagctcaacaggctggagacccggctgagtgcagacatggccactgtcctgcagctgctacagaggcagatgacgctggtcccgcccgcctacagtgctgtgaccaccccggggcctggccccacttccacatccccgctgttgcccgtcagccccctccccaccctcaccttggactcgctttctcaggtttcccagttcatggcgtgtgaggagctgcccccgggggccccagagcttccccaagaaggccccacacgacgcctctccctaccgggccagctgggggccctcacctcccagcccctgcacagacacggctcggacccgggcagttagtggggctgcccagtgtggacacgtggctcacccagggatcaaggcgctgctgggccgctccccttggaggccctgctcaggaggccctgaccgtggaaggggagaggaactcgaaagcacagctcctcccccagcccttgggaccatcttctcctgcagtcccctgggccccagtgagaggggcaggggcagggccggcagtaggtggggcctgtggtccccccactgccctgagggcattagctggtctaactgcccggaggcacccggccctgggccttaggcacctcaaggacttttctgctatttactgctcttattgttaaggataataattaaggatcatatgaataattaatgaagatgctgatgactatgaataataaataattatcctgaggaga

SEQ ID NO: 502 - DNA, 3884 bp, Homo sapiens
  source 1..3884: mol_type = genomic DNA
  misc_feature 1..3884: note = cDNA of KCNH2 gene SNP c.2362G>A (p.Glu788Lys)
atgccggtgcggaggggccacgtcgcgccgcagaacaccttcctggacaccatcatccgcaagtttgagggccagagccgtaagttcatcatcgccaacgctcgggtggagaactgcgccgtcatctactgcaacgacggcttctgcgagctgtgcggctactcgcgggccgaggtgatgcagcgaccctgcacctgcgacttcctgcacgggccgcgcacgcagcgccgcgctgccgcgcagatcgcgcaggcactgctgggcgccgaggagcgcaaagtggaaatcgccttctaccggaaagatgggagctgcttcctatgtctggtggatgtggtgcccgtgaagaacgaggatggggctgtcatcatgttcatcctcaatttcgaggtggtgatggagaaggacatggtggggtccccggctcatgacaccaaccaccggggcccccccaccagctggctggccccaggccgcgccaagaccttccgcctgaagctgcccgcgctgctggcgctgacggcccgggagtcgtcggtgcggtcgggcggcgcgggcggcgcgggcgccccgggggccgtggtggtggacgtggacctgacgcccgcggcacccagcagcgagtcgctggccctggacgaagtgacagccatggacaaccacgtggcagggctcgggcccgcggaggagcggcgtgcgctggtgggtcccggctctccgccccgcagcgcgcccggccagctcccatcgccccgggcgcacagcctcaaccccgacgcctcgggctccagctgcagcctggcccggacgcgctcccgagaaagctgcgccagcgtgcgccgcgcctcgtcggccgacgacatcgaggccatgcgcgccggggtgctgcccccgccaccgcgccacgccagcaccggggccatgcacccactgcgcagcggcttgctcaactccacctcggactccgacctcgtgcgctaccgcaccattagcaagattccccaaatcaccctcaactttgtggacctcaagggcgaccccttcttggcttcgcccaccagtgaccgtgagatcatagcacctaagataaaggagcgaacccacaatgtcactgagaaggtcacccaggtcctgtccctgggcgccgacgtgctgcctgagtacaagctgcaggcaccgcgcatccaccgctggaccatcctgcattacagccccttcaaggccgtgtgggactggctcatcctgctgctggtcatctacacggctgtcttcacaccctactcggctgccttcctgctgaaggagacggaagaaggcccgcctgctaccgagtgtggctacgcctgccagccgctggctgtggtggacctcatcgtggacatcatgttcattgtggacatcctcatcaacttccgcaccacctacgtcaatgccaacgaggaggtggtcagccaccccggccgcatcgccgtccactacttcaagggctggttcctcatcgacatggtggccgccatccccttcgacctgctcatcttcggctctggctctgaggagctgatcgggctgctgaagactgcgcggctgctgcggctggtgcgcgtggcgcggaagctggatcgctactcagagtacggcgcggccgtgctgttcttgctcatgtgcacctttgcgctcatcgcgcactggctagcctgcatctggtacgccatcggcaacatggagcagccacacatggactcacgcatcggctggctgcacaacctgggcgaccagataggcaaaccctacaacagcagcggcctgggcggcccctccatcaaggacaagtatgtgacggcgctctacttcaccttcagcagcctcaccagtgtgggcttcggcaacgtctctcccaacaccaactcagagaagatcttctccatctgcgtcatgctcattggctccctcatgtatgctagcatcttcggcaacgtgtcggccatcatccagcggctgtactcgggcacagcccgctaccacacacagatgctgcgggtgcgggagttcatccgcttccaccagatccccaatcccctgcgccagcgcctcgaggagtacttccagcacgcctggtcctacaccaacggcatcgacatgaacgcggtgctgaagggcttccctgagtgcctgcaggctgacatctgcctgcacctgaaccgctcactgctgcagcactgcaaacccttccgaggggccaccaagggctgccttcgggccctggccatgaagttcaagaccacacatgcaccgccaggggacacactggtgcatgctggggacctgctcaccgccctgtacttcatctcccggggctccatcaagatcctgcggggcgacgtcgtcgtggccatcctggggaagaatgacatctttggggagcctctgaacctgtatgcaaggcctggcaagtcgaacggggatgtgcgggccctcacctactgtgacctacacaagatccatcgggacgacctgctggaggtgctggacatgtaccctgagttctccgaccacttctggtccagcctggagatcaccttcaacctgcgagataccaacatgatcccgggctcccccggcagtacggagttagagggtggcttcagtcggcaacgcaagcgcaagttgtccttccgcaggcgcacggacaaggacacggagcagccaggggaggtgtcggccttggggccgggccgggcgggggcagggccgagtagccggggccggccgggggggccgtggggggagagcccgtccagtggcccctccagccctgagagcagtgaggatgagggcccaggccgcagctccagccccctccgcctggtgcccttctccagccccaggccccccggagagccgccgggtggggagcccctgatggaggactgcgagaagagcagcgacacttgcaaccccctgtcaggcgccttctcaggagtgtccaacattttcagcttctggggggacagtcggggccgccagtaccaggagctccctcgatgccccgcccccacccccagcctcctcaacatccccctctccagcccgggtcggcggccccggggcgacgtggagagcaggctggatgccctccagcgccagctcaacaggctggagacccggctgagtgcagacatggccactgtcctgcagctgctacagaggcagatgacgctggtcccgcccgcctacagtgctgtgaccaccccggggcctggccccacttccacatccccgctgttgcccgtcagccccctccccaccctcaccttggactcgctttctcaggtttcccagttcatggcgtgtgaggagctgcccccgggggccccagagcttccccaagaaggccccacacgacgcctctccctaccgggccagctgggggccctcacctcccagcccctgcacagacacggctcggacccgggcagttagtggggctgcccagtgtggacacgtggctcacccagggatcaaggcgctgctgggccgctccccttggaggccctgctcaggaggccctgaccgtggaaggggagaggaactcgaaagcacagctcctcccccagcccttgggaccatcttctcctgcagtcccctgggccccagtgagaggggcaggggcagggccggcagtaggtggggcctgtggtccccccactgccctgagggcattagctggtctaactgcccggaggcacccggccctgggccttaggcacctcaaggacttttctgctatttactgctcttattgttaaggataataattaaggatcatatgaataattaatgaagatgctgatgactatgaataataaataattatcctgaggaga

SEQ ID NO: 503 - DNA, 3884 bp, Homo sapiens
  source 1..3884: mol_type = genomic DNA
  misc_feature 1..3884: note = cDNA of KCNH2 gene SNP c.2364G>C (p.Glu788Asp)
atgccggtgcggaggggccacgtcgcgccgcagaacaccttcctggacaccatcatccgcaagtttgagggccagagccgtaagttcatcatcgccaacgctcgggtggagaactgcgccgtcatctactgcaacgacggcttctgcgagctgtgcggctactcgcgggccgaggtgatgcagcgaccctgcacctgcgacttcctgcacgggccgcgcacgcagcgccgcgctgccgcgcagatcgcgcaggcactgctgggcgccgaggagcgcaaagtggaaatcgccttctaccggaaagatgggagctgcttcctatgtctggtggatgtggtgcccgtgaagaacgaggatggggctgtcatcatgttcatcctcaatttcgaggtggtgatggagaaggacatggtggggtccccggctcatgacaccaaccaccggggcccccccaccagctggctggccccaggccgcgccaagaccttccgcctgaagctgcccgcgctgctggcgctgacggcccgggagtcgtcggtgcggtcgggcggcgcgggcggcgcgggcgccccgggggccgtggtggtggacgtggacctgacgcccgcggcacccagcagcgagtcgctggccctggacgaagtgacagccatggacaaccacgtggcagggctcgggcccgcggaggagcggcgtgcgctggtgggtcccggctctccgccccgcagcgcgcccggccagctcccatcgccccgggcgcacagcctcaaccccgacgcctcgggctccagctgcagcctggcccggacgcgctcccgagaaagctgcgccagcgtgcgccgcgcctcgtcggccgacgacatcgaggccatgcgcgccggggtgctgcccccgccaccgcgccacgccagcaccggggccatgcacccactgcgcagcggcttgctcaactccacctcggactccgacctcgtgcgctaccgcaccattagcaagattccccaaatcaccctcaactttgtggacctcaagggcgaccccttcttggcttcgcccaccagtgaccgtgagatcatagcacctaagataaaggagcgaacccacaatgtcactgagaaggtcacccaggtcctgtccctgggcgccgacgtgctgcctgagtacaagctgcaggcaccgcgcatccaccgctggaccatcctgcattacagccccttcaaggccgtgtgggactggctcatcctgctgctggtcatctacacggctgtcttcacaccctactcggctgccttcctgctgaaggagacggaagaaggcccgcctgctaccgagtgtggctacgcctgccagccgctggctgtggtggacctcatcgtggacatcatgttcattgtggacatcctcatcaacttccgcaccacctacgtcaatgccaacgaggaggtggtcagccaccccggccgcatcgccgtccactacttcaagggctggttcctcatcgacatggtggccgccatccccttcgacctgctcatcttcggctctggctctgaggagctgatcgggctgctgaagactgcgcggctgctgcggctggtgcgcgtggcgcggaagctggatcgctactcagagtacggcgcggccgtgctgttcttgctcatgtgcacctttgcgctcatcgcgcactggctagcctgcatctggtacgccatcggcaacatggagcagccacacatggactcacgcatcggctggctgcacaacctgggcgaccagataggcaaaccctacaacagcagcggcctgggcggcccctccatcaaggacaagtatgtgacggcgctctacttcaccttcagcagcctcaccagtgtgggcttcggcaacgtctctcccaacaccaactcagagaagatcttctccatctgcgtcatgctcattggctccctcatgtatgctagcatcttcggcaacgtgtcggccatcatccagcggctgtactcgggcacagcccgctaccacacacagatgctgcgggtgcgggagttcatccgcttccaccagatccccaatcccctgcgccagcgcctcgaggagtacttccagcacgcctggtcctacaccaacggcatcgacatgaacgcggtgctgaagggcttccctgagtgcctgcaggctgacatctgcctgcacctgaaccgctcactgctgcagcactgcaaacccttccgaggggccaccaagggctgccttcgggccctggccatgaagttcaagaccacacatgcaccgccaggggacacactggtgcatgctggggacctgctcaccgccctgtacttcatctcccggggctccatcgacatcctgcggggcgacgtcgtcgtggccatcctggggaagaatgacatctttggggagcctctgaacctgtatgcaaggcctggcaagtcgaacggggatgtgcgggccctcacctactgtgacctacacaagatccatcgggacgacctgctggaggtgctggacatgtaccctgagttctccgaccacttctggtccagcctggagatcaccttcaacctgcgagataccaacatgatcccgggctcccccggcagtacggagttagagggtggcttcagtcggcaacgcaagcgcaagttgtccttccgcaggcgcacggacaaggacacggagcagccaggggaggtgtcggccttggggccgggccgggcgggggcagggccgagtagccggggccggccgggggggccgtggggggagagcccgtccagtggcccctccagccctgagagcagtgaggatgagggcccaggccgcagctccagccccctccgcctggtgcccttctccagccccaggccccccggagagccgccgggtggggagcccctgatggaggactgcgagaagagcagcgacacttgcaaccccctgtcaggcgccttctcaggagtgtccaacattttcagcttctggggggacagtcggggccgccagtaccaggagctccctcgatgccccgcccccacccccagcctcctcaacatccccctctccagcccgggtcggcggccccggggcgacgtggagagcaggctggatgccctccagcgccagctcaacaggctggagacccggctgagtgcagacatggccactgtcctgcagctgctacagaggcagatgacgctggtcccgcccgcctacagtgctgtgaccaccccggggcctggccccacttccacatccccgctgttgcccgtcagccccctccccaccctcaccttggactcgctttctcaggtttcccagttcatggcgtgtgaggagctgcccccgggggccccagagcttccccaagaaggccccacacgacgcctctccctaccgggccagctgggggccctcacctcccagcccctgcacagacacggctcggacccgggcagttagtggggctgcccagtgtggacacgtggctcacccagggatcaaggcgctgctgggccgctccccttggaggccctgctcaggaggccctgaccgtggaaggggagaggaactcgaaagcacagctcctcccccagcccttgggaccatcttctcctgcagtcccctgggccccagtgagaggggcaggggcagggccggcagtaggtggggcctgtggtccccccactgccctgagggcattagctggtctaactgcccggaggcacccggccctgggccttaggcacctcaaggacttttctgctatttactgctcttattgttaaggataataattaaggatcatatgaataattaatgaagatgctgatgactatgaataataaataattatcctgaggaga

SEQ ID NO: 504 - DNA, 3884 bp, Homo sapiens
  source 1..3884: mol_type = genomic DNA
  misc_feature 1..3884: note = cDNA of KCNH2 gene SNP c.2366T>C (p.Ile789Thr)
atgccggtgcggaggggccacgtcgcgccgcagaacaccttcctggacaccatcatccgcaagtttgagggccagagccgtaagttcatcatcgccaacgctcgggtggagaactgcgccgtcatctactgcaacgacggcttctgcgagctgtgcggctactcgcgggccgaggtgatgcagcgaccctgcacctgcgacttcctgcacgggccgcgcacgcagcgccgcgctgccgcgcagatcgcgcaggcactgctgggcgccgaggagcgcaaagtggaaatcgccttctaccggaaagatgggagctgcttcctatgtctggtggatgtggtgcccgtgaagaacgaggatggggctgtcatcatgttcatcctcaatttcgaggtggtgatggagaaggacatggtggggtccccggctcatgacaccaaccaccggggcccccccaccagctggctggccccaggccgcgccaagaccttccgcctgaagctgcccgcgctgctggcgctgacggcccgggagtcgtcggtgcggtcgggcggcgcgggcggcgcgggcgccccgggggccgtggtggtggacgtggacctgacgcccgcggcacccagcagcgagtcgctggccctggacgaagtgacagccatggacaaccacgtggcagggctcgggcccgcggaggagcggcgtgcgctggtgggtcccggctctccgccccgcagcgcgcccggccagctcccatcgccccgggcgcacagcctcaaccccgacgcctcgggctccagctgcagcctggcccggacgcgctcccgagaaagctgcgccagcgtgcgccgcgcctcgtcggccgacgacatcgaggccatgcgcgccggggtgctgcccccgccaccgcgccacgccagcaccggggccatgcacccactgcgcagcggcttgctcaactccacctcggactccgacctcgtgcgctaccgcaccattagcaagattccccaaatcaccctcaactttgtggacctcaagggcgaccccttcttggcttcgcccaccagtgaccgtgagatcatagcacctaagataaaggagcgaacccacaatgtcactgagaaggtcacccaggtcctgtccctgggcgccgacgtgctgcctgagtacaagctgcaggcaccgcgcatccaccgctggaccatcctgcattacagccccttcaaggccgtgtgggactggctcatcctgctgctggtcatctacacggctgtcttcacaccctactcggctgccttcctgctgaaggagacggaagaaggcccgcctgctaccgagtgtggctacgcctgccagccgctggctgtggtggacctcatcgtggacatcatgttcattgtggacatcctcatcaacttccgcaccacctacgtcaatgccaacgaggaggtggtcagccaccccggccgcatcgccgtccactacttcaagggctggttcctcatcgacatggtggccgccatccccttcgacctgctcatcttcggctctggctctgaggagctgatcgggctgctgaagactgcgcggctgctgcggctggtgcgcgtggcgcggaagctggatcgctactcagagtacggcgcggccgtgctgttcttgctcatgtgcacctttgcgctcatcgcgcactggctagcctgcatctggtacgccatcggcaacatggagcagccacacatggactcacgcatcggctggctgcacaacctgggcgaccagataggcaaaccctacaacagcagcggcctgggcggcccctccatcaaggacaagtatgtgacggcgctctacttcaccttcagcagcctcaccagtgtgggcttcggcaacgtctctcccaacaccaactcagagaagatcttctccatctgcgtcatgctcattggctccctcatgtatgctagcatcttcggcaacgtgtcggccatcatccagcggctgtactcgggcacagcccgctaccacacacagatgctgcgggtgcgggagttcatccgcttccaccagatccccaatcccctgcgccagcgcctcgaggagtacttccagcacgcctggtcctacaccaacggcatcgacatgaacgcggtgctgaagggcttccctgagtgcctgcaggctgacatctgcctgcacctgaaccgctcactgctgcagcactgcaaacccttccgaggggccaccaagggctgccttcgggccctggccatgaagttcaagaccacacatgcaccgccaggggacacactggtgcatgctggggacctgctcaccgccctgtacttcatctcccggggctccatcgagaccctgcggggcgacgtcgtcgtggccatcctggggaagaatgacatctttggggagcctctgaacctgtatgcaaggcctggcaagtcgaacggggatgtgcgggccctcacctactgtgacctacacaagatccatcgggacgacctgctggaggtgctggacatgtaccctgagttctccgaccacttctggtccagcctggagatcaccttcaacctgcgagataccaacatgatcccgggctcccccggcagtacggagttagagggtggcttcagtcggcaacgcaagcgcaagttgtccttccgcaggcgcacggacaaggacacggagcagccaggggaggtgtcggccttggggccgggccgggcgggggcagggccgagtagccggggccggccgggggggccgtggggggagagcccgtccagtggcccctccagccctgagagcagtgaggatgagggcccaggccgcagctccagccccctccgcctggtgcccttctccagccccaggccccccggagagccgccgggtggggagcccctgatggaggactgcgagaagagcagcgacacttgcaaccccctgtcaggcgccttctcaggagtgtccaacattttcagcttctggggggacagtcggggccgccagtaccaggagctccctcgatgccccgcccccacccccagcctcctcaacatccccctctccagcccgggtcggcggccccggggcgacgtggagagcaggctggatgccctccagcgccagctcaacaggctggagacccggctgagtgcagacatggccactgtcctgcagctgctacagaggcagatgacgctggtcccgcccgcctacagtgctgtgaccaccccggggcctggccccacttccacatccccgctgttgcccgtcagccccctccccaccctcaccttggactcgctttctcaggtttcccagttcatggcgtgtgaggagctgcccccgggggccccagagcttccccaagaaggccccacacgacgcctctccctaccgggccagctgggggccctcacctcccagcccctgcacagacacggctcggacccgggcagttagtggggctgcccagtgtggacacgtggctcacccagggatcaaggcgctgctgggccgctccccttggaggccctgctcaggaggccctgaccgtggaaggggagaggaactcgaaagcacagctcctcccccagcccttgggaccatcttctcctgcagtcccctgggccccagtgagaggggcaggggcagggccggcagtaggtggggcctgtggtccccccactgccctgagggcattagctggtctaactgcccggaggcacccggccctgggccttaggcacctcaaggacttttctgctatttactgctcttattgttaaggataataattaaggatcatatgaataattaatgaagatgctgatgactatgaataataaataattatcctgaggaga

SEQ ID NO: 505 - DNA, 3884 bp, Homo sapiens
  source 1..3884: mol_type = genomic DNA
  misc_feature 1..3884: note = cDNA of KCNH2 gene SNP c.2369T>C (p.Leu790Pro)
atgccggtgcggaggggccacgtcgcgccgcagaacaccttcctggacaccatcatccgcaagtttgagggccagagccgtaagttcatcatcgccaacgctcgggtggagaactgcgccgtcatctactgcaacgacggcttctgcgagctgtgcggctactcgcgggccgaggtgatgcagcgaccctgcacctgcgacttcctgcacgggccgcgcacgcagcgccgcgctgccgcgcagatcgcgcaggcactgctgggcgccgaggagcgcaaagtggaaatcgccttctaccggaaagatgggagctgcttcctatgtctggtggatgtggtgcccgtgaagaacgaggatggggctgtcatcatgttcatcctcaatttcgaggtggtgatggagaaggacatggtggggtccccggctcatgacaccaaccaccggggcccccccaccagctggctggccccaggccgcgccaagaccttccgcctgaagctgcccgcgctgctggcgctgacggcccgggagtcgtcggtgcggtcgggcggcgcgggcggcgcgggcgccccgggggccgtggtggtggacgtggacctgacgcccgcggcacccagcagcgagtcgctggccctggacgaagtgacagccatggacaaccacgtggcagggctcgggcccgcggaggagcggcgtgcgctggtgggtcccggctctccgccccgcagcgcgcccggccagctcccatcgccccgggcgcacagcctcaaccccgacgcctcgggctccagctgcagcctggcccggacgcgctcccgagaaagctgcgccagcgtgcgccgcgcctcgtcggccgacgacatcgaggccatgcgcgccggggtgctgcccccgccaccgcgccacgccagcaccggggccatgcacccactgcgcagcggcttgctcaactccacctcggactccgacctcgtgcgctaccgcaccattagcaagattccccaaatcaccctcaactttgtggacctcaagggcgaccccttcttggcttcgcccaccagtgaccgtgagatcatagcacctaagataaaggagcgaacccacaatgtcactgagaaggtcacccaggtcctgtccctgggcgccgacgtgctgcctgagtacaagctgcaggcaccgcgcatccaccgctggaccatcctgcattacagccccttcaaggccgtgtgggactggctcatcctgctgctggtcatctacacggctgtcttcacaccctactcggctgccttcctgctgaaggagacggaagaaggcccgcctgctaccgagtgtggctacgcctgccagccgctggctgtggtggacctcatcgtggacatcatgttcattgtggacatcctcatcaacttccgcaccacctacgtcaatgccaacgaggaggtggtcagccaccccggccgcatcgccgtccactacttcaagggctggttcctcatcgacatggtggccgccatccccttcgacctgctcatcttcggctctggctctgaggagctgatcgggctgctgaagactgcgcggctgctgcggctggtgcgcgtggcgcggaagctggatcgctactcagagtacggcgcggccgtgctgttcttgctcatgtgcacctttgcgctcatcgcgcactggctagcctgcatctggtacgccatcggcaacatggagcagccacacatggactcacgcatcggctggctgcacaacctgggcgaccagataggcaaaccctacaacagcagcggcctgggcggcccctccatcaaggacaagtatgtgacggcgctctacttcaccttcagcagcctcaccagtgtgggcttcggcaacgtctctcccaacaccaactcagagaagatcttctccatctgcgtcatgctcattggctccctcatgtatgctagcatcttcggcaacgtgtcggccatcatccagcggctgtactcgggcacagcccgctaccacacacagatgctgcgggtgcgggagttcatccgcttccaccagatccccaatcccctgcgccagcgcctcgaggagtacttccagcacgcctggtcctacaccaacggcatcgacatgaacgcggtgctgaagggcttccctgagtgcctgcaggctgacatctgcctgcacctgaaccgctcactgctgcagcactgcaaacccttccgaggggccaccaagggctgccttcgggccctggccatgaagttcaagaccacacatgcaccgccaggggacacactggtgcatgctggggacctgctcaccgccctgtacttcatctcccggggctccatcgagatcccgcggggcgacgtcgtcgtggccatcctggggaagaatgacatctttggggagcctctgaacctgtatgcaaggcctggcaagtcgaacggggatgtgcgggccctcacctactgtgacctacacaagatccatcgggacgacctgctggaggtgctggacatgtaccctgagttctccgaccacttctggtccagcctggagatcaccttcaacctgcgagataccaacatgatcccgggctcccccggcagtacggagttagagggtggcttcagtcggcaacgcaagcgcaagttgtccttccgcaggcgcacggacaaggacacggagcagccaggggaggtgtcggccttggggccgggccgggcgggggcagggccgagtagccggggccggccgggggggccgtggggggagagcccgtccagtggcccctccagccctgagagcagtgaggatgagggcccaggccgcagctccagccccctccgcctggtgcccttctccagccccaggccccccggagagccgccgggtggggagcccctgatggaggactgcgagaagagcagcgacacttgcaaccccctgtcaggcgccttctcaggagtgtccaacattttcagcttctggggggacagtcggggccgccagtaccaggagctccctcgatgccccgcccccacccccagcctcctcaacatccccctctccagcccgggtcggcggccccggggcgacgtggagagcaggctggatgccctccagcgccagctcaacaggctggagacccggctgagtgcagacatggccactgtcctgcagctgctacagaggcagatgacgctggtcccgcccgcctacagtgctgtgaccaccccggggcctggccccacttccacatccccgctgttgcccgtcagccccctccccaccctcaccttggactcgctttctcaggtttcccagttcatggcgtgtgaggagctgcccccgggggccccagagcttccccaagaaggccccacacgacgcctctccctaccgggccagctgggggccctcacctcccagcccctgcacagacacggctcggacccgggcagttagtggggctgcccagtgtggacacgtggctcacccagggatcaaggcgctgctgggccgctccccttggaggccctgctcaggaggccctgaccgtggaaggggagaggaactcgaaagcacagctcctcccccagcccttgggaccatcttctcctgcagtcccctgggccccagtgagaggggcaggggcagggccggcagtaggtggggcctgtggtccccccactgccctgagggcattagctggtctaactgcccggaggcacccggccctgggccttaggcacctcaaggacttttctgctatttactgctcttattgttaaggataataattaaggatcatatgaataattaatgaagatgctgatgactatgaataataaataattatcctgaggaga

SEQ ID NO: 506 - DNA, 3884 bp, Homo sapiens
  source 1..3884: mol_type = genomic DNA
  misc_feature 1..3884: note = cDNA of KCNH2 gene SNP c.2371C>T (p.Arg791Trp)
atgccggtgcggaggggccacgtcgcgccgcagaacaccttcctggacaccatcatccgcaagtttgagggccagagccgtaagttcatcatcgccaacgctcgggtggagaactgcgccgtcatctactgcaacgacggcttctgcgagctgtgcggctactcgcgggccgaggtgatgcagcgaccctgcacctgcgacttcctgcacgggccgcgcacgcagcgccgcgctgccgcgcagatcgcgcaggcactgctgggcgccgaggagcgcaaagtggaaatcgccttctaccggaaagatgggagctgcttcctatgtctggtggatgtggtgcccgtgaagaacgaggatggggctgtcatcatgttcatcctcaatttcgaggtggtgatggagaaggacatggtggggtccccggctcatgacaccaaccaccggggcccccccaccagctggctggccccaggccgcgccaagaccttccgcctgaagctgcccgcgctgctggcgctgacggcccgggagtcgtcggtgcggtcgggcggcgcgggcggcgcgggcgccccgggggccgtggtggtggacgtggacctgacgcccgcggcacccagcagcgagtcgctggccctggacgaagtgacagccatggacaaccacgtggcagggctcgggcccgcggaggagcggcgtgcgctggtgggtcccggctctccgccccgcagcgcgcccggccagctcccatcgccccgggcgcacagcctcaaccccgacgcctcgggctccagctgcagcctggcccggacgcgctcccgagaaagctgcgccagcgtgcgccgcgcctcgtcggccgacgacatcgaggccatgcgcgccggggtgctgcccccgccaccgcgccacgccagcaccggggccatgcacccactgcgcagcggcttgctcaactccacctcggactccgacctcgtgcgctaccgcaccattagcaagattccccaaatcaccctcaactttgtggacctcaagggcgaccccttcttggcttcgcccaccagtgaccgtgagatcatagcacctaagataaaggagcgaacccacaatgtcactgagaaggtcacccaggtcctgtccctgggcgccgacgtgctgcctgagtacaagctgcaggcaccgcgcatccaccgctggaccatcctgcattacagccccttcaaggccgtgtgggactggctcatcctgctgctggtcatctacacggctgtcttcacaccctactcggctgccttcctgctgaaggagacggaagaaggcccgcctgctaccgagtgtggctacgcctgccagccgctggctgtggtggacctcatcgtggacatcatgttcattgtggacatcctcatcaacttccgcaccacctacgtcaatgccaacgaggaggtggtcagccaccccggccgcatcgccgtccactacttcaagggctggttcctcatcgacatggtggccgccatccccttcgacctgctcatcttcggctctggctctgaggagctgatcgggctgctgaagactgcgcggctgctgcggctggtgcgcgtggcgcggaagctggatcgctactcagagtacggcgcggccgtgctgttcttgctcatgtgcacctttgcgctcatcgcgcactggctagcctgcatctggtacgccatcggcaacatggagcagccacacatggactcacgcatcggctggctgcacaacctgggcgaccagataggcaaaccctacaacagcagcggcctgggcggcccctccatcaaggacaagtatgtgacggcgctctacttcaccttcagcagcctcaccagtgtgggcttcggcaacgtctctcccaacaccaactcagagaagatcttctccatctgcgtcatgctcattggctccctcatgtatgctagcatcttcggcaacgtgtcggccatcatccagcggctgtactcgggcacagcccgctaccacacacagatgctgcgggtgcgggagttcatccgcttccaccagatccccaatcccctgcgccagcgcctcgaggagtacttccagcacgcctggtcctacaccaacggcatcgacatgaacgcggtgctgaagggcttccctgagtgcctgcaggctgacatctgcctgcacctgaaccgctcactgctgcagcactgcaaacccttccgaggggccaccaagggctgccttcgggccctggccatgaagttcaagaccacacatgcaccgccaggggacacactggtgcatgctggggacctgctcaccgccctgtacttcatctcccggggctccatcgagatcctgtggggcgacgtcgtcgtggccatcctggggaagaatgacatctttggggagcctctgaacctgtatgcaaggcctggcaagtcgaacggggatgtgcgggccctcacctactgtgacctacacaagatccatcgggacgacctgctggaggtgctggacatgtaccctgagttctccgaccacttctggtccagcctggagatcaccttcaacctgcgagataccaacatgatcccgggctcccccggcagtacggagttagagggtggcttcagtcggcaacgcaagcgcaagttgtccttccgcaggcgcacggacaaggacacggagcagccaggggaggtgtcggccttggggccgggccgggcgggggcagggccgagtagccggggccggccgggggggccgtggggggagagcccgtccagtggcccctccagccctgagagcagtgaggatgagggcccaggccgcagctccagccccctccgcctggtgcccttctccagccccaggccccccggagagccgccgggtggggagcccctgatggaggactgcgagaagagcagcgacacttgcaaccccctgtcaggcgccttctcaggagtgtccaacattttcagcttctggggggacagtcggggccgccagtaccaggagctccctcgatgccccgcccccacccccagcctcctcaacatccccctctccagcccgggtcggcggccccggggcgacgtggagagcaggctggatgccctccagcgccagctcaacaggctggagacccggctgagtgcagacatggccactgtcctgcagctgctacagaggcagatgacgctggtcccgcccgcctacagtgctgtgaccaccccggggcctggccccacttccacatccccgctgttgcccgtcagccccctccccaccctcaccttggactcgctttctcaggtttcccagttcatggcgtgtgaggagctgcccccgggggccccagagcttccccaagaaggccccacacgacgcctctccctaccgggccagctgggggccctcacctcccagcccctgcacagacacggctcggacccgggcagttagtggggctgcccagtgtggacacgtggctcacccagggatcaaggcgctgctgggccgctccccttggaggccctgctcaggaggccctgaccgtggaaggggagaggaactcgaaagcacagctcctcccccagcccttgggaccatcttctcctgcagtcccctgggccccagtgagaggggcaggggcagggccggcagtaggtggggcctgtggtccccccactgccctgagggcattagctggtctaactgcccggaggcacccggccctgggccttaggcacctcaaggacttttctgctatttactgctcttattgttaaggataataattaaggatcatatgaataattaatgaagatgctgatgactatgaataataaataattatcctgaggaga

SEQ ID NO: 507 - DNA, 3884 bp, Homo sapiens
  source 1..3884: mol_type = genomic DNA
  misc_feature 1..3884: note = cDNA of KCNH2 gene SNP c.2372G>A (p.Arg791Gln)
atgccggtgcggaggggccacgtcgcgccgcagaacaccttcctggacaccatcatccgcaagtttgagggccagagccgtaagttcatcatcgccaacgctcgggtggagaactgcgccgtcatctactgcaacgacggcttctgcgagctgtgcggctactcgcgggccgaggtgatgcagcgaccctgcacctgcgacttcctgcacgggccgcgcacgcagcgccgcgctgccgcgcagatcgcgcaggcactgctgggcgccgaggagcgcaaagtggaaatcgccttctaccggaaagatgggagctgcttcctatgtctggtggatgtggtgcccgtgaagaacgaggatggggctgtcatcatgttcatcctcaatttcgaggtggtgatggagaaggacatggtggggtccccggctcatgacaccaaccaccggggcccccccaccagctggctggccccaggccgcgccaagaccttccgcctgaagctgcccgcgctgctggcgctgacggcccgggagtcgtcggtgcggtcgggcggcgcgggcggcgcgggcgccccgggggccgtggtggtggacgtggacctgacgcccgcggcacccagcagcgagtcgctggccctggacgaagtgacagccatggacaaccacgtggcagggctcgggcccgcggaggagcggcgtgcgctggtgggtcccggctctccgccccgcagcgcgcccggccagctcccatcgccccgggcgcacagcctcaaccccgacgcctcgggctccagctgcagcctggcccggacgcgctcccgagaaagctgcgccagcgtgcgccgcgcctcgtcggccgacgacatcgaggccatgcgcgccggggtgctgcccccgccaccgcgccacgccagcaccggggccatgcacccactgcgcagcggcttgctcaactccacctcggactccgacctcgtgcgctaccgcaccattagcaagattccccaaatcaccctcaactttgtggacctcaagggcgaccccttcttggcttcgcccaccagtgaccgtgagatcatagcacctaagataaaggagcgaacccacaatgtcactgagaaggtcacccaggtcctgtccctgggcgccgacgtgctgcctgagtacaagctgcaggcaccgcgcatccaccgctggaccatcctgcattacagccccttcaaggccgtgtgggactggctcatcctgctgctggtcatctacacggctgtcttcacaccctactcggctgccttcctgctgaaggagacggaagaaggcccgcctgctaccgagtgtggctacgcctgccagccgctggctgtggtggacctcatcgtggacatcatgttcattgtggacatcctcatcaacttccgcaccacctacgtcaatgccaacgaggaggtggtcagccaccccggccgcatcgccgtccactacttcaagggctggttcctcatcgacatggtggccgccatccccttcgacctgctcatcttcggctctggctctgaggagctgatcgggctgctgaagactgcgcggctgctgcggctggtgcgcgtggcgcggaagctggatcgctactcagagtacggcgcggccgtgctgttcttgctcatgtgcacctttgcgctcatcgcgcactggctagcctgcatctggtacgccatcggcaacatggagcagccacacatggactcacgcatcggctggctgcacaacctgggcgaccagataggcaaaccctacaacagcagcggcctgggcggcccctccatcaaggacaagtatgtgacggcgctctacttcaccttcagcagcctcaccagtgtgggcttcggcaacgtctctcccaacaccaactcagagaagatcttctccatctgcgtcatgctcattggctccctcatgtatgctagcatcttcggcaacgtgtcggccatcatccagcggctgtactcgggcacagcccgctaccacacacagatgctgcgggtgcgggagttcatccgcttccaccagatccccaatcccctgcgccagcgcctcgaggagtacttccagcacgcctggtcctacaccaacggcatcgacatgaacgcggtgctgaagggcttccctgagtgcctgcaggctgacatctgcctgcacctgaaccgctcactgctgcagcactgcaaacccttccgaggggccaccaagggctgccttcgggccctggccatgaagttcaagaccacacatgcaccgccaggggacacactggtgcatgctggggacctgctcaccgccctgtacttcatctcccggggctccatcgagatcctgcagggcgacgtcgtcgtggccatcctggggaagaatgacatctttggggagcctctgaacctgtatgcaaggcctggcaagtcgaacggggatgtgcgggccctcacctactgtgacctacacaagatccatcgggacgacctgctggaggtgctggacatgtaccctgagttctccgaccacttctggtccagcctggagatcaccttcaacctgcgagataccaacatgatcccgggctcccccggcagtacggagttagagggtggcttcagtcggcaacgcaagcgcaagttgtccttccgcaggcgcacggacaaggacacggagcagccaggggaggtgtcggccttggggccgggccgggcgggggcagggccgagtagccggggccggccgggggggccgtggggggagagcccgtccagtggcccctccagccctgagagcagtgaggatgagggcccaggccgcagctccagccccctccgcctggtgcccttctccagccccaggccccccggagagccgccgggtggggagcccctgatggaggactgcgagaagagcagcgacacttgcaaccccctgtcaggcgccttctcaggagtgtccaacattttcagcttctggggggacagtcggggccgccagtaccaggagctccctcgatgccccgcccccacccccagcctcctcaacatccccctctccagcccgggtcggcggccccggggcgacgtggagagcaggctggatgccctccagcgccagctcaacaggctggagacccggctgagtgcagacatggccactgtcctgcagctgctacagaggcagatgacgctggtcccgcccgcctacagtgctgtgaccaccccggggcctggccccacttccacatccccgctgttgcccgtcagccccctccccaccctcaccttggactcgctttctcaggtttcccagttcatggcgtgtgaggagctgcccccgggggccccagagcttccccaagaaggccccacacgacgcctctccctaccgggccagctgggggccctcacctcccagcccctgcacagacacggctcggacccgggcagttagtggggctgcccagtgtggacacgtggctcacccagggatcaaggcgctgctgggccgctccccttggaggccctgctcaggaggccctgaccgtggaaggggagaggaactcgaaagcacagctcctcccccagcccttgggaccatcttctcctgcagtcccctgggccccagtgagaggggcaggggcagggccggcagtaggtggggcctgtggtccccccactgccctgagggcattagctggtctaactgcccggaggcacccggccctgggccttaggcacctcaaggacttttctgctatttactgctcttattgttaaggataataattaaggatcatatgaataattaatgaagatgctgatgactatgaataataaataattatcctgaggaga

SEQ ID NO: 508 - DNA, 3884 bp, Homo sapiens
  source 1..3884: mol_type = genomic DNA
  misc_feature 1..3884: note = cDNA of KCNH2 gene SNP c.2377G>A (p.Asp793Asn)
atgccggtgcggaggggccacgtcgcgccgcagaacaccttcctggacaccatcatccgcaagtttgagggccagagccgtaagttcatcatcgccaacgctcgggtggagaactgcgccgtcatctactgcaacgacggcttctgcgagctgtgcggctactcgcgggccgaggtgatgcagcgaccctgcacctgcgacttcctgcacgggccgcgcacgcagcgccgcgctgccgcgcagatcgcgcaggcactgctgggcgccgaggagcgcaaagtggaaatcgccttctaccggaaagatgggagctgcttcctatgtctggtggatgtggtgcccgtgaagaacgaggatggggctgtcatcatgttcatcctcaatttcgaggtggtgatggagaaggacatggtggggtccccggctcatgacaccaaccaccggggcccccccaccagctggctggccccaggccgcgccaagaccttccgcctgaagctgcccgcgctgctggcgctgacggcccgggagtcgtcggtgcggtcgggcggcgcgggcggcgcgggcgccccgggggccgtggtggtggacgtggacctgacgcccgcggcacccagcagcgagtcgctggccctggacgaagtgacagccatggacaaccacgtggcagggctcgggcccgcggaggagcggcgtgcgctggtgggtcccggctctccgccccgcagcgcgcccggccagctcccatcgccccgggcgcacagcctcaaccccgacgcctcgggctccagctgcagcctggcccggacgcgctcccgagaaagctgcgccagcgtgcgccgcgcctcgtcggccgacgacatcgaggccatgcgcgccggggtgctgcccccgccaccgcgccacgccagcaccggggccatgcacccactgcgcagcggcttgctcaactccacctcggactccgacctcgtgcgctaccgcaccattagcaagattccccaaatcaccctcaactttgtggacctcaagggcgaccccttcttggcttcgcccaccagtgaccgtgagatcatagcacctaagataaaggagcgaacccacaatgtcactgagaaggtcacccaggtcctgtccctgggcgccgacgtgctgcctgagtacaagctgcaggcaccgcgcatccaccgctggaccatcctgcattacagccccttcaaggccgtgtgggactggctcatcctgctgctggtcatctacacggctgtcttcacaccctactcggctgccttcctgctgaaggagacggaagaaggcccgcctgctaccgagtgtggctacgcctgccagccgctggctgtggtggacctcatcgtggacatcatgttcattgtggacatcctcatcaacttccgcaccacctacgtcaatgccaacgaggaggtggtcagccaccccggccgcatcgccgtccactacttcaagggctggttcctcatcgacatggtggccgccatccccttcgacctgctcatcttcggctctggctctgaggagctgatcgggctgctgaagactgcgcggctgctgcggctggtgcgcgtggcgcggaagctggatcgctactcagagtacggcgcggccgtgctgttcttgctcatgtgcacctttgcgctcatcgcgcactggctagcctgcatctggtacgccatcggcaacatggagcagccacacatggactcacgcatcggctggctgcacaacctgggcgaccagataggcaaaccctacaacagcagcggcctgggcggcccctccatcaaggacaagtatgtgacggcgctctacttcaccttcagcagcctcaccagtgtgggcttcggcaacgtctctcccaacaccaactcagagaagatcttctccatctgcgtcatgctcattggctccctcatgtatgctagcatcttcggcaacgtgtcggccatcatccagcggctgtactcgggcacagcccgctaccacacacagatgctgcgggtgcgggagttcatccgcttccaccagatccccaatcccctgcgccagcgcctcgaggagtacttccagcacgcctggtcctacaccaacggcatcgacatgaacgcggtgctgaagggcttccctgagtgcctgcaggctgacatctgcctgcacctgaaccgctcactgctgcagcactgcaaacccttccgaggggccaccaagggctgccttcgggccctggccatgaagttcaagaccacacatgcaccgccaggggacacactggtgcatgctggggacctgctcaccgccctgtacttcatctcccggggctccatcgagatcctgcggggcaacgtcgtcgtggccatcctggggaagaatgacatctttggggagcctctgaacctgtatgcaaggcctggcaagtcgaacggggatgtgcgggccctcacctactgtgacctacacaagatccatcgggacgacctgctggaggtgctggacatgtaccctgagttctccgaccacttctggtccagcctggagatcaccttcaacctgcgagataccaacatgatcccgggctcccccggcagtacggagttagagggtggcttcagtcggcaacgcaagcgcaagttgtccttccgcaggcgcacggacaaggacacggagcagccaggggaggtgtcggccttggggccgggccgggcgggggcagggccgagtagccggggccggccgggggggccgtggggggagagcccgtccagtggcccctccagccctgagagcagtgaggatgagggcccaggccgcagctccagccccctccgcctggtgcccttctccagccccaggccccccggagagccgccgggtggggagcccctgatggaggactgcgagaagagcagcgacacttgcaaccccctgtcaggcgccttctcaggagtgtccaacattttcagcttctggggggacagtcggggccgccagtaccaggagctccctcgatgccccgcccccacccccagcctcctcaacatccccctctccagcccgggtcggcggccccggggcgacgtggagagcaggctggatgccctccagcgccagctcaacaggctggagacccggctgagtgcagacatggccactgtcctgcagctgctacagaggcagatgacgctggtcccgcccgcctacagtgctgtgaccaccccggggcctggccccacttccacatccccgctgttgcccgtcagccccctccccaccctcaccttggactcgctttctcaggtttcccagttcatggcgtgtgaggagctgcccccgggggccccagagcttccccaagaaggccccacacgacgcctctccctaccgggccagctgggggccctcacctcccagcccctgcacagacacggctcggacccgggcagttagtggggctgcccagtgtggacacgtggctcacccagggatcaaggcgctgctgggccgctccccttggaggccctgctcaggaggccctgaccgtggaaggggagaggaactcgaaagcacagctcctcccccagcccttgggaccatcttctcctgcagtcccctgggccccagtgagaggggcaggggcagggccggcagtaggtggggcctgtggtccccccactgccctgagggcattagctggtctaactgcccggaggcacccggccctgggccttaggcacctcaaggacttttctgctatttactgctcttattgttaaggataataattaaggatcatatgaataattaatgaagatgctgatgactatgaataataaataattatcctgaggaga

SEQ ID NO: 509 - DNA, 3884 bp, Homo sapiens
  source 1..3884: mol_type = genomic DNA
  misc_feature 1..3884: note = cDNA of KCNH2 gene SNP c.2380G>A (p.Val794Ile)
atgccggtgcggaggggccacgtcgcgccgcagaacaccttcctggacaccatcatccgcaagtttgagggccagagccgtaagttcatcatcgccaacgctcgggtggagaactgcgccgtcatctactgcaacgacggcttctgcgagctgtgcggctactcgcgggccgaggtgatgcagcgaccctgcacctgcgacttcctgcacgggccgcgcacgcagcgccgcgctgccgcgcagatcgcgcaggcactgctgggcgccgaggagcgcaaagtggaaatcgccttctaccggaaagatgggagctgcttcctatgtctggtggatgtggtgcccgtgaagaacgaggatggggctgtcatcatgttcatcctcaatttcgaggtggtgatggagaaggacatggtggggtccccggctcatgacaccaaccaccggggcccccccaccagctggctggccccaggccgcgccaagaccttccgcctgaagctgcccgcgctgctggcgctgacggcccgggagtcgtcggtgcggtcgggcggcgcgggcggcgcgggcgccccgggggccgtggtggtggacgtggacctgacgcccgcggcacccagcagcgagtcgctggccctggacgaagtgacagccatggacaaccacgtggcagggctcgggcccgcggaggagcggcgtgcgctggtgggtcccggctctccgccccgcagcgcgcccggccagctcccatcgccccgggcgcacagcctcaaccccgacgcctcgggctccagctgcagcctggcccggacgcgctcccgagaaagctgcgccagcgtgcgccgcgcctcgtcggccgacgacatcgaggccatgcgcgccggggtgctgcccccgccaccgcgccacgccagcaccggggccatgcacccactgcgcagcggcttgctcaactccacctcggactccgacctcgtgcgctaccgcaccattagcaagattccccaaatcaccctcaactttgtggacctcaagggcgaccccttcttggcttcgcccaccagtgaccgtgagatcatagcacctaagataaaggagcgaacccacaatgtcactgagaaggtcacccaggtcctgtccctgggcgccgacgtgctgcctgagtacaagctgcaggcaccgcgcatccaccgctggaccatcctgcattacagccccttcaaggccgtgtgggactggctcatcctgctgctggtcatctacacggctgtcttcacaccctactcggctgccttcctgctgaaggagacggaagaaggcccgcctgctaccgagtgtggctacgcctgccagccgctggctgtggtggacctcatcgtggacatcatgttcattgtggacatcctcatcaacttccgcaccacctacgtcaatgccaacgaggaggtggtcagccaccccggccgcatcgccgtccactacttcaagggctggttcctcatcgacatggtggccgccatccccttcgacctgctcatcttcggctctggctctgaggagctgatcgggctgctgaagactgcgcggctgctgcggctggtgcgcgtggcgcggaagctggatcgctactcagagtacggcgcggccgtgctgttcttgctcatgtgcacctttgcgctcatcgcgcactggctagcctgcatctggtacgccatcggcaacatggagcagccacacatggactcacgcatcggctggctgcacaacctgggcgaccagataggcaaaccctacaacagcagcggcctgggcggcccctccatcaaggacaagtatgtgacggcgctctacttcaccttcagcagcctcaccagtgtgggcttcggcaacgtctctcccaacaccaactcagagaagatcttctccatctgcgtcatgctcattggctccctcatgtatgctagcatcttcggcaacgtgtcggccatcatccagcggctgtactcgggcacagcccgctaccacacacagatgctgcgggtgcgggagttcatccgcttccaccagatccccaatcccctgcgccagcgcctcgaggagtacttccagcacgcctggtcctacaccaacggcatcgacatgaacgcggtgctgaagggcttccctgagtgcctgcaggctgacatctgcctgcacctgaaccgctcactgctgcagcactgcaaacccttccgaggggccaccaagggctgccttcgggccctggccatgaagttcaagaccacacatgcaccgccaggggacacactggtgcatgctggggacctgctcaccgccctgtacttcatctcccggggctccatcgagatcctgcggggcgacatcgtcgtggccatcctggggaagaatgacatctttggggagcctctgaacctgtatgcaaggcctggcaagtcgaacggggatgtgcgggccctcacctactgtgacctacacaagatccatcgggacgacctgctggaggtgctggacatgtaccctgagttctccgaccacttctggtccagcctggagatcaccttcaacctgcgagataccaacatgatcccgggctcccccggcagtacggagttagagggtggcttcagtcggcaacgcaagcgcaagttgtccttccgcaggcgcacggacaaggacacggagcagccaggggaggtgtcggccttggggccgggccgggcgggggcagggccgagtagccggggccggccgggggggccgtggggggagagcccgtccagtggcccctccagccctgagagcagtgaggatgagggcccaggccgcagctccagccccctccgcctggtgcccttctccagccccaggccccccggagagccgccgggtggggagcccctgatggaggactgcgagaagagcagcgacacttgcaaccccctgtcaggcgccttctcaggagtgtccaacattttcagcttctggggggacagtcggggccgccagtaccaggagctccctcgatgccccgcccccacccccagcctcctcaacatccccctctccagcccgggtcggcggccccggggcgacgtggagagcaggctggatgccctccagcgccagctcaacaggctggagacccggctgagtgcagacatggccactgtcctgcagctgctacagaggcagatgacgctggtcccgcccgcctacagtgctgtgaccaccccggggcctggccccacttccacatccccgctgttgcccgtcagccccctccccaccctcaccttggactcgctttctcaggtttcccagttcatggcgtgtgaggagctgcccccgggggccccagagcttccccaagaaggccccacacgacgcctctccctaccgggccagctgggggccctcacctcccagcccctgcacagacacggctcggacccgggcagttagtggggctgcccagtgtggacacgtggctcacccagggatcaaggcgctgctgggccgctccccttggaggccctgctcaggaggccctgaccgtggaaggggagaggaactcgaaagcacagctcctcccccagcccttgggaccatcttctcctgcagtcccctgggccccagtgagaggggcaggggcagggccggcagtaggtggggcctgtggtccccccactgccctgagggcattagctggtctaactgcccggaggcacccggccctgggccttaggcacctcaaggacttttctgctatttactgctcttattgttaaggataataattaaggatcatatgaataattaatgaagatgctgatgactatgaataataaataattatcctgaggaga

SEQ ID NO: 510 - DNA, 3884 bp, Homo sapiens
  source 1..3884: mol_type = genomic DNA
  misc_feature 1..3884: note = cDNA of KCNH2 gene SNP c.2383G>A (p.Val795Ile)
atgccggtgcggaggggccacgtcgcgccgcagaacaccttcctggacaccatcatccgcaagtttgagggccagagccgtaagttcatcatcgccaacgctcgggtggagaactgcgccgtcatctactgcaacgacggcttctgcgagctgtgcggctactcgcgggccgaggtgatgcagcgaccctgcacctgcgacttcctgcacgggccgcgcacgcagcgccgcgctgccgcgcagatcgcgcaggcactgctgggcgccgaggagcgcaaagtggaaatcgccttctaccggaaagatgggagctgcttcctatgtctggtggatgtggtgcccgtgaagaacgaggatggggctgtcatcatgttcatcctcaatttcgaggtggtgatggagaaggacatggtggggtccccggctcatgacaccaaccaccggggcccccccaccagctggctggccccaggccgcgccaagaccttccgcctgaagctgcccgcgctgctggcgctgacggcccgggagtcgtcggtgcggtcgggcggcgcgggcggcgcgggcgccccgggggccgtggtggtggacgtggacctgacgcccgcggcacccagcagcgagtcgctggccctggacgaagtgacagccatggacaaccacgtggcagggctcgggcccgcggaggagcggcgtgcgctggtgggtcccggctctccgccccgcagcgcgcccggccagctcccatcgccccgggcgcacagcctcaaccccgacgcctcgggctccagctgcagcctggcccggacgcgctcccgagaaagctgcgccagcgtgcgccgcgcctcgtcggccgacgacatcgaggccatgcgcgccggggtgctgcccccgccaccgcgccacgccagcaccggggccatgcacccactgcgcagcggcttgctcaactccacctcggactccgacctcgtgcgctaccgcaccattagcaagattccccaaatcaccctcaactttgtggacctcaagggcgaccccttcttggcttcgcccaccagtgaccgtgagatcatagcacctaagataaaggagcgaacccacaatgtcactgagaaggtcacccaggtcctgtccctgggcgccgacgtgctgcctgagtacaagctgcaggcaccgcgcatccaccgctggaccatcctgcattacagccccttcaaggccgtgtgggactggctcatcctgctgctggtcatctacacggctgtcttcacaccctactcggctgccttcctgctgaaggagacggaagaaggcccgcctgctaccgagtgtggctacgcctgccagccgctggctgtggtggacctcatcgtggacatcatgttcattgtggacatcctcatcaacttccgcaccacctacgtcaatgccaacgaggaggtggtcagccaccccggccgcatcgccgtccactacttcaagggctggttcctcatcgacatggtggccgccatccccttcgacctgctcatcttcggctctggctctgaggagctgatcgggctgctgaagactgcgcggctgctgcggctggtgcgcgtggcgcggaagctggatcgctactcagagtacggcgcggccgtgctgttcttgctcatgtgcacctttgcgctcatcgcgcactggctagcctgcatctggtacgccatcggcaacatggagcagccacacatggactcacgcatcggctggctgcacaacctgggcgaccagataggcaaaccctacaacagcagcggcctgggcggcccctccatcaaggacaagtatgtgacggcgctctacttcaccttcagcagcctcaccagtgtgggcttcggcaacgtctctcccaacaccaactcagagaagatcttctccatctgcgtcatgctcattggctccctcatgtatgctagcatcttcggcaacgtgtcggccatcatccagcggctgtactcgggcacagcccgctaccacacacagatgctgcgggtgcgggagttcatccgcttccaccagatccccaatcccctgcgccagcgcctcgaggagtacttccagcacgcctggtcctacaccaacggcatcgacatgaacgcggtgctgaagggcttccctgagtgcctgcaggctgacatctgcctgcacctgaaccgctcactgctgcagcactgcaaacccttccgaggggccaccaagggctgccttcgggccctggccatgaagttcaagaccacacatgcaccgccaggggacacactggtgcatgctggggacctgctcaccgccctgtacttcatctcccggggctccatcgagatcctgcggggcgacgtcatcgtggccatcctggggaagaatgacatctttggggagcctctgaacctgtatgcaaggcctggcaagtcgaacggggatgtgcgggccctcacctactgtgacctacacaagatccatcgggacgacctgctggaggtgctggacatgtaccctgagttctccgaccacttctggtccagcctggagatcaccttcaacctgcgagataccaacatgatcccgggctcccccggcagtacggagttagagggtggcttcagtcggcaacgcaagcgcaagttgtccttccgcaggcgcacggacaaggacacggagcagccaggggaggtgtcggccttggggccgggccgggcgggggcagggccgagtagccggggccggccgggggggccgtggggggagagcccgtccagtggcccctccagccctgagagcagtgaggatgagggcccaggccgcagctccagccccctccgcctggtgcccttctccagccccaggccccccggagagccgccgggtggggagcccctgatggaggactgcgagaagagcagcgacacttgcaaccccctgtcaggcgccttctcaggagtgtccaacattttcagcttctggggggacagtcggggccgccagtaccaggagctccctcgatgccccgcccccacccccagcctcctcaacatccccctctccagcccgggtcggcggccccggggcgacgtggagagcaggctggatgccctccagcgccagctcaacaggctggagacccggctgagtgcagacatggccactgtcctgcagctgctacagaggcagatgacgctggtcccgcccgcctacagtgctgtgaccaccccggggcctggccccacttccacatccccgctgttgcccgtcagccccctccccaccctcaccttggactcgctttctcaggtttcccagttcatggcgtgtgaggagctgcccccgggggccccagagcttccccaagaaggccccacacgacgcctctccctaccgggccagctgggggccctcacctcccagcccctgcacagacacggctcggacccgggcagttagtggggctgcccagtgtggacacgtggctcacccagggatcaaggcgctgctgggccgctccccttggaggccctgctcaggaggccctgaccgtggaaggggagaggaactcgaaagcacagctcctcccccagcccttgggaccatcttctcctgcagtcccctgggccccagtgagaggggcaggggcagggccggcagtaggtggggcctgtggtccccccactgccctgagggcattagctggtctaactgcccggaggcacccggccctgggccttaggcacctcaaggacttttctgctatttactgctcttattgttaaggataataattaaggatcatatgaataattaatgaagatgctgatgactatgaataataaataattatcctgaggaga

SEQ ID NO: 511 - DNA, 3884 bp, Homo sapiens
  source 1..3884: mol_type = genomic DNA
  misc_feature 1..3884: note = cDNA of KCNH2 gene SNP c.2386G>C (p.Val796Leu)
atgccggtgcggaggggccacgtcgcgccgcagaacaccttcctggacaccatcatccgcaagtttgagggccagagccgtaagttcatcatcgccaacgctcgggtggagaactgcgccgtcatctactgcaacgacggcttctgcgagctgtgcggctactcgcgggccgaggtgatgcagcgaccctgcacctgcgacttcctgcacgggccgcgcacgcagcgccgcgctgccgcgcagatcgcgcaggcactgctgggcgccgaggagcgcaaagtggaaatcgccttctaccggaaagatgggagctgcttcctatgtctggtggatgtggtgcccgtgaagaacgaggatggggctgtcatcatgttcatcctcaatttcgaggtggtgatggagaaggacatggtggggtccccggctcatgacaccaaccaccggggcccccccaccagctggctggccccaggccgcgccaagaccttccgcctgaagctgcccgcgctgctggcgctgacggcccgggagtcgtcggtgcggtcgggcggcgcgggcggcgcgggcgccccgggggccgtggtggtggacgtggacctgacgcccgcggcacccagcagcgagtcgctggccctggacgaagtgacagccatggacaaccacgtggcagggctcgggcccgcggaggagcggcgtgcgctggtgggtcccggctctccgccccgcagcgcgcccggccagctcccatcgccccgggcgcacagcctcaaccccgacgcctcgggctccagctgcagcctggcccggacgcgctcccgagaaagctgcgccagcgtgcgccgcgcctcgtcggccgacgacatcgaggccatgcgcgccggggtgctgcccccgccaccgcgccacgccagcaccggggccatgcacccactgcgcagcggcttgctcaactccacctcggactccgacctcgtgcgctaccgcaccattagcaagattccccaaatcaccctcaactttgtggacctcaagggcgaccccttcttggcttcgcccaccagtgaccgtgagatcatagcacctaagataaaggagcgaacccacaatgtcactgagaaggtcacccaggtcctgtccctgggcgccgacgtgctgcctgagtacaagctgcaggcaccgcgcatccaccgctggaccatcctgcattacagccccttcaaggccgtgtgggactggctcatcctgctgctggtcatctacacggctgtcttcacaccctactcggctgccttcctgctgaaggagacggaagaaggcccgcctgctaccgagtgtggctacgcctgccagccgctggctgtggtggacctcatcgtggacatcatgttcattgtggacatcctcatcaacttccgcaccacctacgtcaatgccaacgaggaggtggtcagccaccccggccgcatcgccgtccactacttcaagggctggttcctcatcgacatggtggccgccatccccttcgacctgctcatcttcggctctggctctgaggagctgatcgggctgctgaagactgcgcggctgctgcggctggtgcgcgtggcgcggaagctggatcgctactcagagtacggcgcggccgtgctgttcttgctcatgtgcacctttgcgctcatcgcgcactggctagcctgcatctggtacgccatcggcaacatggagcagccacacatggactcacgcatcggctggctgcacaacctgggcgaccagataggcaaaccctacaacagcagcggcctgggcggcccctccatcaaggacaagtatgtgacggcgctctacttcaccttcagcagcctcaccagtgtgggcttcggcaacgtctctcccaacaccaactcagagaagatcttctccatctgcgtcatgctcattggctccctcatgtatgctagcatcttcggcaacgtgtcggccatcatccagcggctgtactcgggcacagcccgctaccacacacagatgctgcgggtgcgggagttcatccgcttccaccagatccccaatcccctgcgccagcgcctcgaggagtacttccagcacgcctggtcctacaccaacggcatcgacatgaacgcggtgctgaagggcttccctgagtgcctgcaggctgacatctgcctgcacctgaaccgctcactgctgcagcactgcaaacccttccgaggggccaccaagggctgccttcgggccctggccatgaagttcaagaccacacatgcaccgccaggggacacactggtgcatgctggggacctgctcaccgccctgtacttcatctcccggggctccatcgagatcctgcggggcgacgtcgtcctggccatcctggggaagaatgacatctttggggagcctctgaacctgtatgcaaggcctggcaagtcgaacggggatgtgcgggccctcacctactgtgacctacacaagatccatcgggacgacctgctggaggtgctggacatgtaccctgagttctccgaccacttctggtccagcctggagatcaccttcaacctgcgagataccaacatgatcccgggctcccccggcagtacggagttagagggtggcttcagtcggcaacgcaagcgcaagttgtccttccgcaggcgcacggacaaggacacggagcagccaggggaggtgtcggccttggggccgggccgggcgggggcagggccgagtagccggggccggccgggggggccgtggggggagagcccgtccagtggcccctccagccctgagagcagtgaggatgagggcccaggccgcagctccagccccctccgcctggtgcccttctccagccccaggccccccggagagccgccgggtggggagcccctgatggaggactgcgagaagagcagcgacacttgcaaccccctgtcaggcgccttctcaggagtgtccaacattttcagcttctggggggacagtcggggccgccagtaccaggagctccctcgatgccccgcccccacccccagcctcctcaacatccccctctccagcccgggtcggcggccccggggcgacgtggagagcaggctggatgccctccagcgccagctcaacaggctggagacccggctgagtgcagacatggccactgtcctgcagctgctacagaggcagatgacgctggtcccgcccgcctacagtgctgtgaccaccccggggcctggccccacttccacatccccgctgttgcccgtcagccccctccccaccctcaccttggactcgctttctcaggtttcccagttcatggcgtgtgaggagctgcccccgggggccccagagcttccccaagaaggccccacacgacgcctctccctaccgggccagctgggggccctcacctcccagcccctgcacagacacggctcggacccgggcagttagtggggctgcccagtgtggacacgtggctcacccagggatcaaggcgctgctgggccgctccccttggaggccctgctcaggaggccctgaccgtggaaggggagaggaactcgaaagcacagctcctcccccagcccttgggaccatcttctcctgcagtcccctgggccccagtgagaggggcaggggcagggccggcagtaggtggggcctgtggtccccccactgccctgagggcattagctggtctaactgcccggaggcacccggccctgggccttaggcacctcaaggacttttctgctatttactgctcttattgttaaggataataattaaggatcatatgaataattaatgaagatgctgatgactatgaataataaataattatcctgaggaga

SEQ ID NO: 512 - DNA, 3884 bp, Homo sapiens
  source 1..3884: mol_type = genomic DNA
  misc_feature 1..3884: note = cDNA of KCNH2 gene SNP c.2386G>T (p.Val796Leu)
atgccggtgcggaggggccacgtcgcgccgcagaacaccttcctggacaccatcatccgcaagtttgagggccagagccgtaagttcatcatcgccaacgctcgggtggagaactgcgccgtcatctactgcaacgacggcttctgcgagctgtgcggctactcgcgggccgaggtgatgcagcgaccctgcacctgcgacttcctgcacgggccgcgcacgcagcgccgcgctgccgcgcagatcgcgcaggcactgctgggcgccgaggagcgcaaagtggaaatcgccttctaccggaaagatgggagctgcttcctatgtctggtggatgtggtgcccgtgaagaacgaggatggggctgtcatcatgttcatcctcaatttcgaggtggtgatggagaaggacatggtggggtccccggctcatgacaccaaccaccggggcccccccaccagctggctggccccaggccgcgccaagaccttccgcctgaagctgcccgcgctgctggcgctgacggcccgggagtcgtcggtgcggtcgggcggcgcgggcggcgcgggcgccccgggggccgtggtggtggacgtggacctgacgcccgcggcacccagcagcgagtcgctggccctggacgaagtgacagccatggacaaccacgtggcagggctcgggcccgcggaggagcggcgtgcgctggtgggtcccggctctccgccccgcagcgcgcccggccagctcccatcgccccgggcgcacagcctcaaccccgacgcctcgggctccagctgcagcctggcccggacgcgctcccgagaaagctgcgccagcgtgcgccgcgcctcgtcggccgacgacatcgaggccatgcgcgccggggtgctgcccccgccaccgcgccacgccagcaccggggccatgcacccactgcgcagcggcttgctcaactccacctcggactccgacctcgtgcgctaccgcaccattagcaagattccccaaatcaccctcaactttgtggacctcaagggcgaccccttcttggcttcgcccaccagtgaccgtgagatcatagcacctaagataaaggagcgaacccacaatgtcactgagaaggtcacccaggtcctgtccctgggcgccgacgtgctgcctgagtacaagctgcaggcaccgcgcatccaccgctggaccatcctgcattacagccccttcaaggccgtgtgggactggctcatcctgctgctggtcatctacacggctgtcttcacaccctactcggctgccttcctgctgaaggagacggaagaaggcccgcctgctaccgagtgtggctacgcctgccagccgctggctgtggtggacctcatcgtggacatcatgttcattgtggacatcctcatcaacttccgcaccacctacgtcaatgccaacgaggaggtggtcagccaccccggccgcatcgccgtccactacttcaagggctggttcctcatcgacatggtggccgccatccccttcgacctgctcatcttcggctctggctctgaggagctgatcgggctgctgaagactgcgcggctgctgcggctggtgcgcgtggcgcggaagctggatcgctactcagagtacggcgcggccgtgctgttcttgctcatgtgcacctttgcgctcatcgcgcactggctagcctgcatctggtacgccatcggcaacatggagcagccacacatggactcacgcatcggctggctgcacaacctgggcgaccagataggcaaaccctacaacagcagcggcctgggcggcccctccatcaaggacaagtatgtgacggcgctctacttcaccttcagcagcctcaccagtgtgggcttcggcaacgtctctcccaacaccaactcagagaagatcttctccatctgcgtcatgctcattggctccctcatgtatgctagcatcttcggcaacgtgtcggccatcatccagcggctgtactcgggcacagcccgctaccacacacagatgctgcgggtgcgggagttcatccgcttccaccagatccccaatcccctgcgccagcgcctcgaggagtacttccagcacgcctggtcctacaccaacggcatcgacatgaacgcggtgctgaagggcttccctgagtgcctgcaggctgacatctgcctgcacctgaaccgctcactgctgcagcactgcaaacccttccgaggggccaccaagggctgccttcgggccctggccatgaagttcaagaccacacatgcaccgccaggggacacactggtgcatgctggggacctgctcaccgccctgtacttcatctcccggggctccatcgagatcctgcggggcgacgtcgtcttggccatcctggggaagaatgacatctttggggagcctctgaacctgtatgcaaggcctggcaagtcgaacggggatgtgcgggccctcacctactgtgacctacacaagatccatcgggacgacctgctggaggtgctggacatgtaccctgagttctccgaccacttctggtccagcctggagatcaccttcaacctgcgagataccaacatgatcccgggctcccccggcagtacggagttagagggtggcttcagtcggcaacgcaagcgcaagttgtccttccgcaggcgcacggacaaggacacggagcagccaggggaggtgtcggccttggggccgggccgggcgggggcagggccgagtagccggggccggccgggggggccgtggggggagagcccgtccagtggcccctccagccctgagagcagtgaggatgagggcccaggccgcagctccagccccctccgcctggtgcccttctccagccccaggccccccggagagccgccgggtggggagcccctgatggaggactgcgagaagagcagcgacacttgcaaccccctgtcaggcgccttctcaggagtgtccaacattttcagcttctggggggacagtcggggccgccagtaccaggagctccctcgatgccccgcccccacccccagcctcctcaacatccccctctccagcccgggtcggcggccccggggcgacgtggagagcaggctggatgccctccagcgccagctcaacaggctggagacccggctgagtgcagacatggccactgtcctgcagctgctacagaggcagatgacgctggtcccgcccgcctacagtgctgtgaccaccccggggcctggccccacttccacatccccgctgttgcccgtcagccccctccccaccctcaccttggactcgctttctcaggtttcccagttcatggcgtgtgaggagctgcccccgggggccccagagcttccccaagaaggccccacacgacgcctctccctaccgggccagctgggggccctcacctcccagcccctgcacagacacggctcggacccgggcagttagtggggctgcccagtgtggacacgtggctcacccagggatcaaggcgctgctgggccgctccccttggaggccctgctcaggaggccctgaccgtggaaggggagaggaactcgaaagcacagctcctcccccagcccttgggaccatcttctcctgcagtcccctgggccccagtgagaggggcaggggcagggccggcagtaggtggggcctgtggtccccccactgccctgagggcattagctggtctaactgcccggaggcacccggccctgggccttaggcacctcaaggacttttctgctatttactgctcttattgttaaggataataattaaggatcatatgaataattaatgaagatgctgatgactatgaataataaataattatcctgaggaga

SEQ ID NO: 513 - DNA, 3884 bp, Homo sapiens
  source 1..3884: mol_type = genomic DNA
  misc_feature 1..3884: note = cDNA of KCNH2 gene SNP c.2387T>G (p.Val796Gly)
atgccggtgcggaggggccacgtcgcgccgcagaacaccttcctggacaccatcatccgcaagtttgagggccagagccgtaagttcatcatcgccaacgctcgggtggagaactgcgccgtcatctactgcaacgacggcttctgcgagctgtgcggctactcgcgggccgaggtgatgcagcgaccctgcacctgcgacttcctgcacgggccgcgcacgcagcgccgcgctgccgcgcagatcgcgcaggcactgctgggcgccgaggagcgcaaagtggaaatcgccttctaccggaaagatgggagctgcttcctatgtctggtggatgtggtgcccgtgaagaacgaggatggggctgtcatcatgttcatcctcaatttcgaggtggtgatggagaaggacatggtggggtccccggctcatgacaccaaccaccggggcccccccaccagctggctggccccaggccgcgccaagaccttccgcctgaagctgcccgcgctgctggcgctgacggcccgggagtcgtcggtgcggtcgggcggcgcgggcggcgcgggcgccccgggggccgtggtggtggacgtggacctgacgcccgcggcacccagcagcgagtcgctggccctggacgaagtgacagccatggacaaccacgtggcagggctcgggcccgcggaggagcggcgtgcgctggtgggtcccggctctccgccccgcagcgcgcccggccagctcccatcgccccgggcgcacagcctcaaccccgacgcctcgggctccagctgcagcctggcccggacgcgctcccgagaaagctgcgccagcgtgcgccgcgcctcgtcggccgacgacatcgaggccatgcgcgccggggtgctgcccccgccaccgcgccacgccagcaccggggccatgcacccactgcgcagcggcttgctcaactccacctcggactccgacctcgtgcgctaccgcaccattagcaagattccccaaatcaccctcaactttgtggacctcaagggcgaccccttcttggcttcgcccaccagtgaccgtgagatcatagcacctaagataaaggagcgaacccacaatgtcactgagaaggtcacccaggtcctgtccctgggcgccgacgtgctgcctgagtacaagctgcaggcaccgcgcatccaccgctggaccatcctgcattacagccccttcaaggccgtgtgggactggctcatcctgctgctggtcatctacacggctgtcttcacaccctactcggctgccttcctgctgaaggagacggaagaaggcccgcctgctaccgagtgtggctacgcctgccagccgctggctgtggtggacctcatcgtggacatcatgttcattgtggacatcctcatcaacttccgcaccacctacgtcaatgccaacgaggaggtggtcagccaccccggccgcatcgccgtccactacttcaagggctggttcctcatcgacatggtggccgccatccccttcgacctgctcatcttcggctctggctctgaggagctgatcgggctgctgaagactgcgcggctgctgcggctggtgcgcgtggcgcggaagctggatcgctactcagagtacggcgcggccgtgctgttcttgctcatgtgcacctttgcgctcatcgcgcactggctagcctgcatctggtacgccatcggcaacatggagcagccacacatggactcacgcatcggctggctgcacaacctgggcgaccagataggcaaaccctacaacagcagcggcctgggcggcccctccatcaaggacaagtatgtgacggcgctctacttcaccttcagcagcctcaccagtgtgggcttcggcaacgtctctcccaacaccaactcagagaagatcttctccatctgcgtcatgctcattggctccctcatgtatgctagcatcttcggcaacgtgtcggccatcatccagcggctgtactcgggcacagcccgctaccacacacagatgctgcgggtgcgggagttcatccgcttccaccagatccccaatcccctgcgccagcgcctcgaggagtacttccagcacgcctggtcctacaccaacggcatcgacatgaacgcggtgctgaagggcttccctgagtgcctgcaggctgacatctgcctgcacctgaaccgctcactgctgcagcactgcaaacccttccgaggggccaccaagggctgccttcgggccctggccatgaagttcaagaccacacatgcaccgccaggggacacactggtgcatgctggggacctgctcaccgccctgtacttcatctcccggggctccatcgagatcctgcggggcgacgtcgtcggggccatcctggggaagaatgacatctttggggagcctctgaacctgtatgcaaggcctggcaagtcgaacggggatgtgcgggccctcacctactgtgacctacacaagatccatcgggacgacctgctggaggtgctggacatgtaccctgagttctccgaccacttctggtccagcctggagatcaccttcaacctgcgagataccaacatgatcccgggctcccccggcagtacggagttagagggtggcttcagtcggcaacgcaagcgcaagttgtccttccgcaggcgcacggacaaggacacggagcagccaggggaggtgtcggccttggggccgggccgggcgggggcagggccgagtagccggggccggccgggggggccgtggggggagagcccgtccagtggcccctccagccctgagagcagtgaggatgagggcccaggccgcagctccagccccctccgcctggtgcccttctccagccccaggccccccggagagccgccgggtggggagcccctgatggaggactgcgagaagagcagcgacacttgcaaccccctgtcaggcgccttctcaggagtgtccaacattttcagcttctggggggacagtcggggccgccagtaccaggagctccctcgatgccccgcccccacccccagcctcctcaacatccccctctccagcccgggtcggcggccccggggcgacgtggagagcaggctggatgccctccagcgccagctcaacaggctggagacccggctgagtgcagacatggccactgtcctgcagctgctacagaggcagatgacgctggtcccgcccgcctacagtgctgtgaccaccccggggcctggccccacttccacatccccgctgttgcccgtcagccccctccccaccctcaccttggactcgctttctcaggtttcccagttcatggcgtgtgaggagctgcccccgggggccccagagcttccccaagaaggccccacacgacgcctctccctaccgggccagctgggggccctcacctcccagcccctgcacagacacggctcggacccgggcagttagtggggctgcccagtgtggacacgtggctcacccagggatcaaggcgctgctgggccgctccccttggaggccctgctcaggaggccctgaccgtggaaggggagaggaactcgaaagcacagctcctcccccagcccttgggaccatcttctcctgcagtcccctgggccccagtgagaggggcaggggcagggccggcagtaggtggggcctgtggtccccccactgccctgagggcattagctggtctaactgcccggaggcacccggccctgggccttaggcacctcaaggacttttctgctatttactgctcttattgttaaggataataattaaggatcatatgaataattaatgaagatgctgatgactatgaataataaataattatcctgaggaga

SEQ ID NO: 514 - DNA, 3884 bp, Homo sapiens
  source 1..3884: mol_type = genomic DNA
  misc_feature 1..3884: note = cDNA of KCNH2 gene SNP c.238G>A (p.Ala80Thr)
atgccggtgcggaggggccacgtcgcgccgcagaacaccttcctggacaccatcatccgcaagtttgagggccagagccgtaagttcatcatcgccaacgctcgggtggagaactgcgccgtcatctactgcaacgacggcttctgcgagctgtgcggctactcgcgggccgaggtgatgcagcgaccctgcacctgcgacttcctgcacgggccgcgcacgcagcgccgcgctgccacgcagatcgcgcaggcactgctgggcgccgaggagcgcaaagtggaaatcgccttctaccggaaagatgggagctgcttcctatgtctggtggatgtggtgcccgtgaagaacgaggatggggctgtcatcatgttcatcctcaatttcgaggtggtgatggagaaggacatggtggggtccccggctcatgacaccaaccaccggggcccccccaccagctggctggccccaggccgcgccaagaccttccgcctgaagctgcccgcgctgctggcgctgacggcccgggagtcgtcggtgcggtcgggcggcgcgggcggcgcgggcgccccgggggccgtggtggtggacgtggacctgacgcccgcggcacccagcagcgagtcgctggccctggacgaagtgacagccatggacaaccacgtggcagggctcgggcccgcggaggagcggcgtgcgctggtgggtcccggctctccgccccgcagcgcgcccggccagctcccatcgccccgggcgcacagcctcaaccccgacgcctcgggctccagctgcagcctggcccggacgcgctcccgagaaagctgcgccagcgtgcgccgcgcctcgtcggccgacgacatcgaggccatgcgcgccggggtgctgcccccgccaccgcgccacgccagcaccggggccatgcacccactgcgcagcggcttgctcaactccacctcggactccgacctcgtgcgctaccgcaccattagcaagattccccaaatcaccctcaactttgtggacctcaagggcgaccccttcttggcttcgcccaccagtgaccgtgagatcatagcacctaagataaaggagcgaacccacaatgtcactgagaaggtcacccaggtcctgtccctgggcgccgacgtgctgcctgagtacaagctgcaggcaccgcgcatccaccgctggaccatcctgcattacagccccttcaaggccgtgtgggactggctcatcctgctgctggtcatctacacggctgtcttcacaccctactcggctgccttcctgctgaaggagacggaagaaggcccgcctgctaccgagtgtggctacgcctgccagccgctggctgtggtggacctcatcgtggacatcatgttcattgtggacatcctcatcaacttccgcaccacctacgtcaatgccaacgaggaggtggtcagccaccccggccgcatcgccgtccactacttcaagggctggttcctcatcgacatggtggccgccatccccttcgacctgctcatcttcggctctggctctgaggagctgatcgggctgctgaagactgcgcggctgctgcggctggtgcgcgtggcgcggaagctggatcgctactcagagtacggcgcggccgtgctgttcttgctcatgtgcacctttgcgctcatcgcgcactggctagcctgcatctggtacgccatcggcaacatggagcagccacacatggactcacgcatcggctggctgcacaacctgggcgaccagataggcaaaccctacaacagcagcggcctgggcggcccctccatcaaggacaagtatgtgacggcgctctacttcaccttcagcagcctcaccagtgtgggcttcggcaacgtctctcccaacaccaactcagagaagatcttctccatctgcgtcatgctcattggctccctcatgtatgctagcatcttcggcaacgtgtcggccatcatccagcggctgtactcgggcacagcccgctaccacacacagatgctgcgggtgcgggagttcatccgcttccaccagatccccaatcccctgcgccagcgcctcgaggagtacttccagcacgcctggtcctacaccaacggcatcgacatgaacgcggtgctgaagggcttccctgagtgcctgcaggctgacatctgcctgcacctgaaccgctcactgctgcagcactgcaaacccttccgaggggccaccaagggctgccttcgggccctggccatgaagttcaagaccacacatgcaccgccaggggacacactggtgcatgctggggacctgctcaccgccctgtacttcatctcccggggctccatcgagatcctgcggggcgacgtcgtcgtggccatcctggggaagaatgacatctttggggagcctctgaacctgtatgcaaggcctggcaagtcgaacggggatgtgcgggccctcacctactgtgacctacacaagatccatcgggacgacctgctggaggtgctggacatgtaccctgagttctccgaccacttctggtccagcctggagatcaccttcaacctgcgagataccaacatgatcccgggctcccccggcagtacggagttagagggtggcttcagtcggcaacgcaagcgcaagttgtccttccgcaggcgcacggacaaggacacggagcagccaggggaggtgtcggccttggggccgggccgggcgggggcagggccgagtagccggggccggccgggggggccgtggggggagagcccgtccagtggcccctccagccctgagagcagtgaggatgagggcccaggccgcagctccagccccctccgcctggtgcccttctccagccccaggccccccggagagccgccgggtggggagcccctgatggaggactgcgagaagagcagcgacacttgcaaccccctgtcaggcgccttctcaggagtgtccaacattttcagcttctggggggacagtcggggccgccagtaccaggagctccctcgatgccccgcccccacccccagcctcctcaacatccccctctccagcccgggtcggcggccccggggcgacgtggagagcaggctggatgccctccagcgccagctcaacaggctggagacccggctgagtgcagacatggccactgtcctgcagctgctacagaggcagatgacgctggtcccgcccgcctacagtgctgtgaccaccccggggcctggccccacttccacatccccgctgttgcccgtcagccccctccccaccctcaccttggactcgctttctcaggtttcccagttcatggcgtgtgaggagctgcccccgggggccccagagcttccccaagaaggccccacacgacgcctctccctaccgggccagctgggggccctcacctcccagcccctgcacagacacggctcggacccgggcagttagtggggctgcccagtgtggacacgtggctcacccagggatcaaggcgctgctgggccgctccccttggaggccctgctcaggaggccctgaccgtggaaggggagaggaactcgaaagcacagctcctcccccagcccttgggaccatcttctcctgcagtcccctgggccccagtgagaggggcaggggcagggccggcagtaggtggggcctgtggtccccccactgccctgagggcattagctggtctaactgcccggaggcacccggccctgggccttaggcacctcaaggacttttctgctatttactgctcttattgttaaggataataattaaggatcatatgaataattaatgaagatgctgatgactatgaataataaataattatcctgaggaga

SEQ ID NO: 515 - DNA, 3884 bp, Homo sapiens
  source 1..3884: mol_type = genomic DNA
  misc_feature 1..3884: note = cDNA of KCNH2 gene SNP c.238G>C (p.Ala80Pro)
atgccggtgcggaggggccacgtcgcgccgcagaacaccttcctggacaccatcatccgcaagtttgagggccagagccgtaagttcatcatcgccaacgctcgggtggagaactgcgccgtcatctactgcaacgacggcttctgcgagctgtgcggctactcgcgggccgaggtgatgcagcgaccctgcacctgcgacttcctgcacgggccgcgcacgcagcgccgcgctgccccgcagatcgcgcaggcactgctgggcgccgaggagcgcaaagtggaaatcgccttctaccggaaagatgggagctgcttcctatgtctggtggatgtggtgcccgtgaagaacgaggatggggctgtcatcatgttcatcctcaatttcgaggtggtgatggagaaggacatggtggggtccccggctcatgacaccaaccaccggggcccccccaccagctggctggccccaggccgcgccaagaccttccgcctgaagctgcccgcgctgctggcgctgacggcccgggagtcgtcggtgcggtcgggcggcgcgggcggcgcgggcgccccgggggccgtggtggtggacgtggacctgacgcccgcggcacccagcagcgagtcgctggccctggacgaagtgacagccatggacaaccacgtggcagggctcgggcccgcggaggagcggcgtgcgctggtgggtcccggctctccgccccgcagcgcgcccggccagctcccatcgccccgggcgcacagcctcaaccccgacgcctcgggctccagctgcagcctggcccggacgcgctcccgagaaagctgcgccagcgtgcgccgcgcctcgtcggccgacgacatcgaggccatgcgcgccggggtgctgcccccgccaccgcgccacgccagcaccggggccatgcacccactgcgcagcggcttgctcaactccacctcggactccgacctcgtgcgctaccgcaccattagcaagattccccaaatcaccctcaactttgtggacctcaagggcgaccccttcttggcttcgcccaccagtgaccgtgagatcatagcacctaagataaaggagcgaacccacaatgtcactgagaaggtcacccaggtcctgtccctgggcgccgacgtgctgcctgagtacaagctgcaggcaccgcgcatccaccgctggaccatcctgcattacagccccttcaaggccgtgtgggactggctcatcctgctgctggtcatctacacggctgtcttcacaccctactcggctgccttcctgctgaaggagacggaagaaggcccgcctgctaccgagtgtggctacgcctgccagccgctggctgtggtggacctcatcgtggacatcatgttcattgtggacatcctcatcaacttccgcaccacctacgtcaatgccaacgaggaggtggtcagccaccccggccgcatcgccgtccactacttcaagggctggttcctcatcgacatggtggccgccatccccttcgacctgctcatcttcggctctggctctgaggagctgatcgggctgctgaagactgcgcggctgctgcggctggtgcgcgtggcgcggaagctggatcgctactcagagtacggcgcggccgtgctgttcttgctcatgtgcacctttgcgctcatcgcgcactggctagcctgcatctggtacgccatcggcaacatggagcagccacacatggactcacgcatcggctggctgcacaacctgggcgaccagataggcaaaccctacaacagcagcggcctgggcggcccctccatcaaggacaagtatgtgacggcgctctacttcaccttcagcagcctcaccagtgtgggcttcggcaacgtctctcccaacaccaactcagagaagatcttctccatctgcgtcatgctcattggctccctcatgtatgctagcatcttcggcaacgtgtcggccatcatccagcggctgtactcgggcacagcccgctaccacacacagatgctgcgggtgcgggagttcatccgcttccaccagatccccaatcccctgcgccagcgcctcgaggagtacttccagcacgcctggtcctacaccaacggcatcgacatgaacgcggtgctgaagggcttccctgagtgcctgcaggctgacatctgcctgcacctgaaccgctcactgctgcagcactgcaaacccttccgaggggccaccaagggctgccttcgggccctggccatgaagttcaagaccacacatgcaccgccaggggacacactggtgcatgctggggacctgctcaccgccctgtacttcatctcccggggctccatcgagatcctgcggggcgacgtcgtcgtggccatcctggggaagaatgacatctttggggagcctctgaacctgtatgcaaggcctggcaagtcgaacggggatgtgcgggccctcacctactgtgacctacacaagatccatcgggacgacctgctggaggtgctggacatgtaccctgagttctccgaccacttctggtccagcctggagatcaccttcaacctgcgagataccaacatgatcccgggctcccccggcagtacggagttagagggtggcttcagtcggcaacgcaagcgcaagttgtccttccgcaggcgcacggacaaggacacggagcagccaggggaggtgtcggccttggggccgggccgggcgggggcagggccgagtagccggggccggccgggggggccgtggggggagagcccgtccagtggcccctccagccctgagagcagtgaggatgagggcccaggccgcagctccagccccctccgcctggtgcccttctccagccccaggccccccggagagccgccgggtggggagcccctgatggaggactgcgagaagagcagcgacacttgcaaccccctgtcaggcgccttctcaggagtgtccaacattttcagcttctggggggacagtcggggccgccagtaccaggagctccctcgatgccccgcccccacccccagcctcctcaacatccccctctccagcccgggtcggcggccccggggcgacgtggagagcaggctggatgccctccagcgccagctcaacaggctggagacccggctgagtgcagacatggccactgtcctgcagctgctacagaggcagatgacgctggtcccgcccgcctacagtgctgtgaccaccccggggcctggccccacttccacatccccgctgttgcccgtcagccccctccccaccctcaccttggactcgctttctcaggtttcccagttcatggcgtgtgaggagctgcccccgggggccccagagcttccccaagaaggccccacacgacgcctctccctaccgggccagctgggggccctcacctcccagcccctgcacagacacggctcggacccgggcagttagtggggctgcccagtgtggacacgtggctcacccagggatcaaggcgctgctgggccgctccccttggaggccctgctcaggaggccctgaccgtggaaggggagaggaactcgaaagcacagctcctcccccagcccttgggaccatcttctcctgcagtcccctgggccccagtgagaggggcaggggcagggccggcagtaggtggggcctgtggtccccccactgccctgagggcattagctggtctaactgcccggaggcacccggccctgggccttaggcacctcaaggacttttctgctatttactgctcttattgttaaggataataattaaggatcatatgaataattaatgaagatgctgatgactatgaataataaataattatcctgaggaga

SEQ ID NO: 516 - DNA, 3884 bp, Homo sapiens
  source 1..3884: mol_type = genomic DNA
  misc_feature 1..3884: note = cDNA of KCNH2 gene SNP c.2390C>A (p.Ala797Asp)
atgccggtgcggaggggccacgtcgcgccgcagaacaccttcctggacaccatcatccgcaagtttgagggccagagccgtaagttcatcatcgccaacgctcgggtggagaactgcgccgtcatctactgcaacgacggcttctgcgagctgtgcggctactcgcgggccgaggtgatgcagcgaccctgcacctgcgacttcctgcacgggccgcgcacgcagcgccgcgctgccgcgcagatcgcgcaggcactgctgggcgccgaggagcgcaaagtggaaatcgccttctaccggaaagatgggagctgcttcctatgtctggtggatgtggtgcccgtgaagaacgaggatggggctgtcatcatgttcatcctcaatttcgaggtggtgatggagaaggacatggtggggtccccggctcatgacaccaaccaccggggcccccccaccagctggctggccccaggccgcgccaagaccttccgcctgaagctgcccgcgctgctggcgctgacggcccgggagtcgtcggtgcggtcgggcggcgcgggcggcgcgggcgccccgggggccgtggtggtggacgtggacctgacgcccgcggcacccagcagcgagtcgctggccctggacgaagtgacagccatggacaaccacgtggcagggctcgggcccgcggaggagcggcgtgcgctggtgggtcccggctctccgccccgcagcgcgcccggccagctcccatcgccccgggcgcacagcctcaaccccgacgcctcgggctccagctgcagcctggcccggacgcgctcccgagaaagctgcgccagcgtgcgccgcgcctcgtcggccgacgacatcgaggccatgcgcgccggggtgctgcccccgccaccgcgccacgccagcaccggggccatgcacccactgcgcagcggcttgctcaactccacctcggactccgacctcgtgcgctaccgcaccattagcaagattccccaaatcaccctcaactttgtggacctcaagggcgaccccttcttggcttcgcccaccagtgaccgtgagatcatagcacctaagataaaggagcgaacccacaatgtcactgagaaggtcacccaggtcctgtccctgggcgccgacgtgctgcctgagtacaagctgcaggcaccgcgcatccaccgctggaccatcctgcattacagccccttcaaggccgtgtgggactggctcatcctgctgctggtcatctacacggctgtcttcacaccctactcggctgccttcctgctgaaggagacggaagaaggcccgcctgctaccgagtgtggctacgcctgccagccgctggctgtggtggacctcatcgtggacatcatgttcattgtggacatcctcatcaacttccgcaccacctacgtcaatgccaacgaggaggtggtcagccaccccggccgcatcgccgtccactacttcaagggctggttcctcatcgacatggtggccgccatccccttcgacctgctcatcttcggctctggctctgaggagctgatcgggctgctgaagactgcgcggctgctgcggctggtgcgcgtggcgcggaagctggatcgctactcagagtacggcgcggccgtgctgttcttgctcatgtgcacctttgcgctcatcgcgcactggctagcctgcatctggtacgccatcggcaacatggagcagccacacatggactcacgcatcggctggctgcacaacctgggcgaccagataggcaaaccctacaacagcagcggcctgggcggcccctccatcaaggacaagtatgtgacggcgctctacttcaccttcagcagcctcaccagtgtgggcttcggcaacgtctctcccaacaccaactcagagaagatcttctccatctgcgtcatgctcattggctccctcatgtatgctagcatcttcggcaacgtgtcggccatcatccagcggctgtactcgggcacagcccgctaccacacacagatgctgcgggtgcgggagttcatccgcttccaccagatccccaatcccctgcgccagcgcctcgaggagtacttccagcacgcctggtcctacaccaacggcatcgacatgaacgcggtgctgaagggcttccctgagtgcctgcaggctgacatctgcctgcacctgaaccgctcactgctgcagcactgcaaacccttccgaggggccaccaagggctgccttcgggccctggccatgaagttcaagaccacacatgcaccgccaggggacacactggtgcatgctggggacctgctcaccgccctgtacttcatctcccggggctccatcgagatcctgcggggcgacgtcgtcgtggacatcctggggaagaatgacatctttggggagcctctgaacctgtatgcaaggcctggcaagtcgaacggggatgtgcgggccctcacctactgtgacctacacaagatccatcgggacgacctgctggaggtgctggacatgtaccctgagttctccgaccacttctggtccagcctggagatcaccttcaacctgcgagataccaacatgatcccgggctcccccggcagtacggagttagagggtggcttcagtcggcaacgcaagcgcaagttgtccttccgcaggcgcacggacaaggacacggagcagccaggggaggtgtcggccttggggccgggccgggcgggggcagggccgagtagccggggccggccgggggggccgtggggggagagcccgtccagtggcccctccagccctgagagcagtgaggatgagggcccaggccgcagctccagccccctccgcctggtgcccttctccagccccaggccccccggagagccgccgggtggggagcccctgatggaggactgcgagaagagcagcgacacttgcaaccccctgtcaggcgccttctcaggagtgtccaacattttcagcttctggggggacagtcggggccgccagtaccaggagctccctcgatgccccgcccccacccccagcctcctcaacatccccctctccagcccgggtcggcggccccggggcgacgtggagagcaggctggatgccctccagcgccagctcaacaggctggagacccggctgagtgcagacatggccactgtcctgcagctgctacagaggcagatgacgctggtcccgcccgcctacagtgctgtgaccaccccggggcctggccccacttccacatccccgctgttgcccgtcagccccctccccaccctcaccttggactcgctttctcaggtttcccagttcatggcgtgtgaggagctgcccccgggggccccagagcttccccaagaaggccccacacgacgcctctccctaccgggccagctgggggccctcacctcccagcccctgcacagacacggctcggacccgggcagttagtggggctgcccagtgtggacacgtggctcacccagggatcaaggcgctgctgggccgctccccttggaggccctgctcaggaggccctgaccgtggaaggggagaggaactcgaaagcacagctcctcccccagcccttgggaccatcttctcctgcagtcccctgggccccagtgagaggggcaggggcagggccggcagtaggtggggcctgtggtccccccactgccctgagggcattagctggtctaactgcccggaggcacccggccctgggccttaggcacctcaaggacttttctgctatttactgctcttattgttaaggataataattaaggatcatatgaataattaatgaagatgctgatgactatgaataataaataattatcctgaggaga

SEQ ID NO: 517 - DNA, 3884 bp, Homo sapiens
  source 1..3884: mol_type = genomic DNA
  misc_feature 1..3884: note = cDNA of KCNH2 gene SNP c.2396T>C (p.Leu799Pro)
atgccggtgcggaggggccacgtcgcgccgcagaacaccttcctggacaccatcatccgcaagtttgagggccagagccgtaagttcatcatcgccaacgctcgggtggagaactgcgccgtcatctactgcaacgacggcttctgcgagctgtgcggctactcgcgggccgaggtgatgcagcgaccctgcacctgcgacttcctgcacgggccgcgcacgcagcgccgcgctgccgcgcagatcgcgcaggcactgctgggcgccgaggagcgcaaagtggaaatcgccttctaccggaaagatgggagctgcttcctatgtctggtggatgtggtgcccgtgaagaacgaggatggggctgtcatcatgttcatcctcaatttcgaggtggtgatggagaaggacatggtggggtccccggctcatgacaccaaccaccggggcccccccaccagctggctggccccaggccgcgccaagaccttccgcctgaagctgcccgcgctgctggcgctgacggcccgggagtcgtcggtgcggtcgggcggcgcgggcggcgcgggcgccccgggggccgtggtggtggacgtggacctgacgcccgcggcacccagcagcgagtcgctggccctggacgaagtgacagccatggacaaccacgtggcagggctcgggcccgcggaggagcggcgtgcgctggtgggtcccggctctccgccccgcagcgcgcccggccagctcccatcgccccgggcgcacagcctcaaccccgacgcctcgggctccagctgcagcctggcccggacgcgctcccgagaaagctgcgccagcgtgcgccgcgcctcgtcggccgacgacatcgaggccatgcgcgccggggtgctgcccccgccaccgcgccacgccagcaccggggccatgcacccactgcgcagcggcttgctcaactccacctcggactccgacctcgtgcgctaccgcaccattagcaagattccccaaatcaccctcaactttgtggacctcaagggcgaccccttcttggcttcgcccaccagtgaccgtgagatcatagcacctaagataaaggagcgaacccacaatgtcactgagaaggtcacccaggtcctgtccctgggcgccgacgtgctgcctgagtacaagctgcaggcaccgcgcatccaccgctggaccatcctgcattacagccccttcaaggccgtgtgggactggctcatcctgctgctggtcatctacacggctgtcttcacaccctactcggctgccttcctgctgaaggagacggaagaaggcccgcctgctaccgagtgtggctacgcctgccagccgctggctgtggtggacctcatcgtggacatcatgttcattgtggacatcctcatcaacttccgcaccacctacgtcaatgccaacgaggaggtggtcagccaccccggccgcatcgccgtccactacttcaagggctggttcctcatcgacatggtggccgccatccccttcgacctgctcatcttcggctctggctctgaggagctgatcgggctgctgaagactgcgcggctgctgcggctggtgcgcgtggcgcggaagctggatcgctactcagagtacggcgcggccgtgctgttcttgctcatgtgcacctttgcgctcatcgcgcactggctagcctgcatctggtacgccatcggcaacatggagcagccacacatggactcacgcatcggctggctgcacaacctgggcgaccagataggcaaaccctacaacagcagcggcctgggcggcccctccatcaaggacaagtatgtgacggcgctctacttcaccttcagcagcctcaccagtgtgggcttcggcaacgtctctcccaacaccaactcagagaagatcttctccatctgcgtcatgctcattggctccctcatgtatgctagcatcttcggcaacgtgtcggccatcatccagcggctgtactcgggcacagcccgctaccacacacagatgctgcgggtgcgggagttcatccgcttccaccagatccccaatcccctgcgccagcgcctcgaggagtacttccagcacgcctggtcctacaccaacggcatcgacatgaacgcggtgctgaagggcttccctgagtgcctgcaggctgacatctgcctgcacctgaaccgctcactgctgcagcactgcaaacccttccgaggggccaccaagggctgccttcgggccctggccatgaagttcaagaccacacatgcaccgccaggggacacactggtgcatgctggggacctgctcaccgccctgtacttcatctcccggggctccatcgagatcctgcggggcgacgtcgtcgtggccatcccggggaagaatgacatctttggggagcctctgaacctgtatgcaaggcctggcaagtcgaacggggatgtgcgggccctcacctactgtgacctacacaagatccatcgggacgacctgctggaggtgctggacatgtaccctgagttctccgaccacttctggtccagcctggagatcaccttcaacctgcgagataccaacatgatcccgggctcccccggcagtacggagttagagggtggcttcagtcggcaacgcaagcgcaagttgtccttccgcaggcgcacggacaaggacacggagcagccaggggaggtgtcggccttggggccgggccgggcgggggcagggccgagtagccggggccggccgggggggccgtggggggagagcccgtccagtggcccctccagccctgagagcagtgaggatgagggcccaggccgcagctccagccccctccgcctggtgcccttctccagccccaggccccccggagagccgccgggtggggagcccctgatggaggactgcgagaagagcagcgacacttgcaaccccctgtcaggcgccttctcaggagtgtccaacattttcagcttctggggggacagtcggggccgccagtaccaggagctccctcgatgccccgcccccacccccagcctcctcaacatccccctctccagcccgggtcggcggccccggggcgacgtggagagcaggctggatgccctccagcgccagctcaacaggctggagacccggctgagtgcagacatggccactgtcctgcagctgctacagaggcagatgacgctggtcccgcccgcctacagtgctgtgaccaccccggggcctggccccacttccacatccccgctgttgcccgtcagccccctccccaccctcaccttggactcgctttctcaggtttcccagttcatggcgtgtgaggagctgcccccgggggccccagagcttccccaagaaggccccacacgacgcctctccctaccgggccagctgggggccctcacctcccagcccctgcacagacacggctcggacccgggcagttagtggggctgcccagtgtggacacgtggctcacccagggatcaaggcgctgctgggccgctccccttggaggccctgctcaggaggccctgaccgtggaaggggagaggaactcgaaagcacagctcctcccccagcccttgggaccatcttctcctgcagtcccctgggccccagtgagaggggcaggggcagggccggcagtaggtggggcctgtggtccccccactgccctgagggcattagctggtctaactgcccggaggcacccggccctgggccttaggcacctcaaggacttttctgctatttactgctcttattgttaaggataataattaaggatcatatgaataattaatgaagatgctgatgactatgaataataaataattatcctgaggaga

SEQ ID NO: 518 - DNA, 3884 bp, Homo sapiens
  source 1..3884: mol_type = genomic DNA
  misc_feature 1..3884: note = cDNA of KCNH2 gene SNP c.2398G>T (p.Gly800Trp)
atgccggtgcggaggggccacgtcgcgccgcagaacaccttcctggacaccatcatccgcaagtttgagggccagagccgtaagttcatcatcgccaacgctcgggtggagaactgcgccgtcatctactgcaacgacggcttctgcgagctgtgcggctactcgcgggccgaggtgatgcagcgaccctgcacctgcgacttcctgcacgggccgcgcacgcagcgccgcgctgccgcgcagatcgcgcaggcactgctgggcgccgaggagcgcaaagtggaaatcgccttctaccggaaagatgggagctgcttcctatgtctggtggatgtggtgcccgtgaagaacgaggatggggctgtcatcatgttcatcctcaatttcgaggtggtgatggagaaggacatggtggggtccccggctcatgacaccaaccaccggggcccccccaccagctggctggccccaggccgcgccaagaccttccgcctgaagctgcccgcgctgctggcgctgacggcccgggagtcgtcggtgcggtcgggcggcgcgggcggcgcgggcgccccgggggccgtggtggtggacgtggacctgacgcccgcggcacccagcagcgagtcgctggccctggacgaagtgacagccatggacaaccacgtggcagggctcgggcccgcggaggagcggcgtgcgctggtgggtcccggctctccgccccgcagcgcgcccggccagctcccatcgccccgggcgcacagcctcaaccccgacgcctcgggctccagctgcagcctggcccggacgcgctcccgagaaagctgcgccagcgtgcgccgcgcctcgtcggccgacgacatcgaggccatgcgcgccggggtgctgcccccgccaccgcgccacgccagcaccggggccatgcacccactgcgcagcggcttgctcaactccacctcggactccgacctcgtgcgctaccgcaccattagcaagattccccaaatcaccctcaactttgtggacctcaagggcgaccccttcttggcttcgcccaccagtgaccgtgagatcatagcacctaagataaaggagcgaacccacaatgtcactgagaaggtcacccaggtcctgtccctgggcgccgacgtgctgcctgagtacaagctgcaggcaccgcgcatccaccgctggaccatcctgcattacagccccttcaaggccgtgtgggactggctcatcctgctgctggtcatctacacggctgtcttcacaccctactcggctgccttcctgctgaaggagacggaagaaggcccgcctgctaccgagtgtggctacgcctgccagccgctggctgtggtggacctcatcgtggacatcatgttcattgtggacatcctcatcaacttccgcaccacctacgtcaatgccaacgaggaggtggtcagccaccccggccgcatcgccgtccactacttcaagggctggttcctcatcgacatggtggccgccatccccttcgacctgctcatcttcggctctggctctgaggagctgatcgggctgctgaagactgcgcggctgctgcggctggtgcgcgtggcgcggaagctggatcgctactcagagtacggcgcggccgtgctgttcttgctcatgtgcacctttgcgctcatcgcgcactggctagcctgcatctggtacgccatcggcaacatggagcagccacacatggactcacgcatcggctggctgcacaacctgggcgaccagataggcaaaccctacaacagcagcggcctgggcggcccctccatcaaggacaagtatgtgacggcgctctacttcaccttcagcagcctcaccagtgtgggcttcggcaacgtctctcccaacaccaactcagagaagatcttctccatctgcgtcatgctcattggctccctcatgtatgctagcatcttcggcaacgtgtcggccatcatccagcggctgtactcgggcacagcccgctaccacacacagatgctgcgggtgcgggagttcatccgcttccaccagatccccaatcccctgcgccagcgcctcgaggagtacttccagcacgcctggtcctacaccaacggcatcgacatgaacgcggtgctgaagggcttccctgagtgcctgcaggctgacatctgcctgcacctgaaccgctcactgctgcagcactgcaaacccttccgaggggccaccaagggctgccttcgggccctggccatgaagttcaagaccacacatgcaccgccaggggacacactggtgcatgctggggacctgctcaccgccctgtacttcatctcccggggctccatcgagatcctgcggggcgacgtcgtcgtggccatcctgtggaagaatgacatctttggggagcctctgaacctgtatgcaaggcctggcaagtcgaacggggatgtgcgggccctcacctactgtgacctacacaagatccatcgggacgacctgctggaggtgctggacatgtaccctgagttctccgaccacttctggtccagcctggagatcaccttcaacctgcgagataccaacatgatcccgggctcccccggcagtacggagttagagggtggcttcagtcggcaacgcaagcgcaagttgtccttccgcaggcgcacggacaaggacacggagcagccaggggaggtgtcggccttggggccgggccgggcgggggcagggccgagtagccggggccggccgggggggccgtggggggagagcccgtccagtggcccctccagccctgagagcagtgaggatgagggcccaggccgcagctccagccccctccgcctggtgcccttctccagccccaggccccccggagagccgccgggtggggagcccctgatggaggactgcgagaagagcagcgacacttgcaaccccctgtcaggcgccttctcaggagtgtccaacattttcagcttctggggggacagtcggggccgccagtaccaggagctccctcgatgccccgcccccacccccagcctcctcaacatccccctctccagcccgggtcggcggccccggggcgacgtggagagcaggctggatgccctccagcgccagctcaacaggctggagacccggctgagtgcagacatggccactgtcctgcagctgctacagaggcagatgacgctggtcccgcccgcctacagtgctgtgaccaccccggggcctggccccacttccacatccccgctgttgcccgtcagccccctccccaccctcaccttggactcgctttctcaggtttcccagttcatggcgtgtgaggagctgcccccgggggccccagagcttccccaagaaggccccacacgacgcctctccctaccgggccagctgggggccctcacctcccagcccctgcacagacacggctcggacccgggcagttagtggggctgcccagtgtggacacgtggctcacccagggatcaaggcgctgctgggccgctccccttggaggccctgctcaggaggccctgaccgtggaaggggagaggaactcgaaagcacagctcctcccccagcccttgggaccatcttctcctgcagtcccctgggccccagtgagaggggcaggggcagggccggcagtaggtggggcctgtggtccccccactgccctgagggcattagctggtctaactgcccggaggcacccggccctgggccttaggcacctcaaggacttttctgctatttactgctcttattgttaaggataataattaaggatcatatgaataattaatgaagatgctgatgactatgaataataaataattatcctgaggaga

SEQ ID NO: 519 - DNA, 3884 bp, Homo sapiens
  source 1..3884: mol_type = genomic DNA
  misc_feature 1..3884: note = cDNA of KCNH2 gene SNP c.2399G>A (p.Gly800Glu)
atgccggtgcggaggggccacgtcgcgccgcagaacaccttcctggacaccatcatccgcaagtttgagggccagagccgtaagttcatcatcgccaacgctcgggtggagaactgcgccgtcatctactgcaacgacggcttctgcgagctgtgcggctactcgcgggccgaggtgatgcagcgaccctgcacctgcgacttcctgcacgggccgcgcacgcagcgccgcgctgccgcgcagatcgcgcaggcactgctgggcgccgaggagcgcaaagtggaaatcgccttctaccggaaagatgggagctgcttcctatgtctggtggatgtggtgcccgtgaagaacgaggatggggctgtcatcatgttcatcctcaatttcgaggtggtgatggagaaggacatggtggggtccccggctcatgacaccaaccaccggggcccccccaccagctggctggccccaggccgcgccaagaccttccgcctgaagctgcccgcgctgctggcgctgacggcccgggagtcgtcggtgcggtcgggcggcgcgggcggcgcgggcgccccgggggccgtggtggtggacgtggacctgacgcccgcggcacccagcagcgagtcgctggccctggacgaagtgacagccatggacaaccacgtggcagggctcgggcccgcggaggagcggcgtgcgctggtgggtcccggctctccgccccgcagcgcgcccggccagctcccatcgccccgggcgcacagcctcaaccccgacgcctcgggctccagctgcagcctggcccggacgcgctcccgagaaagctgcgccagcgtgcgccgcgcctcgtcggccgacgacatcgaggccatgcgcgccggggtgctgcccccgccaccgcgccacgccagcaccggggccatgcacccactgcgcagcggcttgctcaactccacctcggactccgacctcgtgcgctaccgcaccattagcaagattccccaaatcaccctcaactttgtggacctcaagggcgaccccttcttggcttcgcccaccagtgaccgtgagatcatagcacctaagataaaggagcgaacccacaatgtcactgagaaggtcacccaggtcctgtccctgggcgccgacgtgctgcctgagtacaagctgcaggcaccgcgcatccaccgctggaccatcctgcattacagccccttcaaggccgtgtgggactggctcatcctgctgctggtcatctacacggctgtcttcacaccctactcggctgccttcctgctgaaggagacggaagaaggcccgcctgctaccgagtgtggctacgcctgccagccgctggctgtggtggacctcatcgtggacatcatgttcattgtggacatcctcatcaacttccgcaccacctacgtcaatgccaacgaggaggtggtcagccaccccggccgcatcgccgtccactacttcaagggctggttcctcatcgacatggtggccgccatccccttcgacctgctcatcttcggctctggctctgaggagctgatcgggctgctgaagactgcgcggctgctgcggctggtgcgcgtggcgcggaagctggatcgctactcagagtacggcgcggccgtgctgttcttgctcatgtgcacctttgcgctcatcgcgcactggctagcctgcatctggtacgccatcggcaacatggagcagccacacatggactcacgcatcggctggctgcacaacctgggcgaccagataggcaaaccctacaacagcagcggcctgggcggcccctccatcaaggacaagtatgtgacggcgctctacttcaccttcagcagcctcaccagtgtgggcttcggcaacgtctctcccaacaccaactcagagaagatcttctccatctgcgtcatgctcattggctccctcatgtatgctagcatcttcggcaacgtgtcggccatcatccagcggctgtactcgggcacagcccgctaccacacacagatgctgcgggtgcgggagttcatccgcttccaccagatccccaatcccctgcgccagcgcctcgaggagtacttccagcacgcctggtcctacaccaacggcatcgacatgaacgcggtgctgaagggcttccctgagtgcctgcaggctgacatctgcctgcacctgaaccgctcactgctgcagcactgcaaacccttccgaggggccaccaagggctgccttcgggccctggccatgaagttcaagaccacacatgcaccgccaggggacacactggtgcatgctggggacctgctcaccgccctgtacttcatctcccggggctccatcgagatcctgcggggcgacgtcgtcgtggccatcctggagaagaatgacatctttggggagcctctgaacctgtatgcaaggcctggcaagtcgaacggggatgtgcgggccctcacctactgtgacctacacaagatccatcgggacgacctgctggaggtgctggacatgtaccctgagttctccgaccacttctggtccagcctggagatcaccttcaacctgcgagataccaacatgatcccgggctcccccggcagtacggagttagagggtggcttcagtcggcaacgcaagcgcaagttgtccttccgcaggcgcacggacaaggacacggagcagccaggggaggtgtcggccttggggccgggccgggcgggggcagggccgagtagccggggccggccgggggggccgtggggggagagcccgtccagtggcccctccagccctgagagcagtgaggatgagggcccaggccgcagctccagccccctccgcctggtgcccttctccagccccaggccccccggagagccgccgggtggggagcccctgatggaggactgcgagaagagcagcgacacttgcaaccccctgtcaggcgccttctcaggagtgtccaacattttcagcttctggggggacagtcggggccgccagtaccaggagctccctcgatgccccgcccccacccccagcctcctcaacatccccctctccagcccgggtcggcggccccggggcgacgtggagagcaggctggatgccctccagcgccagctcaacaggctggagacccggctgagtgcagacatggccactgtcctgcagctgctacagaggcagatgacgctggtcccgcccgcctacagtgctgtgaccaccccggggcctggccccacttccacatccccgctgttgcccgtcagccccctccccaccctcaccttggactcgctttctcaggtttcccagttcatggcgtgtgaggagctgcccccgggggccccagagcttccccaagaaggccccacacgacgcctctccctaccgggccagctgggggccctcacctcccagcccctgcacagacacggctcggacccgggcagttagtggggctgcccagtgtggacacgtggctcacccagggatcaaggcgctgctgggccgctccccttggaggccctgctcaggaggccctgaccgtggaaggggagaggaactcgaaagcacagctcctcccccagcccttgggaccatcttctcctgcagtcccctgggccccagtgagaggggcaggggcagggccggcagtaggtggggcctgtggtccccccactgccctgagggcattagctggtctaactgcccggaggcacccggccctgggccttaggcacctcaaggacttttctgctatttactgctcttattgttaaggataataattaaggatcatatgaataattaatgaagatgctgatgactatgaataataaataattatcctgaggaga

SEQ ID NO: 520 - DNA, 3884 bp, Homo sapiens
  source 1..3884: mol_type = genomic DNA
  misc_feature 1..3884: note = cDNA of KCNH2 gene SNP c.239C>T (p.Ala80Val)
atgccggtgcggaggggccacgtcgcgccgcagaacaccttcctggacaccatcatccgcaagtttgagggccagagccgtaagttcatcatcgccaacgctcgggtggagaactgcgccgtcatctactgcaacgacggcttctgcgagctgtgcggctactcgcgggccgaggtgatgcagcgaccctgcacctgcgacttcctgcacgggccgcgcacgcagcgccgcgctgccgtgcagatcgcgcaggcactgctgggcgccgaggagcgcaaagtggaaatcgccttctaccggaaagatgggagctgcttcctatgtctggtggatgtggtgcccgtgaagaacgaggatggggctgtcatcatgttcatcctcaatttcgaggtggtgatggagaaggacatggtggggtccccggctcatgacaccaaccaccggggcccccccaccagctggctggccccaggccgcgccaagaccttccgcctgaagctgcccgcgctgctggcgctgacggcccgggagtcgtcggtgcggtcgggcggcgcgggcggcgcgggcgccccgggggccgtggtggtggacgtggacctgacgcccgcggcacccagcagcgagtcgctggccctggacgaagtgacagccatggacaaccacgtggcagggctcgggcccgcggaggagcggcgtgcgctggtgggtcccggctctccgccccgcagcgcgcccggccagctcccatcgccccgggcgcacagcctcaaccccgacgcctcgggctccagctgcagcctggcccggacgcgctcccgagaaagctgcgccagcgtgcgccgcgcctcgtcggccgacgacatcgaggccatgcgcgccggggtgctgcccccgccaccgcgccacgccagcaccggggccatgcacccactgcgcagcggcttgctcaactccacctcggactccgacctcgtgcgctaccgcaccattagcaagattccccaaatcaccctcaactttgtggacctcaagggcgaccccttcttggcttcgcccaccagtgaccgtgagatcatagcacctaagataaaggagcgaacccacaatgtcactgagaaggtcacccaggtcctgtccctgggcgccgacgtgctgcctgagtacaagctgcaggcaccgcgcatccaccgctggaccatcctgcattacagccccttcaaggccgtgtgggactggctcatcctgctgctggtcatctacacggctgtcttcacaccctactcggctgccttcctgctgaaggagacggaagaaggcccgcctgctaccgagtgtggctacgcctgccagccgctggctgtggtggacctcatcgtggacatcatgttcattgtggacatcctcatcaacttccgcaccacctacgtcaatgccaacgaggaggtggtcagccaccccggccgcatcgccgtccactacttcaagggctggttcctcatcgacatggtggccgccatccccttcgacctgctcatcttcggctctggctctgaggagctgatcgggctgctgaagactgcgcggctgctgcggctggtgcgcgtggcgcggaagctggatcgctactcagagtacggcgcggccgtgctgttcttgctcatgtgcacctttgcgctcatcgcgcactggctagcctgcatctggtacgccatcggcaacatggagcagccacacatggactcacgcatcggctggctgcacaacctgggcgaccagataggcaaaccctacaacagcagcggcctgggcggcccctccatcaaggacaagtatgtgacggcgctctacttcaccttcagcagcctcaccagtgtgggcttcggcaacgtctctcccaacaccaactcagagaagatcttctccatctgcgtcatgctcattggctccctcatgtatgctagcatcttcggcaacgtgtcggccatcatccagcggctgtactcgggcacagcccgctaccacacacagatgctgcgggtgcgggagttcatccgcttccaccagatccccaatcccctgcgccagcgcctcgaggagtacttccagcacgcctggtcctacaccaacggcatcgacatgaacgcggtgctgaagggcttccctgagtgcctgcaggctgacatctgcctgcacctgaaccgctcactgctgcagcactgcaaacccttccgaggggccaccaagggctgccttcgggccctggccatgaagttcaagaccacacatgcaccgccaggggacacactggtgcatgctggggacctgctcaccgccctgtacttcatctcccggggctccatcgagatcctgcggggcgacgtcgtcgtggccatcctggggaagaatgacatctttggggagcctctgaacctgtatgcaaggcctggcaagtcgaacggggatgtgcgggccctcacctactgtgacctacacaagatccatcgggacgacctgctggaggtgctggacatgtaccctgagttctccgaccacttctggtccagcctggagatcaccttcaacctgcgagataccaacatgatcccgggctcccccggcagtacggagttagagggtggcttcagtcggcaacgcaagcgcaagttgtccttccgcaggcgcacggacaaggacacggagcagccaggggaggtgtcggccttggggccgggccgggcgggggcagggccgagtagccggggccggccgggggggccgtggggggagagcccgtccagtggcccctccagccctgagagcagtgaggatgagggcccaggccgcagctccagccccctccgcctggtgcccttctccagccccaggccccccggagagccgccgggtggggagcccctgatggaggactgcgagaagagcagcgacacttgcaaccccctgtcaggcgccttctcaggagtgtccaacattttcagcttctggggggacagtcggggccgccagtaccaggagctccctcgatgccccgcccccacccccagcctcctcaacatccccctctccagcccgggtcggcggccccggggcgacgtggagagcaggctggatgccctccagcgccagctcaacaggctggagacccggctgagtgcagacatggccactgtcctgcagctgctacagaggcagatgacgctggtcccgcccgcctacagtgctgtgaccaccccggggcctggccccacttccacatccccgctgttgcccgtcagccccctccccaccctcaccttggactcgctttctcaggtttcccagttcatggcgtgtgaggagctgcccccgggggccccagagcttccccaagaaggccccacacgacgcctctccctaccgggccagctgggggccctcacctcccagcccctgcacagacacggctcggacccgggcagttagtggggctgcccagtgtggacacgtggctcacccagggatcaaggcgctgctgggccgctccccttggaggccctgctcaggaggccctgaccgtggaaggggagaggaactcgaaagcacagctcctcccccagcccttgggaccatcttctcctgcagtcccctgggccccagtgagaggggcaggggcagggccggcagtaggtggggcctgtggtccccccactgccctgagggcattagctggtctaactgcccggaggcacccggccctgggccttaggcacctcaaggacttttctgctatttactgctcttattgttaaggataataattaaggatcatatgaataattaatgaagatgctgatgactatgaataataaataattatcctgaggaga

SEQ ID NO: 521 - DNA, 3884 bp, Homo sapiens
  source 1..3884: mol_type = genomic DNA
  misc_feature 1..3884: note = cDNA of KCNH2 gene SNP c.2405A>G (p.Asn802Ser)
atgccggtgcggaggggccacgtcgcgccgcagaacaccttcctggacaccatcatccgcaagtttgagggccagagccgtaagttcatcatcgccaacgctcgggtggagaactgcgccgtcatctactgcaacgacggcttctgcgagctgtgcggctactcgcgggccgaggtgatgcagcgaccctgcacctgcgacttcctgcacgggccgcgcacgcagcgccgcgctgccgcgcagatcgcgcaggcactgctgggcgccgaggagcgcaaagtggaaatcgccttctaccggaaagatgggagctgcttcctatgtctggtggatgtggtgcccgtgaagaacgaggatggggctgtcatcatgttcatcctcaatttcgaggtggtgatggagaaggacatggtggggtccccggctcatgacaccaaccaccggggcccccccaccagctggctggccccaggccgcgccaagaccttccgcctgaagctgcccgcgctgctggcgctgacggcccgggagtcgtcggtgcggtcgggcggcgcgggcggcgcgggcgccccgggggccgtggtggtggacgtggacctgacgcccgcggcacccagcagcgagtcgctggccctggacgaagtgacagccatggacaaccacgtggcagggctcgggcccgcggaggagcggcgtgcgctggtgggtcccggctctccgccccgcagcgcgcccggccagctcccatcgccccgggcgcacagcctcaaccccgacgcctcgggctccagctgcagcctggcccggacgcgctcccgagaaagctgcgccagcgtgcgccgcgcctcgtcggccgacgacatcgaggccatgcgcgccggggtgctgcccccgccaccgcgccacgccagcaccggggccatgcacccactgcgcagcggcttgctcaactccacctcggactccgacctcgtgcgctaccgcaccattagcaagattccccaaatcaccctcaactttgtggacctcaagggcgaccccttcttggcttcgcccaccagtgaccgtgagatcatagcacctaagataaaggagcgaacccacaatgtcactgagaaggtcacccaggtcctgtccctgggcgccgacgtgctgcctgagtacaagctgcaggcaccgcgcatccaccgctggaccatcctgcattacagccccttcaaggccgtgtgggactggctcatcctgctgctggtcatctacacggctgtcttcacaccctactcggctgccttcctgctgaaggagacggaagaaggcccgcctgctaccgagtgtggctacgcctgccagccgctggctgtggtggacctcatcgtggacatcatgttcattgtggacatcctcatcaacttccgcaccacctacgtcaatgccaacgaggaggtggtcagccaccccggccgcatcgccgtccactacttcaagggctggttcctcatcgacatggtggccgccatccccttcgacctgctcatcttcggctctggctctgaggagctgatcgggctgctgaagactgcgcggctgctgcggctggtgcgcgtggcgcggaagctggatcgctactcagagtacggcgcggccgtgctgttcttgctcatgtgcacctttgcgctcatcgcgcactggctagcctgcatctggtacgccatcggcaacatggagcagccacacatggactcacgcatcggctggctgcacaacctgggcgaccagataggcaaaccctacaacagcagcggcctgggcggcccctccatcaaggacaagtatgtgacggcgctctacttcaccttcagcagcctcaccagtgtgggcttcggcaacgtctctcccaacaccaactcagagaagatcttctccatctgcgtcatgctcattggctccctcatgtatgctagcatcttcggcaacgtgtcggccatcatccagcggctgtactcgggcacagcccgctaccacacacagatgctgcgggtgcgggagttcatccgcttccaccagatccccaatcccctgcgccagcgcctcgaggagtacttccagcacgcctggtcctacaccaacggcatcgacatgaacgcggtgctgaagggcttccctgagtgcctgcaggctgacatctgcctgcacctgaaccgctcactgctgcagcactgcaaacccttccgaggggccaccaagggctgccttcgggccctggccatgaagttcaagaccacacatgcaccgccaggggacacactggtgcatgctggggacctgctcaccgccctgtacttcatctcccggggctccatcgagatcctgcggggcgacgtcgtcgtggccatcctggggaagagtgacatctttggggagcctctgaacctgtatgcaaggcctggcaagtcgaacggggatgtgcgggccctcacctactgtgacctacacaagatccatcgggacgacctgctggaggtgctggacatgtaccctgagttctccgaccacttctggtccagcctggagatcaccttcaacctgcgagataccaacatgatcccgggctcccccggcagtacggagttagagggtggcttcagtcggcaacgcaagcgcaagttgtccttccgcaggcgcacggacaaggacacggagcagccaggggaggtgtcggccttggggccgggccgggcgggggcagggccgagtagccggggccggccgggggggccgtggggggagagcccgtccagtggcccctccagccctgagagcagtgaggatgagggcccaggccgcagctccagccccctccgcctggtgcccttctccagccccaggccccccggagagccgccgggtggggagcccctgatggaggactgcgagaagagcagcgacacttgcaaccccctgtcaggcgccttctcaggagtgtccaacattttcagcttctggggggacagtcggggccgccagtaccaggagctccctcgatgccccgcccccacccccagcctcctcaacatccccctctccagcccgggtcggcggccccggggcgacgtggagagcaggctggatgccctccagcgccagctcaacaggctggagacccggctgagtgcagacatggccactgtcctgcagctgctacagaggcagatgacgctggtcccgcccgcctacagtgctgtgaccaccccggggcctggccccacttccacatccccgctgttgcccgtcagccccctccccaccctcaccttggactcgctttctcaggtttcccagttcatggcgtgtgaggagctgcccccgggggccccagagcttccccaagaaggccccacacgacgcctctccctaccgggccagctgggggccctcacctcccagcccctgcacagacacggctcggacccgggcagttagtggggctgcccagtgtggacacgtggctcacccagggatcaaggcgctgctgggccgctccccttggaggccctgctcaggaggccctgaccgtggaaggggagaggaactcgaaagcacagctcctcccccagcccttgggaccatcttctcctgcagtcccctgggccccagtgagaggggcaggggcagggccggcagtaggtggggcctgtggtccccccactgccctgagggcattagctggtctaactgcccggaggcacccggccctgggccttaggcacctcaaggacttttctgctatttactgctcttattgttaaggataataattaaggatcatatgaataattaatgaagatgctgatgactatgaataataaataattatcctgaggaga

SEQ ID NO: 522 - DNA, 3884 bp, Homo sapiens
  source 1..3884: mol_type = genomic DNA
  misc_feature 1..3884: note = cDNA of KCNH2 gene SNP c.2414T>C (p.Phe805Ser)
atgccggtgcggaggggccacgtcgcgccgcagaacaccttcctggacaccatcatccgcaagtttgagggccagagccgtaagttcatcatcgccaacgctcgggtggagaactgcgccgtcatctactgcaacgacggcttctgcgagctgtgcggctactcgcgggccgaggtgatgcagcgaccctgcacctgcgacttcctgcacgggccgcgcacgcagcgccgcgctgccgcgcagatcgcgcaggcactgctgggcgccgaggagcgcaaagtggaaatcgccttctaccggaaagatgggagctgcttcctatgtctggtggatgtggtgcccgtgaagaacgaggatggggctgtcatcatgttcatcctcaatttcgaggtggtgatggagaaggacatggtggggtccccggctcatgacaccaaccaccggggcccccccaccagctggctggccccaggccgcgccaagaccttccgcctgaagctgcccgcgctgctggcgctgacggcccgggagtcgtcggtgcggtcgggcggcgcgggcggcgcgggcgccccgggggccgtggtggtggacgtggacctgacgcccgcggcacccagcagcgagtcgctggccctggacgaagtgacagccatggacaaccacgtggcagggctcgggcccgcggaggagcggcgtgcgctggtgggtcccggctctccgccccgcagcgcgcccggccagctcccatcgccccgggcgcacagcctcaaccccgacgcctcgggctccagctgcagcctggcccggacgcgctcccgagaaagctgcgccagcgtgcgccgcgcctcgtcggccgacgacatcgaggccatgcgcgccggggtgctgcccccgccaccgcgccacgccagcaccggggccatgcacccactgcgcagcggcttgctcaactccacctcggactccgacctcgtgcgctaccgcaccattagcaagattccccaaatcaccctcaactttgtggacctcaagggcgaccccttcttggcttcgcccaccagtgaccgtgagatcatagcacctaagataaaggagcgaacccacaatgtcactgagaaggtcacccaggtcctgtccctgggcgccgacgtgctgcctgagtacaagctgcaggcaccgcgcatccaccgctggaccatcctgcattacagccccttcaaggccgtgtgggactggctcatcctgctgctggtcatctacacggctgtcttcacaccctactcggctgccttcctgctgaaggagacggaagaaggcccgcctgctaccgagtgtggctacgcctgccagccgctggctgtggtggacctcatcgtggacatcatgttcattgtggacatcctcatcaacttccgcaccacctacgtcaatgccaacgaggaggtggtcagccaccccggccgcatcgccgtccactacttcaagggctggttcctcatcgacatggtggccgccatccccttcgacctgctcatcttcggctctggctctgaggagctgatcgggctgctgaagactgcgcggctgctgcggctggtgcgcgtggcgcggaagctggatcgctactcagagtacggcgcggccgtgctgttcttgctcatgtgcacctttgcgctcatcgcgcactggctagcctgcatctggtacgccatcggcaacatggagcagccacacatggactcacgcatcggctggctgcacaacctgggcgaccagataggcaaaccctacaacagcagcggcctgggcggcccctccatcaaggacaagtatgtgacggcgctctacttcaccttcagcagcctcaccagtgtgggcttcggcaacgtctctcccaacaccaactcagagaagatcttctccatctgcgtcatgctcattggctccctcatgtatgctagcatcttcggcaacgtgtcggccatcatccagcggctgtactcgggcacagcccgctaccacacacagatgctgcgggtgcgggagttcatccgcttccaccagatccccaatcccctgcgccagcgcctcgaggagtacttccagcacgcctggtcctacaccaacggcatcgacatgaacgcggtgctgaagggcttccctgagtgcctgcaggctgacatctgcctgcacctgaaccgctcactgctgcagcactgcaaacccttccgaggggccaccaagggctgccttcgggccctggccatgaagttcaagaccacacatgcaccgccaggggacacactggtgcatgctggggacctgctcaccgccctgtacttcatctcccggggctccatcgagatcctgcggggcgacgtcgtcgtggccatcctggggaagaatgacatctctggggagcctctgaacctgtatgcaaggcctggcaagtcgaacggggatgtgcgggccctcacctactgtgacctacacaagatccatcgggacgacctgctggaggtgctggacatgtaccctgagttctccgaccacttctggtccagcctggagatcaccttcaacctgcgagataccaacatgatcccgggctcccccggcagtacggagttagagggtggcttcagtcggcaacgcaagcgcaagttgtccttccgcaggcgcacggacaaggacacggagcagccaggggaggtgtcggccttggggccgggccgggcgggggcagggccgagtagccggggccggccgggggggccgtggggggagagcccgtccagtggcccctccagccctgagagcagtgaggatgagggcccaggccgcagctccagccccctccgcctggtgcccttctccagccccaggccccccggagagccgccgggtggggagcccctgatggaggactgcgagaagagcagcgacacttgcaaccccctgtcaggcgccttctcaggagtgtccaacattttcagcttctggggggacagtcggggccgccagtaccaggagctccctcgatgccccgcccccacccccagcctcctcaacatccccctctccagcccgggtcggcggccccggggcgacgtggagagcaggctggatgccctccagcgccagctcaacaggctggagacccggctgagtgcagacatggccactgtcctgcagctgctacagaggcagatgacgctggtcccgcccgcctacagtgctgtgaccaccccggggcctggccccacttccacatccccgctgttgcccgtcagccccctccccaccctcaccttggactcgctttctcaggtttcccagttcatggcgtgtgaggagctgcccccgggggccccagagcttccccaagaaggccccacacgacgcctctccctaccgggccagctgggggccctcacctcccagcccctgcacagacacggctcggacccgggcagttagtggggctgcccagtgtggacacgtggctcacccagggatcaaggcgctgctgggccgctccccttggaggccctgctcaggaggccctgaccgtggaaggggagaggaactcgaaagcacagctcctcccccagcccttgggaccatcttctcctgcagtcccctgggccccagtgagaggggcaggggcagggccggcagtaggtggggcctgtggtccccccactgccctgagggcattagctggtctaactgcccggaggcacccggccctgggccttaggcacctcaaggacttttctgctatttactgctcttattgttaaggataataattaaggatcatatgaataattaatgaagatgctgatgactatgaataataaataattatcctgaggaga

SEQ ID NO: 523 - DNA, 3884 bp, Homo sapiens
  source 1..3884: mol_type = genomic DNA
  misc_feature 1..3884: note = cDNA of KCNH2 gene SNP c.2414T>G (p.Phe805Cys)
atgccggtgcggaggggccacgtcgcgccgcagaacaccttcctggacaccatcatccgcaagtttgagggccagagccgtaagttcatcatcgccaacgctcgggtggagaactgcgccgtcatctactgcaacgacggcttctgcgagctgtgcggctactcgcgggccgaggtgatgcagcgaccctgcacctgcgacttcctgcacgggccgcgcacgcagcgccgcgctgccgcgcagatcgcgcaggcactgctgggcgccgaggagcgcaaagtggaaatcgccttctaccggaaagatgggagctgcttcctatgtctggtggatgtggtgcccgtgaagaacgaggatggggctgtcatcatgttcatcctcaatttcgaggtggtgatggagaaggacatggtggggtccccggctcatgacaccaaccaccggggcccccccaccagctggctggccccaggccgcgccaagaccttccgcctgaagctgcccgcgctgctggcgctgacggcccgggagtcgtcggtgcggtcgggcggcgcgggcggcgcgggcgccccgggggccgtggtggtggacgtggacctgacgcccgcggcacccagcagcgagtcgctggccctggacgaagtgacagccatggacaaccacgtggcagggctcgggcccgcggaggagcggcgtgcgctggtgggtcccggctctccgccccgcagcgcgcccggccagctcccatcgccccgggcgcacagcctcaaccccgacgcctcgggctccagctgcagcctggcccggacgcgctcccgagaaagctgcgccagcgtgcgccgcgcctcgtcggccgacgacatcgaggccatgcgcgccggggtgctgcccccgccaccgcgccacgccagcaccggggccatgcacccactgcgcagcggcttgctcaactccacctcggactccgacctcgtgcgctaccgcaccattagcaagattccccaaatcaccctcaactttgtggacctcaagggcgaccccttcttggcttcgcccaccagtgaccgtgagatcatagcacctaagataaaggagcgaacccacaatgtcactgagaaggtcacccaggtcctgtccctgggcgccgacgtgctgcctgagtacaagctgcaggcaccgcgcatccaccgctggaccatcctgcattacagccccttcaaggccgtgtgggactggctcatcctgctgctggtcatctacacggctgtcttcacaccctactcggctgccttcctgctgaaggagacggaagaaggcccgcctgctaccgagtgtggctacgcctgccagccgctggctgtggtggacctcatcgtggacatcatgttcattgtggacatcctcatcaacttccgcaccacctacgtcaatgccaacgaggaggtggtcagccaccccggccgcatcgccgtccactacttcaagggctggttcctcatcgacatggtggccgccatccccttcgacctgctcatcttcggctctggctctgaggagctgatcgggctgctgaagactgcgcggctgctgcggctggtgcgcgtggcgcggaagctggatcgctactcagagtacggcgcggccgtgctgttcttgctcatgtgcacctttgcgctcatcgcgcactggctagcctgcatctggtacgccatcggcaacatggagcagccacacatggactcacgcatcggctggctgcacaacctgggcgaccagataggcaaaccctacaacagcagcggcctgggcggcccctccatcaaggacaagtatgtgacggcgctctacttcaccttcagcagcctcaccagtgtgggcttcggcaacgtctctcccaacaccaactcagagaagatcttctccatctgcgtcatgctcattggctccctcatgtatgctagcatcttcggcaacgtgtcggccatcatccagcggctgtactcgggcacagcccgctaccacacacagatgctgcgggtgcgggagttcatccgcttccaccagatccccaatcccctgcgccagcgcctcgaggagtacttccagcacgcctggtcctacaccaacggcatcgacatgaacgcggtgctgaagggcttccctgagtgcctgcaggctgacatctgcctgcacctgaaccgctcactgctgcagcactgcaaacccttccgaggggccaccaagggctgccttcgggccctggccatgaagttcaagaccacacatgcaccgccaggggacacactggtgcatgctggggacctgctcaccgccctgtacttcatctcccggggctccatcgagatcctgcggggcgacgtcgtcgtggccatcctggggaagaatgacatctgtggggagcctctgaacctgtatgcaaggcctggcaagtcgaacggggatgtgcgggccctcacctactgtgacctacacaagatccatcgggacgacctgctggaggtgctggacatgtaccctgagttctccgaccacttctggtccagcctggagatcaccttcaacctgcgagataccaacatgatcccgggctcccccggcagtacggagttagagggtggcttcagtcggcaacgcaagcgcaagttgtccttccgcaggcgcacggacaaggacacggagcagccaggggaggtgtcggccttggggccgggccgggcgggggcagggccgagtagccggggccggccgggggggccgtggggggagagcccgtccagtggcccctccagccctgagagcagtgaggatgagggcccaggccgcagctccagccccctccgcctggtgcccttctccagccccaggccccccggagagccgccgggtggggagcccctgatggaggactgcgagaagagcagcgacacttgcaaccccctgtcaggcgccttctcaggagtgtccaacattttcagcttctggggggacagtcggggccgccagtaccaggagctccctcgatgccccgcccccacccccagcctcctcaacatccccctctccagcccgggtcggcggccccggggcgacgtggagagcaggctggatgccctccagcgccagctcaacaggctggagacccggctgagtgcagacatggccactgtcctgcagctgctacagaggcagatgacgctggtcccgcccgcctacagtgctgtgaccaccccggggcctggccccacttccacatccccgctgttgcccgtcagccccctccccaccctcaccttggactcgctttctcaggtttcccagttcatggcgtgtgaggagctgcccccgggggccccagagcttccccaagaaggccccacacgacgcctctccctaccgggccagctgggggccctcacctcccagcccctgcacagacacggctcggacccgggcagttagtggggctgcccagtgtggacacgtggctcacccagggatcaaggcgctgctgggccgctccccttggaggccctgctcaggaggccctgaccgtggaaggggagaggaactcgaaagcacagctcctcccccagcccttgggaccatcttctcctgcagtcccctgggccccagtgagaggggcaggggcagggccggcagtaggtggggcctgtggtccccccactgccctgagggcattagctggtctaactgcccggaggcacccggccctgggccttaggcacctcaaggacttttctgctatttactgctcttattgttaaggataataattaaggatcatatgaataattaatgaagatgctgatgactatgaataataaataattatcctgaggaga

SEQ ID NO: 524 - DNA, 3884 bp, Homo sapiens
  source 1..3884: mol_type = genomic DNA
  misc_feature 1..3884: note = cDNA of KCNH2 gene SNP c.2417G>A (p.Gly806Glu)
atgccggtgcggaggggccacgtcgcgccgcagaacaccttcctggacaccatcatccgcaagtttgagggccagagccgtaagttcatcatcgccaacgctcgggtggagaactgcgccgtcatctactgcaacgacggcttctgcgagctgtgcggctactcgcgggccgaggtgatgcagcgaccctgcacctgcgacttcctgcacgggccgcgcacgcagcgccgcgctgccgcgcagatcgcgcaggcactgctgggcgccgaggagcgcaaagtggaaatcgccttctaccggaaagatgggagctgcttcctatgtctggtggatgtggtgcccgtgaagaacgaggatggggctgtcatcatgttcatcctcaatttcgaggtggtgatggagaaggacatggtggggtccccggctcatgacaccaaccaccggggcccccccaccagctggctggccccaggccgcgccaagaccttccgcctgaagctgcccgcgctgctggcgctgacggcccgggagtcgtcggtgcggtcgggcggcgcgggcggcgcgggcgccccgggggccgtggtggtggacgtggacctgacgcccgcggcacccagcagcgagtcgctggccctggacgaagtgacagccatggacaaccacgtggcagggctcgggcccgcggaggagcggcgtgcgctggtgggtcccggctctccgccccgcagcgcgcccggccagctcccatcgccccgggcgcacagcctcaaccccgacgcctcgggctccagctgcagcctggcccggacgcgctcccgagaaagctgcgccagcgtgcgccgcgcctcgtcggccgacgacatcgaggccatgcgcgccggggtgctgcccccgccaccgcgccacgccagcaccggggccatgcacccactgcgcagcggcttgctcaactccacctcggactccgacctcgtgcgctaccgcaccattagcaagattccccaaatcaccctcaactttgtggacctcaagggcgaccccttcttggcttcgcccaccagtgaccgtgagatcatagcacctaagataaaggagcgaacccacaatgtcactgagaaggtcacccaggtcctgtccctgggcgccgacgtgctgcctgagtacaagctgcaggcaccgcgcatccaccgctggaccatcctgcattacagccccttcaaggccgtgtgggactggctcatcctgctgctggtcatctacacggctgtcttcacaccctactcggctgccttcctgctgaaggagacggaagaaggcccgcctgctaccgagtgtggctacgcctgccagccgctggctgtggtggacctcatcgtggacatcatgttcattgtggacatcctcatcaacttccgcaccacctacgtcaatgccaacgaggaggtggtcagccaccccggccgcatcgccgtccactacttcaagggctggttcctcatcgacatggtggccgccatccccttcgacctgctcatcttcggctctggctctgaggagctgatcgggctgctgaagactgcgcggctgctgcggctggtgcgcgtggcgcggaagctggatcgctactcagagtacggcgcggccgtgctgttcttgctcatgtgcacctttgcgctcatcgcgcactggctagcctgcatctggtacgccatcggcaacatggagcagccacacatggactcacgcatcggctggctgcacaacctgggcgaccagataggcaaaccctacaacagcagcggcctgggcggcccctccatcaaggacaagtatgtgacggcgctctacttcaccttcagcagcctcaccagtgtgggcttcggcaacgtctctcccaacaccaactcagagaagatcttctccatctgcgtcatgctcattggctccctcatgtatgctagcatcttcggcaacgtgtcggccatcatccagcggctgtactcgggcacagcccgctaccacacacagatgctgcgggtgcgggagttcatccgcttccaccagatccccaatcccctgcgccagcgcctcgaggagtacttccagcacgcctggtcctacaccaacggcatcgacatgaacgcggtgctgaagggcttccctgagtgcctgcaggctgacatctgcctgcacctgaaccgctcactgctgcagcactgcaaacccttccgaggggccaccaagggctgccttcgggccctggccatgaagttcaagaccacacatgcaccgccaggggacacactggtgcatgctggggacctgctcaccgccctgtacttcatctcccggggctccatcgagatcctgcggggcgacgtcgtcgtggccatcctggggaagaatgacatctttgaggagcctctgaacctgtatgcaaggcctggcaagtcgaacggggatgtgcgggccctcacctactgtgacctacacaagatccatcgggacgacctgctggaggtgctggacatgtaccctgagttctccgaccacttctggtccagcctggagatcaccttcaacctgcgagataccaacatgatcccgggctcccccggcagtacggagttagagggtggcttcagtcggcaacgcaagcgcaagttgtccttccgcaggcgcacggacaaggacacggagcagccaggggaggtgtcggccttggggccgggccgggcgggggcagggccgagtagccggggccggccgggggggccgtggggggagagcccgtccagtggcccctccagccctgagagcagtgaggatgagggcccaggccgcagctccagccccctccgcctggtgcccttctccagccccaggccccccggagagccgccgggtggggagcccctgatggaggactgcgagaagagcagcgacacttgcaaccccctgtcaggcgccttctcaggagtgtccaacattttcagcttctggggggacagtcggggccgccagtaccaggagctccctcgatgccccgcccccacccccagcctcctcaacatccccctctccagcccgggtcggcggccccggggcgacgtggagagcaggctggatgccctccagcgccagctcaacaggctggagacccggctgagtgcagacatggccactgtcctgcagctgctacagaggcagatgacgctggtcccgcccgcctacagtgctgtgaccaccccggggcctggccccacttccacatccccgctgttgcccgtcagccccctccccaccctcaccttggactcgctttctcaggtttcccagttcatggcgtgtgaggagctgcccccgggggccccagagcttccccaagaaggccccacacgacgcctctccctaccgggccagctgggggccctcacctcccagcccctgcacagacacggctcggacccgggcagttagtggggctgcccagtgtggacacgtggctcacccagggatcaaggcgctgctgggccgctccccttggaggccctgctcaggaggccctgaccgtggaaggggagaggaactcgaaagcacagctcctcccccagcccttgggaccatcttctcctgcagtcccctgggccccagtgagaggggcaggggcagggccggcagtaggtggggcctgtggtccccccactgccctgagggcattagctggtctaactgcccggaggcacccggccctgggccttaggcacctcaaggacttttctgctatttactgctcttattgttaaggataataattaaggatcatatgaataattaatgaagatgctgatgactatgaataataaataattatcctgaggaga

SEQ ID NO: 525 - DNA, 3884 bp, Homo sapiens
  source 1..3884: mol_type = genomic DNA
  misc_feature 1..3884: note = cDNA of KCNH2 gene SNP c.2417G>C (p.Gly806Ala)
atgccggtgcggaggggccacgtcgcgccgcagaacaccttcctggacaccatcatccgcaagtttgagggccagagccgtaagttcatcatcgccaacgctcgggtggagaactgcgccgtcatctactgcaacgacggcttctgcgagctgtgcggctactcgcgggccgaggtgatgcagcgaccctgcacctgcgacttcctgcacgggccgcgcacgcagcgccgcgctgccgcgcagatcgcgcaggcactgctgggcgccgaggagcgcaaagtggaaatcgccttctaccggaaagatgggagctgcttcctatgtctggtggatgtggtgcccgtgaagaacgaggatggggctgtcatcatgttcatcctcaatttcgaggtggtgatggagaaggacatggtggggtccccggctcatgacaccaaccaccggggcccccccaccagctggctggccccaggccgcgccaagaccttccgcctgaagctgcccgcgctgctggcgctgacggcccgggagtcgtcggtgcggtcgggcggcgcgggcggcgcgggcgccccgggggccgtggtggtggacgtggacctgacgcccgcggcacccagcagcgagtcgctggccctggacgaagtgacagccatggacaaccacgtggcagggctcgggcccgcggaggagcggcgtgcgctggtgggtcccggctctccgccccgcagcgcgcccggccagctcccatcgccccgggcgcacagcctcaaccccgacgcctcgggctccagctgcagcctggcccggacgcgctcccgagaaagctgcgccagcgtgcgccgcgcctcgtcggccgacgacatcgaggccatgcgcgccggggtgctgcccccgccaccgcgccacgccagcaccggggccatgcacccactgcgcagcggcttgctcaactccacctcggactccgacctcgtgcgctaccgcaccattagcaagattccccaaatcaccctcaactttgtggacctcaagggcgaccccttcttggcttcgcccaccagtgaccgtgagatcatagcacctaagataaaggagcgaacccacaatgtcactgagaaggtcacccaggtcctgtccctgggcgccgacgtgctgcctgagtacaagctgcaggcaccgcgcatccaccgctggaccatcctgcattacagccccttcaaggccgtgtgggactggctcatcctgctgctggtcatctacacggctgtcttcacaccctactcggctgccttcctgctgaaggagacggaagaaggcccgcctgctaccgagtgtggctacgcctgccagccgctggctgtggtggacctcatcgtggacatcatgttcattgtggacatcctcatcaacttccgcaccacctacgtcaatgccaacgaggaggtggtcagccaccccggccgcatcgccgtccactacttcaagggctggttcctcatcgacatggtggccgccatccccttcgacctgctcatcttcggctctggctctgaggagctgatcgggctgctgaagactgcgcggctgctgcggctggtgcgcgtggcgcggaagctggatcgctactcagagtacggcgcggccgtgctgttcttgctcatgtgcacctttgcgctcatcgcgcactggctagcctgcatctggtacgccatcggcaacatggagcagccacacatggactcacgcatcggctggctgcacaacctgggcgaccagataggcaaaccctacaacagcagcggcctgggcggcccctccatcaaggacaagtatgtgacggcgctctacttcaccttcagcagcctcaccagtgtgggcttcggcaacgtctctcccaacaccaactcagagaagatcttctccatctgcgtcatgctcattggctccctcatgtatgctagcatcttcggcaacgtgtcggccatcatccagcggctgtactcgggcacagcccgctaccacacacagatgctgcgggtgcgggagttcatccgcttccaccagatccccaatcccctgcgccagcgcctcgaggagtacttccagcacgcctggtcctacaccaacggcatcgacatgaacgcggtgctgaagggcttccctgagtgcctgcaggctgacatctgcctgcacctgaaccgctcactgctgcagcactgcaaacccttccgaggggccaccaagggctgccttcgggccctggccatgaagttcaagaccacacatgcaccgccaggggacacactggtgcatgctggggacctgctcaccgccctgtacttcatctcccggggctccatcgagatcctgcggggcgacgtcgtcgtggccatcctggggaagaatgacatctttgcggagcctctgaacctgtatgcaaggcctggcaagtcgaacggggatgtgcgggccctcacctactgtgacctacacaagatccatcgggacgacctgctggaggtgctggacatgtaccctgagttctccgaccacttctggtccagcctggagatcaccttcaacctgcgagataccaacatgatcccgggctcccccggcagtacggagttagagggtggcttcagtcggcaacgcaagcgcaagttgtccttccgcaggcgcacggacaaggacacggagcagccaggggaggtgtcggccttggggccgggccgggcgggggcagggccgagtagccggggccggccgggggggccgtggggggagagcccgtccagtggcccctccagccctgagagcagtgaggatgagggcccaggccgcagctccagccccctccgcctggtgcccttctccagccccaggccccccggagagccgccgggtggggagcccctgatggaggactgcgagaagagcagcgacacttgcaaccccctgtcaggcgccttctcaggagtgtccaacattttcagcttctggggggacagtcggggccgccagtaccaggagctccctcgatgccccgcccccacccccagcctcctcaacatccccctctccagcccgggtcggcggccccggggcgacgtggagagcaggctggatgccctccagcgccagctcaacaggctggagacccggctgagtgcagacatggccactgtcctgcagctgctacagaggcagatgacgctggtcccgcccgcctacagtgctgtgaccaccccggggcctggccccacttccacatccccgctgttgcccgtcagccccctccccaccctcaccttggactcgctttctcaggtttcccagttcatggcgtgtgaggagctgcccccgggggccccagagcttccccaagaaggccccacacgacgcctctccctaccgggccagctgggggccctcacctcccagcccctgcacagacacggctcggacccgggcagttagtggggctgcccagtgtggacacgtggctcacccagggatcaaggcgctgctgggccgctccccttggaggccctgctcaggaggccctgaccgtggaaggggagaggaactcgaaagcacagctcctcccccagcccttgggaccatcttctcctgcagtcccctgggccccagtgagaggggcaggggcagggccggcagtaggtggggcctgtggtccccccactgccctgagggcattagctggtctaactgcccggaggcacccggccctgggccttaggcacctcaaggacttttctgctatttactgctcttattgttaaggataataattaaggatcatatgaataattaatgaagatgctgatgactatgaataataaataattatcctgaggaga

SEQ ID NO: 526 - DNA, 3884 bp, Homo sapiens
  source 1..3884: mol_type = genomic DNA
  misc_feature 1..3884: note = cDNA of KCNH2 gene SNP c.2437G>A (p.Ala813Thr)
atgccggtgcggaggggccacgtcgcgccgcagaacaccttcctggacaccatcatccgcaagtttgagggccagagccgtaagttcatcatcgccaacgctcgggtggagaactgcgccgtcatctactgcaacgacggcttctgcgagctgtgcggctactcgcgggccgaggtgatgcagcgaccctgcacctgcgacttcctgcacgggccgcgcacgcagcgccgcgctgccgcgcagatcgcgcaggcactgctgggcgccgaggagcgcaaagtggaaatcgccttctaccggaaagatgggagctgcttcctatgtctggtggatgtggtgcccgtgaagaacgaggatggggctgtcatcatgttcatcctcaatttcgaggtggtgatggagaaggacatggtggggtccccggctcatgacaccaaccaccggggcccccccaccagctggctggccccaggccgcgccaagaccttccgcctgaagctgcccgcgctgctggcgctgacggcccgggagtcgtcggtgcggtcgggcggcgcgggcggcgcgggcgccccgggggccgtggtggtggacgtggacctgacgcccgcggcacccagcagcgagtcgctggccctggacgaagtgacagccatggacaaccacgtggcagggctcgggcccgcggaggagcggcgtgcgctggtgggtcccggctctccgccccgcagcgcgcccggccagctcccatcgccccgggcgcacagcctcaaccccgacgcctcgggctccagctgcagcctggcccggacgcgctcccgagaaagctgcgccagcgtgcgccgcgcctcgtcggccgacgacatcgaggccatgcgcgccggggtgctgcccccgccaccgcgccacgccagcaccggggccatgcacccactgcgcagcggcttgctcaactccacctcggactccgacctcgtgcgctaccgcaccattagcaagattccccaaatcaccctcaactttgtggacctcaagggcgaccccttcttggcttcgcccaccagtgaccgtgagatcatagcacctaagataaaggagcgaacccacaatgtcactgagaaggtcacccaggtcctgtccctgggcgccgacgtgctgcctgagtacaagctgcaggcaccgcgcatccaccgctggaccatcctgcattacagccccttcaaggccgtgtgggactggctcatcctgctgctggtcatctacacggctgtcttcacaccctactcggctgccttcctgctgaaggagacggaagaaggcccgcctgctaccgagtgtggctacgcctgccagccgctggctgtggtggacctcatcgtggacatcatgttcattgtggacatcctcatcaacttccgcaccacctacgtcaatgccaacgaggaggtggtcagccaccccggccgcatcgccgtccactacttcaagggctggttcctcatcgacatggtggccgccatccccttcgacctgctcatcttcggctctggctctgaggagctgatcgggctgctgaagactgcgcggctgctgcggctggtgcgcgtggcgcggaagctggatcgctactcagagtacggcgcggccgtgctgttcttgctcatgtgcacctttgcgctcatcgcgcactggctagcctgcatctggtacgccatcggcaacatggagcagccacacatggactcacgcatcggctggctgcacaacctgggcgaccagataggcaaaccctacaacagcagcggcctgggcggcccctccatcaaggacaagtatgtgacggcgctctacttcaccttcagcagcctcaccagtgtgggcttcggcaacgtctctcccaacaccaactcagagaagatcttctccatctgcgtcatgctcattggctccctcatgtatgctagcatcttcggcaacgtgtcggccatcatccagcggctgtactcgggcacagcccgctaccacacacagatgctgcgggtgcgggagttcatccgcttccaccagatccccaatcccctgcgccagcgcctcgaggagtacttccagcacgcctggtcctacaccaacggcatcgacatgaacgcggtgctgaagggcttccctgagtgcctgcaggctgacatctgcctgcacctgaaccgctcactgctgcagcactgcaaacccttccgaggggccaccaagggctgccttcgggccctggccatgaagttcaagaccacacatgcaccgccaggggacacactggtgcatgctggggacctgctcaccgccctgtacttcatctcccggggctccatcgagatcctgcggggcgacgtcgtcgtggccatcctggggaagaatgacatctttggggagcctctgaacctgtatacaaggcctggcaagtcgaacggggatgtgcgggccctcacctactgtgacctacacaagatccatcgggacgacctgctggaggtgctggacatgtaccctgagttctccgaccacttctggtccagcctggagatcaccttcaacctgcgagataccaacatgatcccgggctcccccggcagtacggagttagagggtggcttcagtcggcaacgcaagcgcaagttgtccttccgcaggcgcacggacaaggacacggagcagccaggggaggtgtcggccttggggccgggccgggcgggggcagggccgagtagccggggccggccgggggggccgtggggggagagcccgtccagtggcccctccagccctgagagcagtgaggatgagggcccaggccgcagctccagccccctccgcctggtgcccttctccagccccaggccccccggagagccgccgggtggggagcccctgatggaggactgcgagaagagcagcgacacttgcaaccccctgtcaggcgccttctcaggagtgtccaacattttcagcttctggggggacagtcggggccgccagtaccaggagctccctcgatgccccgcccccacccccagcctcctcaacatccccctctccagcccgggtcggcggccccggggcgacgtggagagcaggctggatgccctccagcgccagctcaacaggctggagacccggctgagtgcagacatggccactgtcctgcagctgctacagaggcagatgacgctggtcccgcccgcctacagtgctgtgaccaccccggggcctggccccacttccacatccccgctgttgcccgtcagccccctccccaccctcaccttggactcgctttctcaggtttcccagttcatggcgtgtgaggagctgcccccgggggccccagagcttccccaagaaggccccacacgacgcctctccctaccgggccagctgggggccctcacctcccagcccctgcacagacacggctcggacccgggcagttagtggggctgcccagtgtggacacgtggctcacccagggatcaaggcgctgctgggccgctccccttggaggccctgctcaggaggccctgaccgtggaaggggagaggaactcgaaagcacagctcctcccccagcccttgggaccatcttctcctgcagtcccctgggccccagtgagaggggcaggggcagggccggcagtaggtggggcctgtggtccccccactgccctgagggcattagctggtctaactgcccggaggcacccggccctgggccttaggcacctcaaggacttttctgctatttactgctcttattgttaaggataataattaaggatcatatgaataattaatgaagatgctgatgactatgaataataaataattatcctgaggaga

SEQ ID NO: 527 - DNA, 3884 bp, Homo sapiens
  source 1..3884: mol_type = genomic DNA
  misc_feature 1..3884: note = cDNA of KCNH2 gene SNP c.243G>C (p.Gln81His)
atgccggtgcggaggggccacgtcgcgccgcagaacaccttcctggacaccatcatccgcaagtttgagggccagagccgtaagttcatcatcgccaacgctcgggtggagaactgcgccgtcatctactgcaacgacggcttctgcgagctgtgcggctactcgcgggccgaggtgatgcagcgaccctgcacctgcgacttcctgcacgggccgcgcacgcagcgccgcgctgccgcgcacatcgcgcaggcactgctgggcgccgaggagcgcaaagtggaaatcgccttctaccggaaagatgggagctgcttcctatgtctggtggatgtggtgcccgtgaagaacgaggatggggctgtcatcatgttcatcctcaatttcgaggtggtgatggagaaggacatggtggggtccccggctcatgacaccaaccaccggggcccccccaccagctggctggccccaggccgcgccaagaccttccgcctgaagctgcccgcgctgctggcgctgacggcccgggagtcgtcggtgcggtcgggcggcgcgggcggcgcgggcgccccgggggccgtggtggtggacgtggacctgacgcccgcggcacccagcagcgagtcgctggccctggacgaagtgacagccatggacaaccacgtggcagggctcgggcccgcggaggagcggcgtgcgctggtgggtcccggctctccgccccgcagcgcgcccggccagctcccatcgccccgggcgcacagcctcaaccccgacgcctcgggctccagctgcagcctggcccggacgcgctcccgagaaagctgcgccagcgtgcgccgcgcctcgtcggccgacgacatcgaggccatgcgcgccggggtgctgcccccgccaccgcgccacgccagcaccggggccatgcacccactgcgcagcggcttgctcaactccacctcggactccgacctcgtgcgctaccgcaccattagcaagattccccaaatcaccctcaactttgtggacctcaagggcgaccccttcttggcttcgcccaccagtgaccgtgagatcatagcacctaagataaaggagcgaacccacaatgtcactgagaaggtcacccaggtcctgtccctgggcgccgacgtgctgcctgagtacaagctgcaggcaccgcgcatccaccgctggaccatcctgcattacagccccttcaaggccgtgtgggactggctcatcctgctgctggtcatctacacggctgtcttcacaccctactcggctgccttcctgctgaaggagacggaagaaggcccgcctgctaccgagtgtggctacgcctgccagccgctggctgtggtggacctcatcgtggacatcatgttcattgtggacatcctcatcaacttccgcaccacctacgtcaatgccaacgaggaggtggtcagccaccccggccgcatcgccgtccactacttcaagggctggttcctcatcgacatggtggccgccatccccttcgacctgctcatcttcggctctggctctgaggagctgatcgggctgctgaagactgcgcggctgctgcggctggtgcgcgtggcgcggaagctggatcgctactcagagtacggcgcggccgtgctgttcttgctcatgtgcacctttgcgctcatcgcgcactggctagcctgcatctggtacgccatcggcaacatggagcagccacacatggactcacgcatcggctggctgcacaacctgggcgaccagataggcaaaccctacaacagcagcggcctgggcggcccctccatcaaggacaagtatgtgacggcgctctacttcaccttcagcagcctcaccagtgtgggcttcggcaacgtctctcccaacaccaactcagagaagatcttctccatctgcgtcatgctcattggctccctcatgtatgctagcatcttcggcaacgtgtcggccatcatccagcggctgtactcgggcacagcccgctaccacacacagatgctgcgggtgcgggagttcatccgcttccaccagatccccaatcccctgcgccagcgcctcgaggagtacttccagcacgcctggtcctacaccaacggcatcgacatgaacgcggtgctgaagggcttccctgagtgcctgcaggctgacatctgcctgcacctgaaccgctcactgctgcagcactgcaaacccttccgaggggccaccaagggctgccttcgggccctggccatgaagttcaagaccacacatgcaccgccaggggacacactggtgcatgctggggacctgctcaccgccctgtacttcatctcccggggctccatcgagatcctgcggggcgacgtcgtcgtggccatcctggggaagaatgacatctttggggagcctctgaacctgtatgcaaggcctggcaagtcgaacggggatgtgcgggccctcacctactgtgacctacacaagatccatcgggacgacctgctggaggtgctggacatgtaccctgagttctccgaccacttctggtccagcctggagatcaccttcaacctgcgagataccaacatgatcccgggctcccccggcagtacggagttagagggtggcttcagtcggcaacgcaagcgcaagttgtccttccgcaggcgcacggacaaggacacggagcagccaggggaggtgtcggccttggggccgggccgggcgggggcagggccgagtagccggggccggccgggggggccgtggggggagagcccgtccagtggcccctccagccctgagagcagtgaggatgagggcccaggccgcagctccagccccctccgcctggtgcccttctccagccccaggccccccggagagccgccgggtggggagcccctgatggaggactgcgagaagagcagcgacacttgcaaccccctgtcaggcgccttctcaggagtgtccaacattttcagcttctggggggacagtcggggccgccagtaccaggagctccctcgatgccccgcccccacccccagcctcctcaacatccccctctccagcccgggtcggcggccccggggcgacgtggagagcaggctggatgccctccagcgccagctcaacaggctggagacccggctgagtgcagacatggccactgtcctgcagctgctacagaggcagatgacgctggtcccgcccgcctacagtgctgtgaccaccccggggcctggccccacttccacatccccgctgttgcccgtcagccccctccccaccctcaccttggactcgctttctcaggtttcccagttcatggcgtgtgaggagctgcccccgggggccccagagcttccccaagaaggccccacacgacgcctctccctaccgggccagctgggggccctcacctcccagcccctgcacagacacggctcggacccgggcagttagtggggctgcccagtgtggacacgtggctcacccagggatcaaggcgctgctgggccgctccccttggaggccctgctcaggaggccctgaccgtggaaggggagaggaactcgaaagcacagctcctcccccagcccttgggaccatcttctcctgcagtcccctgggccccagtgagaggggcaggggcagggccggcagtaggtggggcctgtggtccccccactgccctgagggcattagctggtctaactgcccggaggcacccggccctgggccttaggcacctcaaggacttttctgctatttactgctcttattgttaaggataataattaaggatcatatgaataattaatgaagatgctgatgactatgaataataaataattatcctgaggaga

SEQ ID NO: 528 - DNA, 3884 bp, Homo sapiens
  source 1..3884: mol_type = genomic DNA
  misc_feature 1..3884: note = cDNA of KCNH2 gene SNP c.2452T>C (p.Ser818Pro)
atgccggtgcggaggggccacgtcgcgccgcagaacaccttcctggacaccatcatccgcaagtttgagggccagagccgtaagttcatcatcgccaacgctcgggtggagaactgcgccgtcatctactgcaacgacggcttctgcgagctgtgcggctactcgcgggccgaggtgatgcagcgaccctgcacctgcgacttcctgcacgggccgcgcacgcagcgccgcgctgccgcgcagatcgcgcaggcactgctgggcgccgaggagcgcaaagtggaaatcgccttctaccggaaagatgggagctgcttcctatgtctggtggatgtggtgcccgtgaagaacgaggatggggctgtcatcatgttcatcctcaatttcgaggtggtgatggagaaggacatggtggggtccccggctcatgacaccaaccaccggggcccccccaccagctggctggccccaggccgcgccaagaccttccgcctgaagctgcccgcgctgctggcgctgacggcccgggagtcgtcggtgcggtcgggcggcgcgggcggcgcgggcgccccgggggccgtggtggtggacgtggacctgacgcccgcggcacccagcagcgagtcgctggccctggacgaagtgacagccatggacaaccacgtggcagggctcgggcccgcggaggagcggcgtgcgctggtgggtcccggctctccgccccgcagcgcgcccggccagctcccatcgccccgggcgcacagcctcaaccccgacgcctcgggctccagctgcagcctggcccggacgcgctcccgagaaagctgcgccagcgtgcgccgcgcctcgtcggccgacgacatcgaggccatgcgcgccggggtgctgcccccgccaccgcgccacgccagcaccggggccatgcacccactgcgcagcggcttgctcaactccacctcggactccgacctcgtgcgctaccgcaccattagcaagattccccaaatcaccctcaactttgtggacctcaagggcgaccccttcttggcttcgcccaccagtgaccgtgagatcatagcacctaagataaaggagcgaacccacaatgtcactgagaaggtcacccaggtcctgtccctgggcgccgacgtgctgcctgagtacaagctgcaggcaccgcgcatccaccgctggaccatcctgcattacagccccttcaaggccgtgtgggactggctcatcctgctgctggtcatctacacggctgtcttcacaccctactcggctgccttcctgctgaaggagacggaagaaggcccgcctgctaccgagtgtggctacgcctgccagccgctggctgtggtggacctcatcgtggacatcatgttcattgtggacatcctcatcaacttccgcaccacctacgtcaatgccaacgaggaggtggtcagccaccccggccgcatcgccgtccactacttcaagggctggttcctcatcgacatggtggccgccatccccttcgacctgctcatcttcggctctggctctgaggagctgatcgggctgctgaagactgcgcggctgctgcggctggtgcgcgtggcgcggaagctggatcgctactcagagtacggcgcggccgtgctgttcttgctcatgtgcacctttgcgctcatcgcgcactggctagcctgcatctggtacgccatcggcaacatggagcagccacacatggactcacgcatcggctggctgcacaacctgggcgaccagataggcaaaccctacaacagcagcggcctgggcggcccctccatcaaggacaagtatgtgacggcgctctacttcaccttcagcagcctcaccagtgtgggcttcggcaacgtctctcccaacaccaactcagagaagatcttctccatctgcgtcatgctcattggctccctcatgtatgctagcatcttcggcaacgtgtcggccatcatccagcggctgtactcgggcacagcccgctaccacacacagatgctgcgggtgcgggagttcatccgcttccaccagatccccaatcccctgcgccagcgcctcgaggagtacttccagcacgcctggtcctacaccaacggcatcgacatgaacgcggtgctgaagggcttccctgagtgcctgcaggctgacatctgcctgcacctgaaccgctcactgctgcagcactgcaaacccttccgaggggccaccaagggctgccttcgggccctggccatgaagttcaagaccacacatgcaccgccaggggacacactggtgcatgctggggacctgctcaccgccctgtacttcatctcccggggctccatcgagatcctgcggggcgacgtcgtcgtggccatcctggggaagaatgacatctttggggagcctctgaacctgtatgcaaggcctggcaagccgaacggggatgtgcgggccctcacctactgtgacctacacaagatccatcgggacgacctgctggaggtgctggacatgtaccctgagttctccgaccacttctggtccagcctggagatcaccttcaacctgcgagataccaacatgatcccgggctcccccggcagtacggagttagagggtggcttcagtcggcaacgcaagcgcaagttgtccttccgcaggcgcacggacaaggacacggagcagccaggggaggtgtcggccttggggccgggccgggcgggggcagggccgagtagccggggccggccgggggggccgtggggggagagcccgtccagtggcccctccagccctgagagcagtgaggatgagggcccaggccgcagctccagccccctccgcctggtgcccttctccagccccaggccccccggagagccgccgggtggggagcccctgatggaggactgcgagaagagcagcgacacttgcaaccccctgtcaggcgccttctcaggagtgtccaacattttcagcttctggggggacagtcggggccgccagtaccaggagctccctcgatgccccgcccccacccccagcctcctcaacatccccctctccagcccgggtcggcggccccggggcgacgtggagagcaggctggatgccctccagcgccagctcaacaggctggagacccggctgagtgcagacatggccactgtcctgcagctgctacagaggcagatgacgctggtcccgcccgcctacagtgctgtgaccaccccggggcctggccccacttccacatccccgctgttgcccgtcagccccctccccaccctcaccttggactcgctttctcaggtttcccagttcatggcgtgtgaggagctgcccccgggggccccagagcttccccaagaaggccccacacgacgcctctccctaccgggccagctgggggccctcacctcccagcccctgcacagacacggctcggacccgggcagttagtggggctgcccagtgtggacacgtggctcacccagggatcaaggcgctgctgggccgctccccttggaggccctgctcaggaggccctgaccgtggaaggggagaggaactcgaaagcacagctcctcccccagcccttgggaccatcttctcctgcagtcccctgggccccagtgagaggggcaggggcagggccggcagtaggtggggcctgtggtccccccactgccctgagggcattagctggtctaactgcccggaggcacccggccctgggccttaggcacctcaaggacttttctgctatttactgctcttattgttaaggataataattaaggatcatatgaataattaatgaagatgctgatgactatgaataataaataattatcctgaggaga

SEQ ID NO: 529 - DNA, 3884 bp, Homo sapiens
  source 1..3884: mol_type = genomic DNA
  misc_feature 1..3884: note = cDNA of KCNH2 gene SNP c.2453C>T (p.Ser818Leu)
atgccggtgcggaggggccacgtcgcgccgcagaacaccttcctggacaccatcatccgcaagtttgagggccagagccgtaagttcatcatcgccaacgctcgggtggagaactgcgccgtcatctactgcaacgacggcttctgcgagctgtgcggctactcgcgggccgaggtgatgcagcgaccctgcacctgcgacttcctgcacgggccgcgcacgcagcgccgcgctgccgcgcagatcgcgcaggcactgctgggcgccgaggagcgcaaagtggaaatcgccttctaccggaaagatgggagctgcttcctatgtctggtggatgtggtgcccgtgaagaacgaggatggggctgtcatcatgttcatcctcaatttcgaggtggtgatggagaaggacatggtggggtccccggctcatgacaccaaccaccggggcccccccaccagctggctggccccaggccgcgccaagaccttccgcctgaagctgcccgcgctgctggcgctgacggcccgggagtcgtcggtgcggtcgggcggcgcgggcggcgcgggcgccccgggggccgtggtggtggacgtggacctgacgcccgcggcacccagcagcgagtcgctggccctggacgaagtgacagccatggacaaccacgtggcagggctcgggcccgcggaggagcggcgtgcgctggtgggtcccggctctccgccccgcagcgcgcccggccagctcccatcgccccgggcgcacagcctcaaccccgacgcctcgggctccagctgcagcctggcccggacgcgctcccgagaaagctgcgccagcgtgcgccgcgcctcgtcggccgacgacatcgaggccatgcgcgccggggtgctgcccccgccaccgcgccacgccagcaccggggccatgcacccactgcgcagcggcttgctcaactccacctcggactccgacctcgtgcgctaccgcaccattagcaagattccccaaatcaccctcaactttgtggacctcaagggcgaccccttcttggcttcgcccaccagtgaccgtgagatcatagcacctaagataaaggagcgaacccacaatgtcactgagaaggtcacccaggtcctgtccctgggcgccgacgtgctgcctgagtacaagctgcaggcaccgcgcatccaccgctggaccatcctgcattacagccccttcaaggccgtgtgggactggctcatcctgctgctggtcatctacacggctgtcttcacaccctactcggctgccttcctgctgaaggagacggaagaaggcccgcctgctaccgagtgtggctacgcctgccagccgctggctgtggtggacctcatcgtggacatcatgttcattgtggacatcctcatcaacttccgcaccacctacgtcaatgccaacgaggaggtggtcagccaccccggccgcatcgccgtccactacttcaagggctggttcctcatcgacatggtggccgccatccccttcgacctgctcatcttcggctctggctctgaggagctgatcgggctgctgaagactgcgcggctgctgcggctggtgcgcgtggcgcggaagctggatcgctactcagagtacggcgcggccgtgctgttcttgctcatgtgcacctttgcgctcatcgcgcactggctagcctgcatctggtacgccatcggcaacatggagcagccacacatggactcacgcatcggctggctgcacaacctgggcgaccagataggcaaaccctacaacagcagcggcctgggcggcccctccatcaaggacaagtatgtgacggcgctctacttcaccttcagcagcctcaccagtgtgggcttcggcaacgtctctcccaacaccaactcagagaagatcttctccatctgcgtcatgctcattggctccctcatgtatgctagcatcttcggcaacgtgtcggccatcatccagcggctgtactcgggcacagcccgctaccacacacagatgctgcgggtgcgggagttcatccgcttccaccagatccccaatcccctgcgccagcgcctcgaggagtacttccagcacgcctggtcctacaccaacggcatcgacatgaacgcggtgctgaagggcttccctgagtgcctgcaggctgacatctgcctgcacctgaaccgctcactgctgcagcactgcaaacccttccgaggggccaccaagggctgccttcgggccctggccatgaagttcaagaccacacatgcaccgccaggggacacactggtgcatgctggggacctgctcaccgccctgtacttcatctcccggggctccatcgagatcctgcggggcgacgtcgtcgtggccatcctggggaagaatgacatctttggggagcctctgaacctgtatgcaaggcctggcaagttgaacggggatgtgcgggccctcacctactgtgacctacacaagatccatcgggacgacctgctggaggtgctggacatgtaccctgagttctccgaccacttctggtccagcctggagatcaccttcaacctgcgagataccaacatgatcccgggctcccccggcagtacggagttagagggtggcttcagtcggcaacgcaagcgcaagttgtccttccgcaggcgcacggacaaggacacggagcagccaggggaggtgtcggccttggggccgggccgggcgggggcagggccgagtagccggggccggccgggggggccgtggggggagagcccgtccagtggcccctccagccctgagagcagtgaggatgagggcccaggccgcagctccagccccctccgcctggtgcccttctccagccccaggccccccggagagccgccgggtggggagcccctgatggaggactgcgagaagagcagcgacacttgcaaccccctgtcaggcgccttctcaggagtgtccaacattttcagcttctggggggacagtcggggccgccagtaccaggagctccctcgatgccccgcccccacccccagcctcctcaacatccccctctccagcccgggtcggcggccccggggcgacgtggagagcaggctggatgccctccagcgccagctcaacaggctggagacccggctgagtgcagacatggccactgtcctgcagctgctacagaggcagatgacgctggtcccgcccgcctacagtgctgtgaccaccccggggcctggccccacttccacatccccgctgttgcccgtcagccccctccccaccctcaccttggactcgctttctcaggtttcccagttcatggcgtgtgaggagctgcccccgggggccccagagcttccccaagaaggccccacacgacgcctctccctaccgggccagctgggggccctcacctcccagcccctgcacagacacggctcggacccgggcagttagtggggctgcccagtgtggacacgtggctcacccagggatcaaggcgctgctgggccgctccccttggaggccctgctcaggaggccctgaccgtggaaggggagaggaactcgaaagcacagctcctcccccagcccttgggaccatcttctcctgcagtcccctgggccccagtgagaggggcaggggcagggccggcagtaggtggggcctgtggtccccccactgccctgagggcattagctggtctaactgcccggaggcacccggccctgggccttaggcacctcaaggacttttctgctatttactgctcttattgttaaggataataattaaggatcatatgaataattaatgaagatgctgatgactatgaataataaataattatcctgaggaga

SEQ ID NO: 530 - DNA, 3884 bp, Homo sapiens
  source 1..3884: mol_type = genomic DNA
  misc_feature 1..3884: note = cDNA of KCNH2 gene SNP c.2458G>A (p.Gly820Arg)
atgccggtgcggaggggccacgtcgcgccgcagaacaccttcctggacaccatcatccgcaagtttgagggccagagccgtaagttcatcatcgccaacgctcgggtggagaactgcgccgtcatctactgcaacgacggcttctgcgagctgtgcggctactcgcgggccgaggtgatgcagcgaccctgcacctgcgacttcctgcacgggccgcgcacgcagcgccgcgctgccgcgcagatcgcgcaggcactgctgggcgccgaggagcgcaaagtggaaatcgccttctaccggaaagatgggagctgcttcctatgtctggtggatgtggtgcccgtgaagaacgaggatggggctgtcatcatgttcatcctcaatttcgaggtggtgatggagaaggacatggtggggtccccggctcatgacaccaaccaccggggcccccccaccagctggctggccccaggccgcgccaagaccttccgcctgaagctgcccgcgctgctggcgctgacggcccgggagtcgtcggtgcggtcgggcggcgcgggcggcgcgggcgccccgggggccgtggtggtggacgtggacctgacgcccgcggcacccagcagcgagtcgctggccctggacgaagtgacagccatggacaaccacgtggcagggctcgggcccgcggaggagcggcgtgcgctggtgggtcccggctctccgccccgcagcgcgcccggccagctcccatcgccccgggcgcacagcctcaaccccgacgcctcgggctccagctgcagcctggcccggacgcgctcccgagaaagctgcgccagcgtgcgccgcgcctcgtcggccgacgacatcgaggccatgcgcgccggggtgctgcccccgccaccgcgccacgccagcaccggggccatgcacccactgcgcagcggcttgctcaactccacctcggactccgacctcgtgcgctaccgcaccattagcaagattccccaaatcaccctcaactttgtggacctcaagggcgaccccttcttggcttcgcccaccagtgaccgtgagatcatagcacctaagataaaggagcgaacccacaatgtcactgagaaggtcacccaggtcctgtccctgggcgccgacgtgctgcctgagtacaagctgcaggcaccgcgcatccaccgctggaccatcctgcattacagccccttcaaggccgtgtgggactggctcatcctgctgctggtcatctacacggctgtcttcacaccctactcggctgccttcctgctgaaggagacggaagaaggcccgcctgctaccgagtgtggctacgcctgccagccgctggctgtggtggacctcatcgtggacatcatgttcattgtggacatcctcatcaacttccgcaccacctacgtcaatgccaacgaggaggtggtcagccaccccggccgcatcgccgtccactacttcaagggctggttcctcatcgacatggtggccgccatccccttcgacctgctcatcttcggctctggctctgaggagctgatcgggctgctgaagactgcgcggctgctgcggctggtgcgcgtggcgcggaagctggatcgctactcagagtacggcgcggccgtgctgttcttgctcatgtgcacctttgcgctcatcgcgcactggctagcctgcatctggtacgccatcggcaacatggagcagccacacatggactcacgcatcggctggctgcacaacctgggcgaccagataggcaaaccctacaacagcagcggcctgggcggcccctccatcaaggacaagtatgtgacggcgctctacttcaccttcagcagcctcaccagtgtgggcttcggcaacgtctctcccaacaccaactcagagaagatcttctccatctgcgtcatgctcattggctccctcatgtatgctagcatcttcggcaacgtgtcggccatcatccagcggctgtactcgggcacagcccgctaccacacacagatgctgcgggtgcgggagttcatccgcttccaccagatccccaatcccctgcgccagcgcctcgaggagtacttccagcacgcctggtcctacaccaacggcatcgacatgaacgcggtgctgaagggcttccctgagtgcctgcaggctgacatctgcctgcacctgaaccgctcactgctgcagcactgcaaacccttccgaggggccaccaagggctgccttcgggccctggccatgaagttcaagaccacacatgcaccgccaggggacacactggtgcatgctggggacctgctcaccgccctgtacttcatctcccggggctccatcgagatcctgcggggcgacgtcgtcgtggccatcctggggaagaatgacatctttggggagcctctgaacctgtatgcaaggcctggcaagtcgaacagggatgtgcgggccctcacctactgtgacctacacaagatccatcgggacgacctgctggaggtgctggacatgtaccctgagttctccgaccacttctggtccagcctggagatcaccttcaacctgcgagataccaacatgatcccgggctcccccggcagtacggagttagagggtggcttcagtcggcaacgcaagcgcaagttgtccttccgcaggcgcacggacaaggacacggagcagccaggggaggtgtcggccttggggccgggccgggcgggggcagggccgagtagccggggccggccgggggggccgtggggggagagcccgtccagtggcccctccagccctgagagcagtgaggatgagggcccaggccgcagctccagccccctccgcctggtgcccttctccagccccaggccccccggagagccgccgggtggggagcccctgatggaggactgcgagaagagcagcgacacttgcaaccccctgtcaggcgccttctcaggagtgtccaacattttcagcttctggggggacagtcggggccgccagtaccaggagctccctcgatgccccgcccccacccccagcctcctcaacatccccctctccagcccgggtcggcggccccggggcgacgtggagagcaggctggatgccctccagcgccagctcaacaggctggagacccggctgagtgcagacatggccactgtcctgcagctgctacagaggcagatgacgctggtcccgcccgcctacagtgctgtgaccaccccggggcctggccccacttccacatccccgctgttgcccgtcagccccctccccaccctcaccttggactcgctttctcaggtttcccagttcatggcgtgtgaggagctgcccccgggggccccagagcttccccaagaaggccccacacgacgcctctccctaccgggccagctgggggccctcacctcccagcccctgcacagacacggctcggacccgggcagttagtggggctgcccagtgtggacacgtggctcacccagggatcaaggcgctgctgggccgctccccttggaggccctgctcaggaggccctgaccgtggaaggggagaggaactcgaaagcacagctcctcccccagcccttgggaccatcttctcctgcagtcccctgggccccagtgagaggggcaggggcagggccggcagtaggtggggcctgtggtccccccactgccctgagggcattagctggtctaactgcccggaggcacccggccctgggccttaggcacctcaaggacttttctgctatttactgctcttattgttaaggataataattaaggatcatatgaataattaatgaagatgctgatgactatgaataataaataattatcctgaggaga

SEQ ID NO: 531 - DNA, 3884 bp, Homo sapiens
  source 1..3884: mol_type = genomic DNA
  misc_feature 1..3884: note = cDNA of KCNH2 gene SNP c.245T>C (p.Ile82Thr)
atgccggtgcggaggggccacgtcgcgccgcagaacaccttcctggacaccatcatccgcaagtttgagggccagagccgtaagttcatcatcgccaacgctcgggtggagaactgcgccgtcatctactgcaacgacggcttctgcgagctgtgcggctactcgcgggccgaggtgatgcagcgaccctgcacctgcgacttcctgcacgggccgcgcacgcagcgccgcgctgccgcgcagaccgcgcaggcactgctgggcgccgaggagcgcaaagtggaaatcgccttctaccggaaagatgggagctgcttcctatgtctggtggatgtggtgcccgtgaagaacgaggatggggctgtcatcatgttcatcctcaatttcgaggtggtgatggagaaggacatggtggggtccccggctcatgacaccaaccaccggggcccccccaccagctggctggccccaggccgcgccaagaccttccgcctgaagctgcccgcgctgctggcgctgacggcccgggagtcgtcggtgcggtcgggcggcgcgggcggcgcgggcgccccgggggccgtggtggtggacgtggacctgacgcccgcggcacccagcagcgagtcgctggccctggacgaagtgacagccatggacaaccacgtggcagggctcgggcccgcggaggagcggcgtgcgctggtgggtcccggctctccgccccgcagcgcgcccggccagctcccatcgccccgggcgcacagcctcaaccccgacgcctcgggctccagctgcagcctggcccggacgcgctcccgagaaagctgcgccagcgtgcgccgcgcctcgtcggccgacgacatcgaggccatgcgcgccggggtgctgcccccgccaccgcgccacgccagcaccggggccatgcacccactgcgcagcggcttgctcaactccacctcggactccgacctcgtgcgctaccgcaccattagcaagattccccaaatcaccctcaactttgtggacctcaagggcgaccccttcttggcttcgcccaccagtgaccgtgagatcatagcacctaagataaaggagcgaacccacaatgtcactgagaaggtcacccaggtcctgtccctgggcgccgacgtgctgcctgagtacaagctgcaggcaccgcgcatccaccgctggaccatcctgcattacagccccttcaaggccgtgtgggactggctcatcctgctgctggtcatctacacggctgtcttcacaccctactcggctgccttcctgctgaaggagacggaagaaggcccgcctgctaccgagtgtggctacgcctgccagccgctggctgtggtggacctcatcgtggacatcatgttcattgtggacatcctcatcaacttccgcaccacctacgtcaatgccaacgaggaggtggtcagccaccccggccgcatcgccgtccactacttcaagggctggttcctcatcgacatggtggccgccatccccttcgacctgctcatcttcggctctggctctgaggagctgatcgggctgctgaagactgcgcggctgctgcggctggtgcgcgtggcgcggaagctggatcgctactcagagtacggcgcggccgtgctgttcttgctcatgtgcacctttgcgctcatcgcgcactggctagcctgcatctggtacgccatcggcaacatggagcagccacacatggactcacgcatcggctggctgcacaacctgggcgaccagataggcaaaccctacaacagcagcggcctgggcggcccctccatcaaggacaagtatgtgacggcgctctacttcaccttcagcagcctcaccagtgtgggcttcggcaacgtctctcccaacaccaactcagagaagatcttctccatctgcgtcatgctcattggctccctcatgtatgctagcatcttcggcaacgtgtcggccatcatccagcggctgtactcgggcacagcccgctaccacacacagatgctgcgggtgcgggagttcatccgcttccaccagatccccaatcccctgcgccagcgcctcgaggagtacttccagcacgcctggtcctacaccaacggcatcgacatgaacgcggtgctgaagggcttccctgagtgcctgcaggctgacatctgcctgcacctgaaccgctcactgctgcagcactgcaaacccttccgaggggccaccaagggctgccttcgggccctggccatgaagttcaagaccacacatgcaccgccaggggacacactggtgcatgctggggacctgctcaccgccctgtacttcatctcccggggctccatcgagatcctgcggggcgacgtcgtcgtggccatcctggggaagaatgacatctttggggagcctctgaacctgtatgcaaggcctggcaagtcgaacggggatgtgcgggccctcacctactgtgacctacacaagatccatcgggacgacctgctggaggtgctggacatgtaccctgagttctccgaccacttctggtccagcctggagatcaccttcaacctgcgagataccaacatgatcccgggctcccccggcagtacggagttagagggtggcttcagtcggcaacgcaagcgcaagttgtccttccgcaggcgcacggacaaggacacggagcagccaggggaggtgtcggccttggggccgggccgggcgggggcagggccgagtagccggggccggccgggggggccgtggggggagagcccgtccagtggcccctccagccctgagagcagtgaggatgagggcccaggccgcagctccagccccctccgcctggtgcccttctccagccccaggccccccggagagccgccgggtggggagcccctgatggaggactgcgagaagagcagcgacacttgcaaccccctgtcaggcgccttctcaggagtgtccaacattttcagcttctggggggacagtcggggccgccagtaccaggagctccctcgatgccccgcccccacccccagcctcctcaacatccccctctccagcccgggtcggcggccccggggcgacgtggagagcaggctggatgccctccagcgccagctcaacaggctggagacccggctgagtgcagacatggccactgtcctgcagctgctacagaggcagatgacgctggtcccgcccgcctacagtgctgtgaccaccccggggcctggccccacttccacatccccgctgttgcccgtcagccccctccccaccctcaccttggactcgctttctcaggtttcccagttcatggcgtgtgaggagctgcccccgggggccccagagcttccccaagaaggccccacacgacgcctctccctaccgggccagctgggggccctcacctcccagcccctgcacagacacggctcggacccgggcagttagtggggctgcccagtgtggacacgtggctcacccagggatcaaggcgctgctgggccgctccccttggaggccctgctcaggaggccctgaccgtggaaggggagaggaactcgaaagcacagctcctcccccagcccttgggaccatcttctcctgcagtcccctgggccccagtgagaggggcaggggcagggccggcagtaggtggggcctgtggtccccccactgccctgagggcattagctggtctaactgcccggaggcacccggccctgggccttaggcacctcaaggacttttctgctatttactgctcttattgttaaggataataattaaggatcatatgaataattaatgaagatgctgatgactatgaataataaataattatcctgaggaga

SEQ ID NO: 532 - DNA, 3884 bp, Homo sapiens
  source 1..3884: mol_type = genomic DNA
  misc_feature 1..3884: note = cDNA of KCNH2 gene SNP c.2464G>A (p.Val822Met)
atgccggtgcggaggggccacgtcgcgccgcagaacaccttcctggacaccatcatccgcaagtttgagggccagagccgtaagttcatcatcgccaacgctcgggtggagaactgcgccgtcatctactgcaacgacggcttctgcgagctgtgcggctactcgcgggccgaggtgatgcagcgaccctgcacctgcgacttcctgcacgggccgcgcacgcagcgccgcgctgccgcgcagatcgcgcaggcactgctgggcgccgaggagcgcaaagtggaaatcgccttctaccggaaagatgggagctgcttcctatgtctggtggatgtggtgcccgtgaagaacgaggatggggctgtcatcatgttcatcctcaatttcgaggtggtgatggagaaggacatggtggggtccccggctcatgacaccaaccaccggggcccccccaccagctggctggccccaggccgcgccaagaccttccgcctgaagctgcccgcgctgctggcgctgacggcccgggagtcgtcggtgcggtcgggcggcgcgggcggcgcgggcgccccgggggccgtggtggtggacgtggacctgacgcccgcggcacccagcagcgagtcgctggccctggacgaagtgacagccatggacaaccacgtggcagggctcgggcccgcggaggagcggcgtgcgctggtgggtcccggctctccgccccgcagcgcgcccggccagctcccatcgccccgggcgcacagcctcaaccccgacgcctcgggctccagctgcagcctggcccggacgcgctcccgagaaagctgcgccagcgtgcgccgcgcctcgtcggccgacgacatcgaggccatgcgcgccggggtgctgcccccgccaccgcgccacgccagcaccggggccatgcacccactgcgcagcggcttgctcaactccacctcggactccgacctcgtgcgctaccgcaccattagcaagattccccaaatcaccctcaactttgtggacctcaagggcgaccccttcttggcttcgcccaccagtgaccgtgagatcatagcacctaagataaaggagcgaacccacaatgtcactgagaaggtcacccaggtcctgtccctgggcgccgacgtgctgcctgagtacaagctgcaggcaccgcgcatccaccgctggaccatcctgcattacagccccttcaaggccgtgtgggactggctcatcctgctgctggtcatctacacggctgtcttcacaccctactcggctgccttcctgctgaaggagacggaagaaggcccgcctgctaccgagtgtggctacgcctgccagccgctggctgtggtggacctcatcgtggacatcatgttcattgtggacatcctcatcaacttccgcaccacctacgtcaatgccaacgaggaggtggtcagccaccccggccgcatcgccgtccactacttcaagggctggttcctcatcgacatggtggccgccatccccttcgacctgctcatcttcggctctggctctgaggagctgatcgggctgctgaagactgcgcggctgctgcggctggtgcgcgtggcgcggaagctggatcgctactcagagtacggcgcggccgtgctgttcttgctcatgtgcacctttgcgctcatcgcgcactggctagcctgcatctggtacgccatcggcaacatggagcagccacacatggactcacgcatcggctggctgcacaacctgggcgaccagataggcaaaccctacaacagcagcggcctgggcggcccctccatcaaggacaagtatgtgacggcgctctacttcaccttcagcagcctcaccagtgtgggcttcggcaacgtctctcccaacaccaactcagagaagatcttctccatctgcgtcatgctcattggctccctcatgtatgctagcatcttcggcaacgtgtcggccatcatccagcggctgtactcgggcacagcccgctaccacacacagatgctgcgggtgcgggagttcatccgcttccaccagatccccaatcccctgcgccagcgcctcgaggagtacttccagcacgcctggtcctacaccaacggcatcgacatgaacgcggtgctgaagggcttccctgagtgcctgcaggctgacatctgcctgcacctgaaccgctcactgctgcagcactgcaaacccttccgaggggccaccaagggctgccttcgggccctggccatgaagttcaagaccacacatgcaccgccaggggacacactggtgcatgctggggacctgctcaccgccctgtacttcatctcccggggctccatcgagatcctgcggggcgacgtcgtcgtggccatcctggggaagaatgacatctttggggagcctctgaacctgtatgcaaggcctggcaagtcgaacggggatatgcgggccctcacctactgtgacctacacaagatccatcgggacgacctgctggaggtgctggacatgtaccctgagttctccgaccacttctggtccagcctggagatcaccttcaacctgcgagataccaacatgatcccgggctcccccggcagtacggagttagagggtggcttcagtcggcaacgcaagcgcaagttgtccttccgcaggcgcacggacaaggacacggagcagccaggggaggtgtcggccttggggccgggccgggcgggggcagggccgagtagccggggccggccgggggggccgtggggggagagcccgtccagtggcccctccagccctgagagcagtgaggatgagggcccaggccgcagctccagccccctccgcctggtgcccttctccagccccaggccccccggagagccgccgggtggggagcccctgatggaggactgcgagaagagcagcgacacttgcaaccccctgtcaggcgccttctcaggagtgtccaacattttcagcttctggggggacagtcggggccgccagtaccaggagctccctcgatgccccgcccccacccccagcctcctcaacatccccctctccagcccgggtcggcggccccggggcgacgtggagagcaggctggatgccctccagcgccagctcaacaggctggagacccggctgagtgcagacatggccactgtcctgcagctgctacagaggcagatgacgctggtcccgcccgcctacagtgctgtgaccaccccggggcctggccccacttccacatccccgctgttgcccgtcagccccctccccaccctcaccttggactcgctttctcaggtttcccagttcatggcgtgtgaggagctgcccccgggggccccagagcttccccaagaaggccccacacgacgcctctccctaccgggccagctgggggccctcacctcccagcccctgcacagacacggctcggacccgggcagttagtggggctgcccagtgtggacacgtggctcacccagggatcaaggcgctgctgggccgctccccttggaggccctgctcaggaggccctgaccgtggaaggggagaggaactcgaaagcacagctcctcccccagcccttgggaccatcttctcctgcagtcccctgggccccagtgagaggggcaggggcagggccggcagtaggtggggcctgtggtccccccactgccctgagggcattagctggtctaactgcccggaggcacccggccctgggccttaggcacctcaaggacttttctgctatttactgctcttattgttaaggataataattaaggatcatatgaataattaatgaagatgctgatgactatgaataataaataattatcctgaggaga

SEQ ID NO: 533 - DNA, 3884 bp, Homo sapiens
  source 1..3884: mol_type = genomic DNA
  misc_feature 1..3884: note = cDNA of KCNH2 gene SNP c.2464G>C (p.Val822Leu)
atgccggtgcggaggggccacgtcgcgccgcagaacaccttcctggacaccatcatccgcaagtttgagggccagagccgtaagttcatcatcgccaacgctcgggtggagaactgcgccgtcatctactgcaacgacggcttctgcgagctgtgcggctactcgcgggccgaggtgatgcagcgaccctgcacctgcgacttcctgcacgggccgcgcacgcagcgccgcgctgccgcgcagatcgcgcaggcactgctgggcgccgaggagcgcaaagtggaaatcgccttctaccggaaagatgggagctgcttcctatgtctggtggatgtggtgcccgtgaagaacgaggatggggctgtcatcatgttcatcctcaatttcgaggtggtgatggagaaggacatggtggggtccccggctcatgacaccaaccaccggggcccccccaccagctggctggccccaggccgcgccaagaccttccgcctgaagctgcccgcgctgctggcgctgacggcccgggagtcgtcggtgcggtcgggcggcgcgggcggcgcgggcgccccgggggccgtggtggtggacgtggacctgacgcccgcggcacccagcagcgagtcgctggccctggacgaagtgacagccatggacaaccacgtggcagggctcgggcccgcggaggagcggcgtgcgctggtgggtcccggctctccgccccgcagcgcgcccggccagctcccatcgccccgggcgcacagcctcaaccccgacgcctcgggctccagctgcagcctggcccggacgcgctcccgagaaagctgcgccagcgtgcgccgcgcctcgtcggccgacgacatcgaggccatgcgcgccggggtgctgcccccgccaccgcgccacgccagcaccggggccatgcacccactgcgcagcggcttgctcaactccacctcggactccgacctcgtgcgctaccgcaccattagcaagattccccaaatcaccctcaactttgtggacctcaagggcgaccccttcttggcttcgcccaccagtgaccgtgagatcatagcacctaagataaaggagcgaacccacaatgtcactgagaaggtcacccaggtcctgtccctgggcgccgacgtgctgcctgagtacaagctgcaggcaccgcgcatccaccgctggaccatcctgcattacagccccttcaaggccgtgtgggactggctcatcctgctgctggtcatctacacggctgtcttcacaccctactcggctgccttcctgctgaaggagacggaagaaggcccgcctgctaccgagtgtggctacgcctgccagccgctggctgtggtggacctcatcgtggacatcatgttcattgtggacatcctcatcaacttccgcaccacctacgtcaatgccaacgaggaggtggtcagccaccccggccgcatcgccgtccactacttcaagggctggttcctcatcgacatggtggccgccatccccttcgacctgctcatcttcggctctggctctgaggagctgatcgggctgctgaagactgcgcggctgctgcggctggtgcgcgtggcgcggaagctggatcgctactcagagtacggcgcggccgtgctgttcttgctcatgtgcacctttgcgctcatcgcgcactggctagcctgcatctggtacgccatcggcaacatggagcagccacacatggactcacgcatcggctggctgcacaacctgggcgaccagataggcaaaccctacaacagcagcggcctgggcggcccctccatcaaggacaagtatgtgacggcgctctacttcaccttcagcagcctcaccagtgtgggcttcggcaacgtctctcccaacaccaactcagagaagatcttctccatctgcgtcatgctcattggctccctcatgtatgctagcatcttcggcaacgtgtcggccatcatccagcggctgtactcgggcacagcccgctaccacacacagatgctgcgggtgcgggagttcatccgcttccaccagatccccaatcccctgcgccagcgcctcgaggagtacttccagcacgcctggtcctacaccaacggcatcgacatgaacgcggtgctgaagggcttccctgagtgcctgcaggctgacatctgcctgcacctgaaccgctcactgctgcagcactgcaaacccttccgaggggccaccaagggctgccttcgggccctggccatgaagttcaagaccacacatgcaccgccaggggacacactggtgcatgctggggacctgctcaccgccctgtacttcatctcccggggctccatcgagatcctgcggggcgacgtcgtcgtggccatcctggggaagaatgacatctttggggagcctctgaacctgtatgcaaggcctggcaagtcgaacggggatctgcgggccctcacctactgtgacctacacaagatccatcgggacgacctgctggaggtgctggacatgtaccctgagttctccgaccacttctggtccagcctggagatcaccttcaacctgcgagataccaacatgatcccgggctcccccggcagtacggagttagagggtggcttcagtcggcaacgcaagcgcaagttgtccttccgcaggcgcacggacaaggacacggagcagccaggggaggtgtcggccttggggccgggccgggcgggggcagggccgagtagccggggccggccgggggggccgtggggggagagcccgtccagtggcccctccagccctgagagcagtgaggatgagggcccaggccgcagctccagccccctccgcctggtgcccttctccagccccaggccccccggagagccgccgggtggggagcccctgatggaggactgcgagaagagcagcgacacttgcaaccccctgtcaggcgccttctcaggagtgtccaacattttcagcttctggggggacagtcggggccgccagtaccaggagctccctcgatgccccgcccccacccccagcctcctcaacatccccctctccagcccgggtcggcggccccggggcgacgtggagagcaggctggatgccctccagcgccagctcaacaggctggagacccggctgagtgcagacatggccactgtcctgcagctgctacagaggcagatgacgctggtcccgcccgcctacagtgctgtgaccaccccggggcctggccccacttccacatccccgctgttgcccgtcagccccctccccaccctcaccttggactcgctttctcaggtttcccagttcatggcgtgtgaggagctgcccccgggggccccagagcttccccaagaaggccccacacgacgcctctccctaccgggccagctgggggccctcacctcccagcccctgcacagacacggctcggacccgggcagttagtggggctgcccagtgtggacacgtggctcacccagggatcaaggcgctgctgggccgctccccttggaggccctgctcaggaggccctgaccgtggaaggggagaggaactcgaaagcacagctcctcccccagcccttgggaccatcttctcctgcagtcccctgggccccagtgagaggggcaggggcagggccggcagtaggtggggcctgtggtccccccactgccctgagggcattagctggtctaactgcccggaggcacccggccctgggccttaggcacctcaaggacttttctgctatttactgctcttattgttaaggataataattaaggatcatatgaataattaatgaagatgctgatgactatgaataataaataattatcctgaggaga

SEQ ID NO: 534 - DNA, 3884 bp, Homo sapiens
  source 1..3884: mol_type = genomic DNA
  misc_feature 1..3884: note = cDNA of KCNH2 gene SNP c.2467C>T (p.Arg823Trp)
atgccggtgcggaggggccacgtcgcgccgcagaacaccttcctggacaccatcatccgcaagtttgagggccagagccgtaagttcatcatcgccaacgctcgggtggagaactgcgccgtcatctactgcaacgacggcttctgcgagctgtgcggctactcgcgggccgaggtgatgcagcgaccctgcacctgcgacttcctgcacgggccgcgcacgcagcgccgcgctgccgcgcagatcgcgcaggcactgctgggcgccgaggagcgcaaagtggaaatcgccttctaccggaaagatgggagctgcttcctatgtctggtggatgtggtgcccgtgaagaacgaggatggggctgtcatcatgttcatcctcaatttcgaggtggtgatggagaaggacatggtggggtccccggctcatgacaccaaccaccggggcccccccaccagctggctggccccaggccgcgccaagaccttccgcctgaagctgcccgcgctgctggcgctgacggcccgggagtcgtcggtgcggtcgggcggcgcgggcggcgcgggcgccccgggggccgtggtggtggacgtggacctgacgcccgcggcacccagcagcgagtcgctggccctggacgaagtgacagccatggacaaccacgtggcagggctcgggcccgcggaggagcggcgtgcgctggtgggtcccggctctccgccccgcagcgcgcccggccagctcccatcgccccgggcgcacagcctcaaccccgacgcctcgggctccagctgcagcctggcccggacgcgctcccgagaaagctgcgccagcgtgcgccgcgcctcgtcggccgacgacatcgaggccatgcgcgccggggtgctgcccccgccaccgcgccacgccagcaccggggccatgcacccactgcgcagcggcttgctcaactccacctcggactccgacctcgtgcgctaccgcaccattagcaagattccccaaatcaccctcaactttgtggacctcaagggcgaccccttcttggcttcgcccaccagtgaccgtgagatcatagcacctaagataaaggagcgaacccacaatgtcactgagaaggtcacccaggtcctgtccctgggcgccgacgtgctgcctgagtacaagctgcaggcaccgcgcatccaccgctggaccatcctgcattacagccccttcaaggccgtgtgggactggctcatcctgctgctggtcatctacacggctgtcttcacaccctactcggctgccttcctgctgaaggagacggaagaaggcccgcctgctaccgagtgtggctacgcctgccagccgctggctgtggtggacctcatcgtggacatcatgttcattgtggacatcctcatcaacttccgcaccacctacgtcaatgccaacgaggaggtggtcagccaccccggccgcatcgccgtccactacttcaagggctggttcctcatcgacatggtggccgccatccccttcgacctgctcatcttcggctctggctctgaggagctgatcgggctgctgaagactgcgcggctgctgcggctggtgcgcgtggcgcggaagctggatcgctactcagagtacggcgcggccgtgctgttcttgctcatgtgcacctttgcgctcatcgcgcactggctagcctgcatctggtacgccatcggcaacatggagcagccacacatggactcacgcatcggctggctgcacaacctgggcgaccagataggcaaaccctacaacagcagcggcctgggcggcccctccatcaaggacaagtatgtgacggcgctctacttcaccttcagcagcctcaccagtgtgggcttcggcaacgtctctcccaacaccaactcagagaagatcttctccatctgcgtcatgctcattggctccctcatgtatgctagcatcttcggcaacgtgtcggccatcatccagcggctgtactcgggcacagcccgctaccacacacagatgctgcgggtgcgggagttcatccgcttccaccagatccccaatcccctgcgccagcgcctcgaggagtacttccagcacgcctggtcctacaccaacggcatcgacatgaacgcggtgctgaagggcttccctgagtgcctgcaggctgacatctgcctgcacctgaaccgctcactgctgcagcactgcaaacccttccgaggggccaccaagggctgccttcgggccctggccatgaagttcaagaccacacatgcaccgccaggggacacactggtgcatgctggggacctgctcaccgccctgtacttcatctcccggggctccatcgagatcctgcggggcgacgtcgtcgtggccatcctggggaagaatgacatctttggggagcctctgaacctgtatgcaaggcctggcaagtcgaacggggatgtgtgggccctcacctactgtgacctacacaagatccatcgggacgacctgctggaggtgctggacatgtaccctgagttctccgaccacttctggtccagcctggagatcaccttcaacctgcgagataccaacatgatcccgggctcccccggcagtacggagttagagggtggcttcagtcggcaacgcaagcgcaagttgtccttccgcaggcgcacggacaaggacacggagcagccaggggaggtgtcggccttggggccgggccgggcgggggcagggccgagtagccggggccggccgggggggccgtggggggagagcccgtccagtggcccctccagccctgagagcagtgaggatgagggcccaggccgcagctccagccccctccgcctggtgcccttctccagccccaggccccccggagagccgccgggtggggagcccctgatggaggactgcgagaagagcagcgacacttgcaaccccctgtcaggcgccttctcaggagtgtccaacattttcagcttctggggggacagtcggggccgccagtaccaggagctccctcgatgccccgcccccacccccagcctcctcaacatccccctctccagcccgggtcggcggccccggggcgacgtggagagcaggctggatgccctccagcgccagctcaacaggctggagacccggctgagtgcagacatggccactgtcctgcagctgctacagaggcagatgacgctggtcccgcccgcctacagtgctgtgaccaccccggggcctggccccacttccacatccccgctgttgcccgtcagccccctccccaccctcaccttggactcgctttctcaggtttcccagttcatggcgtgtgaggagctgcccccgggggccccagagcttccccaagaaggccccacacgacgcctctccctaccgggccagctgggggccctcacctcccagcccctgcacagacacggctcggacccgggcagttagtggggctgcccagtgtggacacgtggctcacccagggatcaaggcgctgctgggccgctccccttggaggccctgctcaggaggccctgaccgtggaaggggagaggaactcgaaagcacagctcctcccccagcccttgggaccatcttctcctgcagtcccctgggccccagtgagaggggcaggggcagggccggcagtaggtggggcctgtggtccccccactgccctgagggcattagctggtctaactgcccggaggcacccggccctgggccttaggcacctcaaggacttttctgctatttactgctcttattgttaaggataataattaaggatcatatgaataattaatgaagatgctgatgactatgaataataaataattatcctgaggaga

SEQ ID NO: 535 - DNA, 3884 bp, Homo sapiens
  source 1..3884: mol_type = genomic DNA
  misc_feature 1..3884: note = cDNA of KCNH2 gene SNP c.2468G>A (p.Arg823Gln)
atgccggtgcggaggggccacgtcgcgccgcagaacaccttcctggacaccatcatccgcaagtttgagggccagagccgtaagttcatcatcgccaacgctcgggtggagaactgcgccgtcatctactgcaacgacggcttctgcgagctgtgcggctactcgcgggccgaggtgatgcagcgaccctgcacctgcgacttcctgcacgggccgcgcacgcagcgccgcgctgccgcgcagatcgcgcaggcactgctgggcgccgaggagcgcaaagtggaaatcgccttctaccggaaagatgggagctgcttcctatgtctggtggatgtggtgcccgtgaagaacgaggatggggctgtcatcatgttcatcctcaatttcgaggtggtgatggagaaggacatggtggggtccccggctcatgacaccaaccaccggggcccccccaccagctggctggccccaggccgcgccaagaccttccgcctgaagctgcccgcgctgctggcgctgacggcccgggagtcgtcggtgcggtcgggcggcgcgggcggcgcgggcgccccgggggccgtggtggtggacgtggacctgacgcccgcggcacccagcagcgagtcgctggccctggacgaagtgacagccatggacaaccacgtggcagggctcgggcccgcggaggagcggcgtgcgctggtgggtcccggctctccgccccgcagcgcgcccggccagctcccatcgccccgggcgcacagcctcaaccccgacgcctcgggctccagctgcagcctggcccggacgcgctcccgagaaagctgcgccagcgtgcgccgcgcctcgtcggccgacgacatcgaggccatgcgcgccggggtgctgcccccgccaccgcgccacgccagcaccggggccatgcacccactgcgcagcggcttgctcaactccacctcggactccgacctcgtgcgctaccgcaccattagcaagattccccaaatcaccctcaactttgtggacctcaagggcgaccccttcttggcttcgcccaccagtgaccgtgagatcatagcacctaagataaaggagcgaacccacaatgtcactgagaaggtcacccaggtcctgtccctgggcgccgacgtgctgcctgagtacaagctgcaggcaccgcgcatccaccgctggaccatcctgcattacagccccttcaaggccgtgtgggactggctcatcctgctgctggtcatctacacggctgtcttcacaccctactcggctgccttcctgctgaaggagacggaagaaggcccgcctgctaccgagtgtggctacgcctgccagccgctggctgtggtggacctcatcgtggacatcatgttcattgtggacatcctcatcaacttccgcaccacctacgtcaatgccaacgaggaggtggtcagccaccccggccgcatcgccgtccactacttcaagggctggttcctcatcgacatggtggccgccatccccttcgacctgctcatcttcggctctggctctgaggagctgatcgggctgctgaagactgcgcggctgctgcggctggtgcgcgtggcgcggaagctggatcgctactcagagtacggcgcggccgtgctgttcttgctcatgtgcacctttgcgctcatcgcgcactggctagcctgcatctggtacgccatcggcaacatggagcagccacacatggactcacgcatcggctggctgcacaacctgggcgaccagataggcaaaccctacaacagcagcggcctgggcggcccctccatcaaggacaagtatgtgacggcgctctacttcaccttcagcagcctcaccagtgtgggcttcggcaacgtctctcccaacaccaactcagagaagatcttctccatctgcgtcatgctcattggctccctcatgtatgctagcatcttcggcaacgtgtcggccatcatccagcggctgtactcgggcacagcccgctaccacacacagatgctgcgggtgcgggagttcatccgcttccaccagatccccaatcccctgcgccagcgcctcgaggagtacttccagcacgcctggtcctacaccaacggcatcgacatgaacgcggtgctgaagggcttccctgagtgcctgcaggctgacatctgcctgcacctgaaccgctcactgctgcagcactgcaaacccttccgaggggccaccaagggctgccttcgggccctggccatgaagttcaagaccacacatgcaccgccaggggacacactggtgcatgctggggacctgctcaccgccctgtacttcatctcccggggctccatcgagatcctgcggggcgacgtcgtcgtggccatcctggggaagaatgacatctttggggagcctctgaacctgtatgcaaggcctggcaagtcgaacggggatgtgcaggccctcacctactgtgacctacacaagatccatcgggacgacctgctggaggtgctggacatgtaccctgagttctccgaccacttctggtccagcctggagatcaccttcaacctgcgagataccaacatgatcccgggctcccccggcagtacggagttagagggtggcttcagtcggcaacgcaagcgcaagttgtccttccgcaggcgcacggacaaggacacggagcagccaggggaggtgtcggccttggggccgggccgggcgggggcagggccgagtagccggggccggccgggggggccgtggggggagagcccgtccagtggcccctccagccctgagagcagtgaggatgagggcccaggccgcagctccagccccctccgcctggtgcccttctccagccccaggccccccggagagccgccgggtggggagcccctgatggaggactgcgagaagagcagcgacacttgcaaccccctgtcaggcgccttctcaggagtgtccaacattttcagcttctggggggacagtcggggccgccagtaccaggagctccctcgatgccccgcccccacccccagcctcctcaacatccccctctccagcccgggtcggcggccccggggcgacgtggagagcaggctggatgccctccagcgccagctcaacaggctggagacccggctgagtgcagacatggccactgtcctgcagctgctacagaggcagatgacgctggtcccgcccgcctacagtgctgtgaccaccccggggcctggccccacttccacatccccgctgttgcccgtcagccccctccccaccctcaccttggactcgctttctcaggtttcccagttcatggcgtgtgaggagctgcccccgggggccccagagcttccccaagaaggccccacacgacgcctctccctaccgggccagctgggggccctcacctcccagcccctgcacagacacggctcggacccgggcagttagtggggctgcccagtgtggacacgtggctcacccagggatcaaggcgctgctgggccgctccccttggaggccctgctcaggaggccctgaccgtggaaggggagaggaactcgaaagcacagctcctcccccagcccttgggaccatcttctcctgcagtcccctgggccccagtgagaggggcaggggcagggccggcagtaggtggggcctgtggtccccccactgccctgagggcattagctggtctaactgcccggaggcacccggccctgggccttaggcacctcaaggacttttctgctatttactgctcttattgttaaggataataattaaggatcatatgaataattaatgaagatgctgatgactatgaataataaataattatcctgaggaga

SEQ ID NO: 536 - DNA, 3884 bp, Homo sapiens
  source 1..3884: mol_type = genomic DNA
  misc_feature 1..3884: note = cDNA of KCNH2 gene SNP c.2477C>T (p.Thr826Ile)
atgccggtgcggaggggccacgtcgcgccgcagaacaccttcctggacaccatcatccgcaagtttgagggccagagccgtaagttcatcatcgccaacgctcgggtggagaactgcgccgtcatctactgcaacgacggcttctgcgagctgtgcggctactcgcgggccgaggtgatgcagcgaccctgcacctgcgacttcctgcacgggccgcgcacgcagcgccgcgctgccgcgcagatcgcgcaggcactgctgggcgccgaggagcgcaaagtggaaatcgccttctaccggaaagatgggagctgcttcctatgtctggtggatgtggtgcccgtgaagaacgaggatggggctgtcatcatgttcatcctcaatttcgaggtggtgatggagaaggacatggtggggtccccggctcatgacaccaaccaccggggcccccccaccagctggctggccccaggccgcgccaagaccttccgcctgaagctgcccgcgctgctggcgctgacggcccgggagtcgtcggtgcggtcgggcggcgcgggcggcgcgggcgccccgggggccgtggtggtggacgtggacctgacgcccgcggcacccagcagcgagtcgctggccctggacgaagtgacagccatggacaaccacgtggcagggctcgggcccgcggaggagcggcgtgcgctggtgggtcccggctctccgccccgcagcgcgcccggccagctcccatcgccccgggcgcacagcctcaaccccgacgcctcgggctccagctgcagcctggcccggacgcgctcccgagaaagctgcgccagcgtgcgccgcgcctcgtcggccgacgacatcgaggccatgcgcgccggggtgctgcccccgccaccgcgccacgccagcaccggggccatgcacccactgcgcagcggcttgctcaactccacctcggactccgacctcgtgcgctaccgcaccattagcaagattccccaaatcaccctcaactttgtggacctcaagggcgaccccttcttggcttcgcccaccagtgaccgtgagatcatagcacctaagataaaggagcgaacccacaatgtcactgagaaggtcacccaggtcctgtccctgggcgccgacgtgctgcctgagtacaagctgcaggcaccgcgcatccaccgctggaccatcctgcattacagccccttcaaggccgtgtgggactggctcatcctgctgctggtcatctacacggctgtcttcacaccctactcggctgccttcctgctgaaggagacggaagaaggcccgcctgctaccgagtgtggctacgcctgccagccgctggctgtggtggacctcatcgtggacatcatgttcattgtggacatcctcatcaacttccgcaccacctacgtcaatgccaacgaggaggtggtcagccaccccggccgcatcgccgtccactacttcaagggctggttcctcatcgacatggtggccgccatccccttcgacctgctcatcttcggctctggctctgaggagctgatcgggctgctgaagactgcgcggctgctgcggctggtgcgcgtggcgcggaagctggatcgctactcagagtacggcgcggccgtgctgttcttgctcatgtgcacctttgcgctcatcgcgcactggctagcctgcatctggtacgccatcggcaacatggagcagccacacatggactcacgcatcggctggctgcacaacctgggcgaccagataggcaaaccctacaacagcagcggcctgggcggcccctccatcaaggacaagtatgtgacggcgctctacttcaccttcagcagcctcaccagtgtgggcttcggcaacgtctctcccaacaccaactcagagaagatcttctccatctgcgtcatgctcattggctccctcatgtatgctagcatcttcggcaacgtgtcggccatcatccagcggctgtactcgggcacagcccgctaccacacacagatgctgcgggtgcgggagttcatccgcttccaccagatccccaatcccctgcgccagcgcctcgaggagtacttccagcacgcctggtcctacaccaacggcatcgacatgaacgcggtgctgaagggcttccctgagtgcctgcaggctgacatctgcctgcacctgaaccgctcactgctgcagcactgcaaacccttccgaggggccaccaagggctgccttcgggccctggccatgaagttcaagaccacacatgcaccgccaggggacacactggtgcatgctggggacctgctcaccgccctgtacttcatctcccggggctccatcgagatcctgcggggcgacgtcgtcgtggccatcctggggaagaatgacatctttggggagcctctgaacctgtatgcaaggcctggcaagtcgaacggggatgtgcgggccctcatctactgtgacctacacaagatccatcgggacgacctgctggaggtgctggacatgtaccctgagttctccgaccacttctggtccagcctggagatcaccttcaacctgcgagataccaacatgatcccgggctcccccggcagtacggagttagagggtggcttcagtcggcaacgcaagcgcaagttgtccttccgcaggcgcacggacaaggacacggagcagccaggggaggtgtcggccttggggccgggccgggcgggggcagggccgagtagccggggccggccgggggggccgtggggggagagcccgtccagtggcccctccagccctgagagcagtgaggatgagggcccaggccgcagctccagccccctccgcctggtgcccttctccagccccaggccccccggagagccgccgggtggggagcccctgatggaggactgcgagaagagcagcgacacttgcaaccccctgtcaggcgccttctcaggagtgtccaacattttcagcttctggggggacagtcggggccgccagtaccaggagctccctcgatgccccgcccccacccccagcctcctcaacatccccctctccagcccgggtcggcggccccggggcgacgtggagagcaggctggatgccctccagcgccagctcaacaggctggagacccggctgagtgcagacatggccactgtcctgcagctgctacagaggcagatgacgctggtcccgcccgcctacagtgctgtgaccaccccggggcctggccccacttccacatccccgctgttgcccgtcagccccctccccaccctcaccttggactcgctttctcaggtttcccagttcatggcgtgtgaggagctgcccccgggggccccagagcttccccaagaaggccccacacgacgcctctccctaccgggccagctgggggccctcacctcccagcccctgcacagacacggctcggacccgggcagttagtggggctgcccagtgtggacacgtggctcacccagggatcaaggcgctgctgggccgctccccttggaggccctgctcaggaggccctgaccgtggaaggggagaggaactcgaaagcacagctcctcccccagcccttgggaccatcttctcctgcagtcccctgggccccagtgagaggggcaggggcagggccggcagtaggtggggcctgtggtccccccactgccctgagggcattagctggtctaactgcccggaggcacccggccctgggccttaggcacctcaaggacttttctgctatttactgctcttattgttaaggataataattaaggatcatatgaataattaatgaagatgctgatgactatgaataataaataattatcctgaggaga

SEQ ID NO: 537 - DNA, 3884 bp, Homo sapiens
  source 1..3884: mol_type = genomic DNA
  misc_feature 1..3884: note = cDNA of KCNH2 gene SNP c.247G>T (p.Ala83Ser)
atgccggtgcggaggggccacgtcgcgccgcagaacaccttcctggacaccatcatccgcaagtttgagggccagagccgtaagttcatcatcgccaacgctcgggtggagaactgcgccgtcatctactgcaacgacggcttctgcgagctgtgcggctactcgcgggccgaggtgatgcagcgaccctgcacctgcgacttcctgcacgggccgcgcacgcagcgccgcgctgccgcgcagatctcgcaggcactgctgggcgccgaggagcgcaaagtggaaatcgccttctaccggaaagatgggagctgcttcctatgtctggtggatgtggtgcccgtgaagaacgaggatggggctgtcatcatgttcatcctcaatttcgaggtggtgatggagaaggacatggtggggtccccggctcatgacaccaaccaccggggcccccccaccagctggctggccccaggccgcgccaagaccttccgcctgaagctgcccgcgctgctggcgctgacggcccgggagtcgtcggtgcggtcgggcggcgcgggcggcgcgggcgccccgggggccgtggtggtggacgtggacctgacgcccgcggcacccagcagcgagtcgctggccctggacgaagtgacagccatggacaaccacgtggcagggctcgggcccgcggaggagcggcgtgcgctggtgggtcccggctctccgccccgcagcgcgcccggccagctcccatcgccccgggcgcacagcctcaaccccgacgcctcgggctccagctgcagcctggcccggacgcgctcccgagaaagctgcgccagcgtgcgccgcgcctcgtcggccgacgacatcgaggccatgcgcgccggggtgctgcccccgccaccgcgccacgccagcaccggggccatgcacccactgcgcagcggcttgctcaactccacctcggactccgacctcgtgcgctaccgcaccattagcaagattccccaaatcaccctcaactttgtggacctcaagggcgaccccttcttggcttcgcccaccagtgaccgtgagatcatagcacctaagataaaggagcgaacccacaatgtcactgagaaggtcacccaggtcctgtccctgggcgccgacgtgctgcctgagtacaagctgcaggcaccgcgcatccaccgctggaccatcctgcattacagccccttcaaggccgtgtgggactggctcatcctgctgctggtcatctacacggctgtcttcacaccctactcggctgccttcctgctgaaggagacggaagaaggcccgcctgctaccgagtgtggctacgcctgccagccgctggctgtggtggacctcatcgtggacatcatgttcattgtggacatcctcatcaacttccgcaccacctacgtcaatgccaacgaggaggtggtcagccaccccggccgcatcgccgtccactacttcaagggctggttcctcatcgacatggtggccgccatccccttcgacctgctcatcttcggctctggctctgaggagctgatcgggctgctgaagactgcgcggctgctgcggctggtgcgcgtggcgcggaagctggatcgctactcagagtacggcgcggccgtgctgttcttgctcatgtgcacctttgcgctcatcgcgcactggctagcctgcatctggtacgccatcggcaacatggagcagccacacatggactcacgcatcggctggctgcacaacctgggcgaccagataggcaaaccctacaacagcagcggcctgggcggcccctccatcaaggacaagtatgtgacggcgctctacttcaccttcagcagcctcaccagtgtgggcttcggcaacgtctctcccaacaccaactcagagaagatcttctccatctgcgtcatgctcattggctccctcatgtatgctagcatcttcggcaacgtgtcggccatcatccagcggctgtactcgggcacagcccgctaccacacacagatgctgcgggtgcgggagttcatccgcttccaccagatccccaatcccctgcgccagcgcctcgaggagtacttccagcacgcctggtcctacaccaacggcatcgacatgaacgcggtgctgaagggcttccctgagtgcctgcaggctgacatctgcctgcacctgaaccgctcactgctgcagcactgcaaacccttccgaggggccaccaagggctgccttcgggccctggccatgaagttcaagaccacacatgcaccgccaggggacacactggtgcatgctggggacctgctcaccgccctgtacttcatctcccggggctccatcgagatcctgcggggcgacgtcgtcgtggccatcctggggaagaatgacatctttggggagcctctgaacctgtatgcaaggcctggcaagtcgaacggggatgtgcgggccctcacctactgtgacctacacaagatccatcgggacgacctgctggaggtgctggacatgtaccctgagttctccgaccacttctggtccagcctggagatcaccttcaacctgcgagataccaacatgatcccgggctcccccggcagtacggagttagagggtggcttcagtcggcaacgcaagcgcaagttgtccttccgcaggcgcacggacaaggacacggagcagccaggggaggtgtcggccttggggccgggccgggcgggggcagggccgagtagccggggccggccgggggggccgtggggggagagcccgtccagtggcccctccagccctgagagcagtgaggatgagggcccaggccgcagctccagccccctccgcctggtgcccttctccagccccaggccccccggagagccgccgggtggggagcccctgatggaggactgcgagaagagcagcgacacttgcaaccccctgtcaggcgccttctcaggagtgtccaacattttcagcttctggggggacagtcggggccgccagtaccaggagctccctcgatgccccgcccccacccccagcctcctcaacatccccctctccagcccgggtcggcggccccggggcgacgtggagagcaggctggatgccctccagcgccagctcaacaggctggagacccggctgagtgcagacatggccactgtcctgcagctgctacagaggcagatgacgctggtcccgcccgcctacagtgctgtgaccaccccggggcctggccccacttccacatccccgctgttgcccgtcagccccctccccaccctcaccttggactcgctttctcaggtttcccagttcatggcgtgtgaggagctgcccccgggggccccagagcttccccaagaaggccccacacgacgcctctccctaccgggccagctgggggccctcacctcccagcccctgcacagacacggctcggacccgggcagttagtggggctgcccagtgtggacacgtggctcacccagggatcaaggcgctgctgggccgctccccttggaggccctgctcaggaggccctgaccgtggaaggggagaggaactcgaaagcacagctcctcccccagcccttgggaccatcttctcctgcagtcccctgggccccagtgagaggggcaggggcagggccggcagtaggtggggcctgtggtccccccactgccctgagggcattagctggtctaactgcccggaggcacccggccctgggccttaggcacctcaaggacttttctgctatttactgctcttattgttaaggataataattaaggatcatatgaataattaatgaagatgctgatgactatgaataataaataattatcctgaggaga

SEQ ID NO: 538 - DNA, 3884 bp, Homo sapiens
  source 1..3884: mol_type = genomic DNA
  misc_feature 1..3884: note = cDNA of KCNH2 gene SNP c.2482T>C (p.Cys828Arg)
atgccggtgcggaggggccacgtcgcgccgcagaacaccttcctggacaccatcatccgcaagtttgagggccagagccgtaagttcatcatcgccaacgctcgggtggagaactgcgccgtcatctactgcaacgacggcttctgcgagctgtgcggctactcgcgggccgaggtgatgcagcgaccctgcacctgcgacttcctgcacgggccgcgcacgcagcgccgcgctgccgcgcagatcgcgcaggcactgctgggcgccgaggagcgcaaagtggaaatcgccttctaccggaaagatgggagctgcttcctatgtctggtggatgtggtgcccgtgaagaacgaggatggggctgtcatcatgttcatcctcaatttcgaggtggtgatggagaaggacatggtggggtccccggctcatgacaccaaccaccggggcccccccaccagctggctggccccaggccgcgccaagaccttccgcctgaagctgcccgcgctgctggcgctgacggcccgggagtcgtcggtgcggtcgggcggcgcgggcggcgcgggcgccccgggggccgtggtggtggacgtggacctgacgcccgcggcacccagcagcgagtcgctggccctggacgaagtgacagccatggacaaccacgtggcagggctcgggcccgcggaggagcggcgtgcgctggtgggtcccggctctccgccccgcagcgcgcccggccagctcccatcgccccgggcgcacagcctcaaccccgacgcctcgggctccagctgcagcctggcccggacgcgctcccgagaaagctgcgccagcgtgcgccgcgcctcgtcggccgacgacatcgaggccatgcgcgccggggtgctgcccccgccaccgcgccacgccagcaccggggccatgcacccactgcgcagcggcttgctcaactccacctcggactccgacctcgtgcgctaccgcaccattagcaagattccccaaatcaccctcaactttgtggacctcaagggcgaccccttcttggcttcgcccaccagtgaccgtgagatcatagcacctaagataaaggagcgaacccacaatgtcactgagaaggtcacccaggtcctgtccctgggcgccgacgtgctgcctgagtacaagctgcaggcaccgcgcatccaccgctggaccatcctgcattacagccccttcaaggccgtgtgggactggctcatcctgctgctggtcatctacacggctgtcttcacaccctactcggctgccttcctgctgaaggagacggaagaaggcccgcctgctaccgagtgtggctacgcctgccagccgctggctgtggtggacctcatcgtggacatcatgttcattgtggacatcctcatcaacttccgcaccacctacgtcaatgccaacgaggaggtggtcagccaccccggccgcatcgccgtccactacttcaagggctggttcctcatcgacatggtggccgccatccccttcgacctgctcatcttcggctctggctctgaggagctgatcgggctgctgaagactgcgcggctgctgcggctggtgcgcgtggcgcggaagctggatcgctactcagagtacggcgcggccgtgctgttcttgctcatgtgcacctttgcgctcatcgcgcactggctagcctgcatctggtacgccatcggcaacatggagcagccacacatggactcacgcatcggctggctgcacaacctgggcgaccagataggcaaaccctacaacagcagcggcctgggcggcccctccatcaaggacaagtatgtgacggcgctctacttcaccttcagcagcctcaccagtgtgggcttcggcaacgtctctcccaacaccaactcagagaagatcttctccatctgcgtcatgctcattggctccctcatgtatgctagcatcttcggcaacgtgtcggccatcatccagcggctgtactcgggcacagcccgctaccacacacagatgctgcgggtgcgggagttcatccgcttccaccagatccccaatcccctgcgccagcgcctcgaggagtacttccagcacgcctggtcctacaccaacggcatcgacatgaacgcggtgctgaagggcttccctgagtgcctgcaggctgacatctgcctgcacctgaaccgctcactgctgcagcactgcaaacccttccgaggggccaccaagggctgccttcgggccctggccatgaagttcaagaccacacatgcaccgccaggggacacactggtgcatgctggggacctgctcaccgccctgtacttcatctcccggggctccatcgagatcctgcggggcgacgtcgtcgtggccatcctggggaagaatgacatctttggggagcctctgaacctgtatgcaaggcctggcaagtcgaacggggatgtgcgggccctcacctaccgtgacctacacaagatccatcgggacgacctgctggaggtgctggacatgtaccctgagttctccgaccacttctggtccagcctggagatcaccttcaacctgcgagataccaacatgatcccgggctcccccggcagtacggagttagagggtggcttcagtcggcaacgcaagcgcaagttgtccttccgcaggcgcacggacaaggacacggagcagccaggggaggtgtcggccttggggccgggccgggcgggggcagggccgagtagccggggccggccgggggggccgtggggggagagcccgtccagtggcccctccagccctgagagcagtgaggatgagggcccaggccgcagctccagccccctccgcctggtgcccttctccagccccaggccccccggagagccgccgggtggggagcccctgatggaggactgcgagaagagcagcgacacttgcaaccccctgtcaggcgccttctcaggagtgtccaacattttcagcttctggggggacagtcggggccgccagtaccaggagctccctcgatgccccgcccccacccccagcctcctcaacatccccctctccagcccgggtcggcggccccggggcgacgtggagagcaggctggatgccctccagcgccagctcaacaggctggagacccggctgagtgcagacatggccactgtcctgcagctgctacagaggcagatgacgctggtcccgcccgcctacagtgctgtgaccaccccggggcctggccccacttccacatccccgctgttgcccgtcagccccctccccaccctcaccttggactcgctttctcaggtttcccagttcatggcgtgtgaggagctgcccccgggggccccagagcttccccaagaaggccccacacgacgcctctccctaccgggccagctgggggccctcacctcccagcccctgcacagacacggctcggacccgggcagttagtggggctgcccagtgtggacacgtggctcacccagggatcaaggcgctgctgggccgctccccttggaggccctgctcaggaggccctgaccgtggaaggggagaggaactcgaaagcacagctcctcccccagcccttgggaccatcttctcctgcagtcccctgggccccagtgagaggggcaggggcagggccggcagtaggtggggcctgtggtccccccactgccctgagggcattagctggtctaactgcccggaggcacccggccctgggccttaggcacctcaaggacttttctgctatttactgctcttattgttaaggataataattaaggatcatatgaataattaatgaagatgctgatgactatgaataataaataattatcctgaggaga

SEQ ID NO: 539 - DNA, 3884 bp, Homo sapiens
  source 1..3884: mol_type = genomic DNA
  misc_feature 1..3884: note = cDNA of KCNH2 gene SNP c.2486A>C (p.Asp829Ala)
atgccggtgcggaggggccacgtcgcgccgcagaacaccttcctggacaccatcatccgcaagtttgagggccagagccgtaagttcatcatcgccaacgctcgggtggagaactgcgccgtcatctactgcaacgacggcttctgcgagctgtgcggctactcgcgggccgaggtgatgcagcgaccctgcacctgcgacttcctgcacgggccgcgcacgcagcgccgcgctgccgcgcagatcgcgcaggcactgctgggcgccgaggagcgcaaagtggaaatcgccttctaccggaaagatgggagctgcttcctatgtctggtggatgtggtgcccgtgaagaacgaggatggggctgtcatcatgttcatcctcaatttcgaggtggtgatggagaaggacatggtggggtccccggctcatgacaccaaccaccggggcccccccaccagctggctggccccaggccgcgccaagaccttccgcctgaagctgcccgcgctgctggcgctgacggcccgggagtcgtcggtgcggtcgggcggcgcgggcggcgcgggcgccccgggggccgtggtggtggacgtggacctgacgcccgcggcacccagcagcgagtcgctggccctggacgaagtgacagccatggacaaccacgtggcagggctcgggcccgcggaggagcggcgtgcgctggtgggtcccggctctccgccccgcagcgcgcccggccagctcccatcgccccgggcgcacagcctcaaccccgacgcctcgggctccagctgcagcctggcccggacgcgctcccgagaaagctgcgccagcgtgcgccgcgcctcgtcggccgacgacatcgaggccatgcgcgccggggtgctgcccccgccaccgcgccacgccagcaccggggccatgcacccactgcgcagcggcttgctcaactccacctcggactccgacctcgtgcgctaccgcaccattagcaagattccccaaatcaccctcaactttgtggacctcaagggcgaccccttcttggcttcgcccaccagtgaccgtgagatcatagcacctaagataaaggagcgaacccacaatgtcactgagaaggtcacccaggtcctgtccctgggcgccgacgtgctgcctgagtacaagctgcaggcaccgcgcatccaccgctggaccatcctgcattacagccccttcaaggccgtgtgggactggctcatcctgctgctggtcatctacacggctgtcttcacaccctactcggctgccttcctgctgaaggagacggaagaaggcccgcctgctaccgagtgtggctacgcctgccagccgctggctgtggtggacctcatcgtggacatcatgttcattgtggacatcctcatcaacttccgcaccacctacgtcaatgccaacgaggaggtggtcagccaccccggccgcatcgccgtccactacttcaagggctggttcctcatcgacatggtggccgccatccccttcgacctgctcatcttcggctctggctctgaggagctgatcgggctgctgaagactgcgcggctgctgcggctggtgcgcgtggcgcggaagctggatcgctactcagagtacggcgcggccgtgctgttcttgctcatgtgcacctttgcgctcatcgcgcactggctagcctgcatctggtacgccatcggcaacatggagcagccacacatggactcacgcatcggctggctgcacaacctgggcgaccagataggcaaaccctacaacagcagcggcctgggcggcccctccatcaaggacaagtatgtgacggcgctctacttcaccttcagcagcctcaccagtgtgggcttcggcaacgtctctcccaacaccaactcagagaagatcttctccatctgcgtcatgctcattggctccctcatgtatgctagcatcttcggcaacgtgtcggccatcatccagcggctgtactcgggcacagcccgctaccacacacagatgctgcgggtgcgggagttcatccgcttccaccagatccccaatcccctgcgccagcgcctcgaggagtacttccagcacgcctggtcctacaccaacggcatcgacatgaacgcggtgctgaagggcttccctgagtgcctgcaggctgacatctgcctgcacctgaaccgctcactgctgcagcactgcaaacccttccgaggggccaccaagggctgccttcgggccctggccatgaagttcaagaccacacatgcaccgccaggggacacactggtgcatgctggggacctgctcaccgccctgtacttcatctcccggggctccatcgagatcctgcggggcgacgtcgtcgtggccatcctggggaagaatgacatctttggggagcctctgaacctgtatgcaaggcctggcaagtcgaacggggatgtgcgggccctcacctactgtgccctacacaagatccatcgggacgacctgctggaggtgctggacatgtaccctgagttctccgaccacttctggtccagcctggagatcaccttcaacctgcgagataccaacatgatcccgggctcccccggcagtacggagttagagggtggcttcagtcggcaacgcaagcgcaagttgtccttccgcaggcgcacggacaaggacacggagcagccaggggaggtgtcggccttggggccgggccgggcgggggcagggccgagtagccggggccggccgggggggccgtggggggagagcccgtccagtggcccctccagccctgagagcagtgaggatgagggcccaggccgcagctccagccccctccgcctggtgcccttctccagccccaggccccccggagagccgccgggtggggagcccctgatggaggactgcgagaagagcagcgacacttgcaaccccctgtcaggcgccttctcaggagtgtccaacattttcagcttctggggggacagtcggggccgccagtaccaggagctccctcgatgccccgcccccacccccagcctcctcaacatccccctctccagcccgggtcggcggccccggggcgacgtggagagcaggctggatgccctccagcgccagctcaacaggctggagacccggctgagtgcagacatggccactgtcctgcagctgctacagaggcagatgacgctggtcccgcccgcctacagtgctgtgaccaccccggggcctggccccacttccacatccccgctgttgcccgtcagccccctccccaccctcaccttggactcgctttctcaggtttcccagttcatggcgtgtgaggagctgcccccgggggccccagagcttccccaagaaggccccacacgacgcctctccctaccgggccagctgggggccctcacctcccagcccctgcacagacacggctcggacccgggcagttagtggggctgcccagtgtggacacgtggctcacccagggatcaaggcgctgctgggccgctccccttggaggccctgctcaggaggccctgaccgtggaaggggagaggaactcgaaagcacagctcctcccccagcccttgggaccatcttctcctgcagtcccctgggccccagtgagaggggcaggggcagggccggcagtaggtggggcctgtggtccccccactgccctgagggcattagctggtctaactgcccggaggcacccggccctgggccttaggcacctcaaggacttttctgctatttactgctcttattgttaaggataataattaaggatcatatgaataattaatgaagatgctgatgactatgaataataaataattatcctgaggaga

SEQ ID NO: 540 - DNA, 3884 bp, Homo sapiens
  source 1..3884: mol_type = genomic DNA
  misc_feature 1..3884: note = cDNA of KCNH2 gene SNP c.2494A>T (p.Lys832Ter)
atgccggtgcggaggggccacgtcgcgccgcagaacaccttcctggacaccatcatccgcaagtttgagggccagagccgtaagttcatcatcgccaacgctcgggtggagaactgcgccgtcatctactgcaacgacggcttctgcgagctgtgcggctactcgcgggccgaggtgatgcagcgaccctgcacctgcgacttcctgcacgggccgcgcacgcagcgccgcgctgccgcgcagatcgcgcaggcactgctgggcgccgaggagcgcaaagtggaaatcgccttctaccggaaagatgggagctgcttcctatgtctggtggatgtggtgcccgtgaagaacgaggatggggctgtcatcatgttcatcctcaatttcgaggtggtgatggagaaggacatggtggggtccccggctcatgacaccaaccaccggggcccccccaccagctggctggccccaggccgcgccaagaccttccgcctgaagctgcccgcgctgctggcgctgacggcccgggagtcgtcggtgcggtcgggcggcgcgggcggcgcgggcgccccgggggccgtggtggtggacgtggacctgacgcccgcggcacccagcagcgagtcgctggccctggacgaagtgacagccatggacaaccacgtggcagggctcgggcccgcggaggagcggcgtgcgctggtgggtcccggctctccgccccgcagcgcgcccggccagctcccatcgccccgggcgcacagcctcaaccccgacgcctcgggctccagctgcagcctggcccggacgcgctcccgagaaagctgcgccagcgtgcgccgcgcctcgtcggccgacgacatcgaggccatgcgcgccggggtgctgcccccgccaccgcgccacgccagcaccggggccatgcacccactgcgcagcggcttgctcaactccacctcggactccgacctcgtgcgctaccgcaccattagcaagattccccaaatcaccctcaactttgtggacctcaagggcgaccccttcttggcttcgcccaccagtgaccgtgagatcatagcacctaagataaaggagcgaacccacaatgtcactgagaaggtcacccaggtcctgtccctgggcgccgacgtgctgcctgagtacaagctgcaggcaccgcgcatccaccgctggaccatcctgcattacagccccttcaaggccgtgtgggactggctcatcctgctgctggtcatctacacggctgtcttcacaccctactcggctgccttcctgctgaaggagacggaagaaggcccgcctgctaccgagtgtggctacgcctgccagccgctggctgtggtggacctcatcgtggacatcatgttcattgtggacatcctcatcaacttccgcaccacctacgtcaatgccaacgaggaggtggtcagccaccccggccgcatcgccgtccactacttcaagggctggttcctcatcgacatggtggccgccatccccttcgacctgctcatcttcggctctggctctgaggagctgatcgggctgctgaagactgcgcggctgctgcggctggtgcgcgtggcgcggaagctggatcgctactcagagtacggcgcggccgtgctgttcttgctcatgtgcacctttgcgctcatcgcgcactggctagcctgcatctggtacgccatcggcaacatggagcagccacacatggactcacgcatcggctggctgcacaacctgggcgaccagataggcaaaccctacaacagcagcggcctgggcggcccctccatcaaggacaagtatgtgacggcgctctacttcaccttcagcagcctcaccagtgtgggcttcggcaacgtctctcccaacaccaactcagagaagatcttctccatctgcgtcatgctcattggctccctcatgtatgctagcatcttcggcaacgtgtcggccatcatccagcggctgtactcgggcacagcccgctaccacacacagatgctgcgggtgcgggagttcatccgcttccaccagatccccaatcccctgcgccagcgcctcgaggagtacttccagcacgcctggtcctacaccaacggcatcgacatgaacgcggtgctgaagggcttccctgagtgcctgcaggctgacatctgcctgcacctgaaccgctcactgctgcagcactgcaaacccttccgaggggccaccaagggctgccttcgggccctggccatgaagttcaagaccacacatgcaccgccaggggacacactggtgcatgctggggacctgctcaccgccctgtacttcatctcccggggctccatcgagatcctgcggggcgacgtcgtcgtggccatcctggggaagaatgacatctttggggagcctctgaacctgtatgcaaggcctggcaagtcgaacggggatgtgcgggccctcacctactgtgacctacactagatccatcgggacgacctgctggaggtgctggacatgtaccctgagttctccgaccacttctggtccagcctggagatcaccttcaacctgcgagataccaacatgatcccgggctcccccggcagtacggagttagagggtggcttcagtcggcaacgcaagcgcaagttgtccttccgcaggcgcacggacaaggacacggagcagccaggggaggtgtcggccttggggccgggccgggcgggggcagggccgagtagccggggccggccgggggggccgtggggggagagcccgtccagtggcccctccagccctgagagcagtgaggatgagggcccaggccgcagctccagccccctccgcctggtgcccttctccagccccaggccccccggagagccgccgggtggggagcccctgatggaggactgcgagaagagcagcgacacttgcaaccccctgtcaggcgccttctcaggagtgtccaacattttcagcttctggggggacagtcggggccgccagtaccaggagctccctcgatgccccgcccccacccccagcctcctcaacatccccctctccagcccgggtcggcggccccggggcgacgtggagagcaggctggatgccctccagcgccagctcaacaggctggagacccggctgagtgcagacatggccactgtcctgcagctgctacagaggcagatgacgctggtcccgcccgcctacagtgctgtgaccaccccggggcctggccccacttccacatccccgctgttgcccgtcagccccctccccaccctcaccttggactcgctttctcaggtttcccagttcatggcgtgtgaggagctgcccccgggggccccagagcttccccaagaaggccccacacgacgcctctccctaccgggccagctgggggccctcacctcccagcccctgcacagacacggctcggacccgggcagttagtggggctgcccagtgtggacacgtggctcacccagggatcaaggcgctgctgggccgctccccttggaggccctgctcaggaggccctgaccgtggaaggggagaggaactcgaaagcacagctcctcccccagcccttgggaccatcttctcctgcagtcccctgggccccagtgagaggggcaggggcagggccggcagtaggtggggcctgtggtccccccactgccctgagggcattagctggtctaactgcccggaggcacccggccctgggccttaggcacctcaaggacttttctgctatttactgctcttattgttaaggataataattaaggatcatatgaataattaatgaagatgctgatgactatgaataataaataattatcctgaggaga

SEQ ID NO: 541 - DNA, 3884 bp, Homo sapiens
  source 1..3884: mol_type = genomic DNA
  misc_feature 1..3884: note = cDNA of KCNH2 gene SNP c.2503C>T (p.Arg835Trp)
atgccggtgcggaggggccacgtcgcgccgcagaacaccttcctggacaccatcatccgcaagtttgagggccagagccgtaagttcatcatcgccaacgctcgggtggagaactgcgccgtcatctactgcaacgacggcttctgcgagctgtgcggctactcgcgggccgaggtgatgcagcgaccctgcacctgcgacttcctgcacgggccgcgcacgcagcgccgcgctgccgcgcagatcgcgcaggcactgctgggcgccgaggagcgcaaagtggaaatcgccttctaccggaaagatgggagctgcttcctatgtctggtggatgtggtgcccgtgaagaacgaggatggggctgtcatcatgttcatcctcaatttcgaggtggtgatggagaaggacatggtggggtccccggctcatgacaccaaccaccggggcccccccaccagctggctggccccaggccgcgccaagaccttccgcctgaagctgcccgcgctgctggcgctgacggcccgggagtcgtcggtgcggtcgggcggcgcgggcggcgcgggcgccccgggggccgtggtggtggacgtggacctgacgcccgcggcacccagcagcgagtcgctggccctggacgaagtgacagccatggacaaccacgtggcagggctcgggcccgcggaggagcggcgtgcgctggtgggtcccggctctccgccccgcagcgcgcccggccagctcccatcgccccgggcgcacagcctcaaccccgacgcctcgggctccagctgcagcctggcccggacgcgctcccgagaaagctgcgccagcgtgcgccgcgcctcgtcggccgacgacatcgaggccatgcgcgccggggtgctgcccccgccaccgcgccacgccagcaccggggccatgcacccactgcgcagcggcttgctcaactccacctcggactccgacctcgtgcgctaccgcaccattagcaagattccccaaatcaccctcaactttgtggacctcaagggcgaccccttcttggcttcgcccaccagtgaccgtgagatcatagcacctaagataaaggagcgaacccacaatgtcactgagaaggtcacccaggtcctgtccctgggcgccgacgtgctgcctgagtacaagctgcaggcaccgcgcatccaccgctggaccatcctgcattacagccccttcaaggccgtgtgggactggctcatcctgctgctggtcatctacacggctgtcttcacaccctactcggctgccttcctgctgaaggagacggaagaaggcccgcctgctaccgagtgtggctacgcctgccagccgctggctgtggtggacctcatcgtggacatcatgttcattgtggacatcctcatcaacttccgcaccacctacgtcaatgccaacgaggaggtggtcagccaccccggccgcatcgccgtccactacttcaagggctggttcctcatcgacatggtggccgccatccccttcgacctgctcatcttcggctctggctctgaggagctgatcgggctgctgaagactgcgcggctgctgcggctggtgcgcgtggcgcggaagctggatcgctactcagagtacggcgcggccgtgctgttcttgctcatgtgcacctttgcgctcatcgcgcactggctagcctgcatctggtacgccatcggcaacatggagcagccacacatggactcacgcatcggctggctgcacaacctgggcgaccagataggcaaaccctacaacagcagcggcctgggcggcccctccatcaaggacaagtatgtgacggcgctctacttcaccttcagcagcctcaccagtgtgggcttcggcaacgtctctcccaacaccaactcagagaagatcttctccatctgcgtcatgctcattggctccctcatgtatgctagcatcttcggcaacgtgtcggccatcatccagcggctgtactcgggcacagcccgctaccacacacagatgctgcgggtgcgggagttcatccgcttccaccagatccccaatcccctgcgccagcgcctcgaggagtacttccagcacgcctggtcctacaccaacggcatcgacatgaacgcggtgctgaagggcttccctgagtgcctgcaggctgacatctgcctgcacctgaaccgctcactgctgcagcactgcaaacccttccgaggggccaccaagggctgccttcgggccctggccatgaagttcaagaccacacatgcaccgccaggggacacactggtgcatgctggggacctgctcaccgccctgtacttcatctcccggggctccatcgagatcctgcggggcgacgtcgtcgtggccatcctggggaagaatgacatctttggggagcctctgaacctgtatgcaaggcctggcaagtcgaacggggatgtgcgggccctcacctactgtgacctacacaagatccattgggacgacctgctggaggtgctggacatgtaccctgagttctccgaccacttctggtccagcctggagatcaccttcaacctgcgagataccaacatgatcccgggctcccccggcagtacggagttagagggtggcttcagtcggcaacgcaagcgcaagttgtccttccgcaggcgcacggacaaggacacggagcagccaggggaggtgtcggccttggggccgggccgggcgggggcagggccgagtagccggggccggccgggggggccgtggggggagagcccgtccagtggcccctccagccctgagagcagtgaggatgagggcccaggccgcagctccagccccctccgcctggtgcccttctccagccccaggccccccggagagccgccgggtggggagcccctgatggaggactgcgagaagagcagcgacacttgcaaccccctgtcaggcgccttctcaggagtgtccaacattttcagcttctggggggacagtcggggccgccagtaccaggagctccctcgatgccccgcccccacccccagcctcctcaacatccccctctccagcccgggtcggcggccccggggcgacgtggagagcaggctggatgccctccagcgccagctcaacaggctggagacccggctgagtgcagacatggccactgtcctgcagctgctacagaggcagatgacgctggtcccgcccgcctacagtgctgtgaccaccccggggcctggccccacttccacatccccgctgttgcccgtcagccccctccccaccctcaccttggactcgctttctcaggtttcccagttcatggcgtgtgaggagctgcccccgggggccccagagcttccccaagaaggccccacacgacgcctctccctaccgggccagctgggggccctcacctcccagcccctgcacagacacggctcggacccgggcagttagtggggctgcccagtgtggacacgtggctcacccagggatcaaggcgctgctgggccgctccccttggaggccctgctcaggaggccctgaccgtggaaggggagaggaactcgaaagcacagctcctcccccagcccttgggaccatcttctcctgcagtcccctgggccccagtgagaggggcaggggcagggccggcagtaggtggggcctgtggtccccccactgccctgagggcattagctggtctaactgcccggaggcacccggccctgggccttaggcacctcaaggacttttctgctatttactgctcttattgttaaggataataattaaggatcatatgaataattaatgaagatgctgatgactatgaataataaataattatcctgaggaga

SEQ ID NO: 542 - DNA, 3884 bp, Homo sapiens
  source 1..3884: mol_type = genomic DNA
  misc_feature 1..3884: note = cDNA of KCNH2 gene SNP c.2504G>A (p.Arg835Gln)
atgccggtgcggaggggccacgtcgcgccgcagaacaccttcctggacaccatcatccgcaagtttgagggccagagccgtaagttcatcatcgccaacgctcgggtggagaactgcgccgtcatctactgcaacgacggcttctgcgagctgtgcggctactcgcgggccgaggtgatgcagcgaccctgcacctgcgacttcctgcacgggccgcgcacgcagcgccgcgctgccgcgcagatcgcgcaggcactgctgggcgccgaggagcgcaaagtggaaatcgccttctaccggaaagatgggagctgcttcctatgtctggtggatgtggtgcccgtgaagaacgaggatggggctgtcatcatgttcatcctcaatttcgaggtggtgatggagaaggacatggtggggtccccggctcatgacaccaaccaccggggcccccccaccagctggctggccccaggccgcgccaagaccttccgcctgaagctgcccgcgctgctggcgctgacggcccgggagtcgtcggtgcggtcgggcggcgcgggcggcgcgggcgccccgggggccgtggtggtggacgtggacctgacgcccgcggcacccagcagcgagtcgctggccctggacgaagtgacagccatggacaaccacgtggcagggctcgggcccgcggaggagcggcgtgcgctggtgggtcccggctctccgccccgcagcgcgcccggccagctcccatcgccccgggcgcacagcctcaaccccgacgcctcgggctccagctgcagcctggcccggacgcgctcccgagaaagctgcgccagcgtgcgccgcgcctcgtcggccgacgacatcgaggccatgcgcgccggggtgctgcccccgccaccgcgccacgccagcaccggggccatgcacccactgcgcagcggcttgctcaactccacctcggactccgacctcgtgcgctaccgcaccattagcaagattccccaaatcaccctcaactttgtggacctcaagggcgaccccttcttggcttcgcccaccagtgaccgtgagatcatagcacctaagataaaggagcgaacccacaatgtcactgagaaggtcacccaggtcctgtccctgggcgccgacgtgctgcctgagtacaagctgcaggcaccgcgcatccaccgctggaccatcctgcattacagccccttcaaggccgtgtgggactggctcatcctgctgctggtcatctacacggctgtcttcacaccctactcggctgccttcctgctgaaggagacggaagaaggcccgcctgctaccgagtgtggctacgcctgccagccgctggctgtggtggacctcatcgtggacatcatgttcattgtggacatcctcatcaacttccgcaccacctacgtcaatgccaacgaggaggtggtcagccaccccggccgcatcgccgtccactacttcaagggctggttcctcatcgacatggtggccgccatccccttcgacctgctcatcttcggctctggctctgaggagctgatcgggctgctgaagactgcgcggctgctgcggctggtgcgcgtggcgcggaagctggatcgctactcagagtacggcgcggccgtgctgttcttgctcatgtgcacctttgcgctcatcgcgcactggctagcctgcatctggtacgccatcggcaacatggagcagccacacatggactcacgcatcggctggctgcacaacctgggcgaccagataggcaaaccctacaacagcagcggcctgggcggcccctccatcaaggacaagtatgtgacggcgctctacttcaccttcagcagcctcaccagtgtgggcttcggcaacgtctctcccaacaccaactcagagaagatcttctccatctgcgtcatgctcattggctccctcatgtatgctagcatcttcggcaacgtgtcggccatcatccagcggctgtactcgggcacagcccgctaccacacacagatgctgcgggtgcgggagttcatccgcttccaccagatccccaatcccctgcgccagcgcctcgaggagtacttccagcacgcctggtcctacaccaacggcatcgacatgaacgcggtgctgaagggcttccctgagtgcctgcaggctgacatctgcctgcacctgaaccgctcactgctgcagcactgcaaacccttccgaggggccaccaagggctgccttcgggccctggccatgaagttcaagaccacacatgcaccgccaggggacacactggtgcatgctggggacctgctcaccgccctgtacttcatctcccggggctccatcgagatcctgcggggcgacgtcgtcgtggccatcctggggaagaatgacatctttggggagcctctgaacctgtatgcaaggcctggcaagtcgaacggggatgtgcgggccctcacctactgtgacctacacaagatccatcaggacgacctgctggaggtgctggacatgtaccctgagttctccgaccacttctggtccagcctggagatcaccttcaacctgcgagataccaacatgatcccgggctcccccggcagtacggagttagagggtggcttcagtcggcaacgcaagcgcaagttgtccttccgcaggcgcacggacaaggacacggagcagccaggggaggtgtcggccttggggccgggccgggcgggggcagggccgagtagccggggccggccgggggggccgtggggggagagcccgtccagtggcccctccagccctgagagcagtgaggatgagggcccaggccgcagctccagccccctccgcctggtgcccttctccagccccaggccccccggagagccgccgggtggggagcccctgatggaggactgcgagaagagcagcgacacttgcaaccccctgtcaggcgccttctcaggagtgtccaacattttcagcttctggggggacagtcggggccgccagtaccaggagctccctcgatgccccgcccccacccccagcctcctcaacatccccctctccagcccgggtcggcggccccggggcgacgtggagagcaggctggatgccctccagcgccagctcaacaggctggagacccggctgagtgcagacatggccactgtcctgcagctgctacagaggcagatgacgctggtcccgcccgcctacagtgctgtgaccaccccggggcctggccccacttccacatccccgctgttgcccgtcagccccctccccaccctcaccttggactcgctttctcaggtttcccagttcatggcgtgtgaggagctgcccccgggggccccagagcttccccaagaaggccccacacgacgcctctccctaccgggccagctgggggccctcacctcccagcccctgcacagacacggctcggacccgggcagttagtggggctgcccagtgtggacacgtggctcacccagggatcaaggcgctgctgggccgctccccttggaggccctgctcaggaggccctgaccgtggaaggggagaggaactcgaaagcacagctcctcccccagcccttgggaccatcttctcctgcagtcccctgggccccagtgagaggggcaggggcagggccggcagtaggtggggcctgtggtccccccactgccctgagggcattagctggtctaactgcccggaggcacccggccctgggccttaggcacctcaaggacttttctgctatttactgctcttattgttaaggataataattaaggatcatatgaataattaatgaagatgctgatgactatgaataataaataattatcctgaggaga

SEQ ID NO: 543 - DNA, 3884 bp, Homo sapiens
  source 1..3884: mol_type = genomic DNA
  misc_feature 1..3884: note = cDNA of KCNH2 gene SNP c.2509G>A (p.Asp837Asn)
atgccggtgcggaggggccacgtcgcgccgcagaacaccttcctggacaccatcatccgcaagtttgagggccagagccgtaagttcatcatcgccaacgctcgggtggagaactgcgccgtcatctactgcaacgacggcttctgcgagctgtgcggctactcgcgggccgaggtgatgcagcgaccctgcacctgcgacttcctgcacgggccgcgcacgcagcgccgcgctgccgcgcagatcgcgcaggcactgctgggcgccgaggagcgcaaagtggaaatcgccttctaccggaaagatgggagctgcttcctatgtctggtggatgtggtgcccgtgaagaacgaggatggggctgtcatcatgttcatcctcaatttcgaggtggtgatggagaaggacatggtggggtccccggctcatgacaccaaccaccggggcccccccaccagctggctggccccaggccgcgccaagaccttccgcctgaagctgcccgcgctgctggcgctgacggcccgggagtcgtcggtgcggtcgggcggcgcgggcggcgcgggcgccccgggggccgtggtggtggacgtggacctgacgcccgcggcacccagcagcgagtcgctggccctggacgaagtgacagccatggacaaccacgtggcagggctcgggcccgcggaggagcggcgtgcgctggtgggtcccggctctccgccccgcagcgcgcccggccagctcccatcgccccgggcgcacagcctcaaccccgacgcctcgggctccagctgcagcctggcccggacgcgctcccgagaaagctgcgccagcgtgcgccgcgcctcgtcggccgacgacatcgaggccatgcgcgccggggtgctgcccccgccaccgcgccacgccagcaccggggccatgcacccactgcgcagcggcttgctcaactccacctcggactccgacctcgtgcgctaccgcaccattagcaagattccccaaatcaccctcaactttgtggacctcaagggcgaccccttcttggcttcgcccaccagtgaccgtgagatcatagcacctaagataaaggagcgaacccacaatgtcactgagaaggtcacccaggtcctgtccctgggcgccgacgtgctgcctgagtacaagctgcaggcaccgcgcatccaccgctggaccatcctgcattacagccccttcaaggccgtgtgggactggctcatcctgctgctggtcatctacacggctgtcttcacaccctactcggctgccttcctgctgaaggagacggaagaaggcccgcctgctaccgagtgtggctacgcctgccagccgctggctgtggtggacctcatcgtggacatcatgttcattgtggacatcctcatcaacttccgcaccacctacgtcaatgccaacgaggaggtggtcagccaccccggccgcatcgccgtccactacttcaagggctggttcctcatcgacatggtggccgccatccccttcgacctgctcatcttcggctctggctctgaggagctgatcgggctgctgaagactgcgcggctgctgcggctggtgcgcgtggcgcggaagctggatcgctactcagagtacggcgcggccgtgctgttcttgctcatgtgcacctttgcgctcatcgcgcactggctagcctgcatctggtacgccatcggcaacatggagcagccacacatggactcacgcatcggctggctgcacaacctgggcgaccagataggcaaaccctacaacagcagcggcctgggcggcccctccatcaaggacaagtatgtgacggcgctctacttcaccttcagcagcctcaccagtgtgggcttcggcaacgtctctcccaacaccaactcagagaagatcttctccatctgcgtcatgctcattggctccctcatgtatgctagcatcttcggcaacgtgtcggccatcatccagcggctgtactcgggcacagcccgctaccacacacagatgctgcgggtgcgggagttcatccgcttccaccagatccccaatcccctgcgccagcgcctcgaggagtacttccagcacgcctggtcctacaccaacggcatcgacatgaacgcggtgctgaagggcttccctgagtgcctgcaggctgacatctgcctgcacctgaaccgctcactgctgcagcactgcaaacccttccgaggggccaccaagggctgccttcgggccctggccatgaagttcaagaccacacatgcaccgccaggggacacactggtgcatgctggggacctgctcaccgccctgtacttcatctcccggggctccatcgagatcctgcggggcgacgtcgtcgtggccatcctggggaagaatgacatctttggggagcctctgaacctgtatgcaaggcctggcaagtcgaacggggatgtgcgggccctcacctactgtgacctacacaagatccatcgggacaacctgctggaggtgctggacatgtaccctgagttctccgaccacttctggtccagcctggagatcaccttcaacctgcgagataccaacatgatcccgggctcccccggcagtacggagttagagggtggcttcagtcggcaacgcaagcgcaagttgtccttccgcaggcgcacggacaaggacacggagcagccaggggaggtgtcggccttggggccgggccgggcgggggcagggccgagtagccggggccggccgggggggccgtggggggagagcccgtccagtggcccctccagccctgagagcagtgaggatgagggcccaggccgcagctccagccccctccgcctggtgcccttctccagccccaggccccccggagagccgccgggtggggagcccctgatggaggactgcgagaagagcagcgacacttgcaaccccctgtcaggcgccttctcaggagtgtccaacattttcagcttctggggggacagtcggggccgccagtaccaggagctccctcgatgccccgcccccacccccagcctcctcaacatccccctctccagcccgggtcggcggccccggggcgacgtggagagcaggctggatgccctccagcgccagctcaacaggctggagacccggctgagtgcagacatggccactgtcctgcagctgctacagaggcagatgacgctggtcccgcccgcctacagtgctgtgaccaccccggggcctggccccacttccacatccccgctgttgcccgtcagccccctccccaccctcaccttggactcgctttctcaggtttcccagttcatggcgtgtgaggagctgcccccgggggccccagagcttccccaagaaggccccacacgacgcctctccctaccgggccagctgggggccctcacctcccagcccctgcacagacacggctcggacccgggcagttagtggggctgcccagtgtggacacgtggctcacccagggatcaaggcgctgctgggccgctccccttggaggccctgctcaggaggccctgaccgtggaaggggagaggaactcgaaagcacagctcctcccccagcccttgggaccatcttctcctgcagtcccctgggccccagtgagaggggcaggggcagggccggcagtaggtggggcctgtggtccccccactgccctgagggcattagctggtctaactgcccggaggcacccggccctgggccttaggcacctcaaggacttttctgctatttactgctcttattgttaaggataataattaaggatcatatgaataattaatgaagatgctgatgactatgaataataaataattatcctgaggaga

SEQ ID NO: 544 - DNA, 3884 bp, Homo sapiens
  source 1..3884: mol_type = genomic DNA
  misc_feature 1..3884: note = cDNA of KCNH2 gene SNP c.2509G>T (p.Asp837Tyr)
atgccggtgcggaggggccacgtcgcgccgcagaacaccttcctggacaccatcatccgcaagtttgagggccagagccgtaagttcatcatcgccaacgctcgggtggagaactgcgccgtcatctactgcaacgacggcttctgcgagctgtgcggctactcgcgggccgaggtgatgcagcgaccctgcacctgcgacttcctgcacgggccgcgcacgcagcgccgcgctgccgcgcagatcgcgcaggcactgctgggcgccgaggagcgcaaagtggaaatcgccttctaccggaaagatgggagctgcttcctatgtctggtggatgtggtgcccgtgaagaacgaggatggggctgtcatcatgttcatcctcaatttcgaggtggtgatggagaaggacatggtggggtccccggctcatgacaccaaccaccggggcccccccaccagctggctggccccaggccgcgccaagaccttccgcctgaagctgcccgcgctgctggcgctgacggcccgggagtcgtcggtgcggtcgggcggcgcgggcggcgcgggcgccccgggggccgtggtggtggacgtggacctgacgcccgcggcacccagcagcgagtcgctggccctggacgaagtgacagccatggacaaccacgtggcagggctcgggcccgcggaggagcggcgtgcgctggtgggtcccggctctccgccccgcagcgcgcccggccagctcccatcgccccgggcgcacagcctcaaccccgacgcctcgggctccagctgcagcctggcccggacgcgctcccgagaaagctgcgccagcgtgcgccgcgcctcgtcggccgacgacatcgaggccatgcgcgccggggtgctgcccccgccaccgcgccacgccagcaccggggccatgcacccactgcgcagcggcttgctcaactccacctcggactccgacctcgtgcgctaccgcaccattagcaagattccccaaatcaccctcaactttgtggacctcaagggcgaccccttcttggcttcgcccaccagtgaccgtgagatcatagcacctaagataaaggagcgaacccacaatgtcactgagaaggtcacccaggtcctgtccctgggcgccgacgtgctgcctgagtacaagctgcaggcaccgcgcatccaccgctggaccatcctgcattacagccccttcaaggccgtgtgggactggctcatcctgctgctggtcatctacacggctgtcttcacaccctactcggctgccttcctgctgaaggagacggaagaaggcccgcctgctaccgagtgtggctacgcctgccagccgctggctgtggtggacctcatcgtggacatcatgttcattgtggacatcctcatcaacttccgcaccacctacgtcaatgccaacgaggaggtggtcagccaccccggccgcatcgccgtccactacttcaagggctggttcctcatcgacatggtggccgccatccccttcgacctgctcatcttcggctctggctctgaggagctgatcgggctgctgaagactgcgcggctgctgcggctggtgcgcgtggcgcggaagctggatcgctactcagagtacggcgcggccgtgctgttcttgctcatgtgcacctttgcgctcatcgcgcactggctagcctgcatctggtacgccatcggcaacatggagcagccacacatggactcacgcatcggctggctgcacaacctgggcgaccagataggcaaaccctacaacagcagcggcctgggcggcccctccatcaaggacaagtatgtgacggcgctctacttcaccttcagcagcctcaccagtgtgggcttcggcaacgtctctcccaacaccaactcagagaagatcttctccatctgcgtcatgctcattggctccctcatgtatgctagcatcttcggcaacgtgtcggccatcatccagcggctgtactcgggcacagcccgctaccacacacagatgctgcgggtgcgggagttcatccgcttccaccagatccccaatcccctgcgccagcgcctcgaggagtacttccagcacgcctggtcctacaccaacggcatcgacatgaacgcggtgctgaagggcttccctgagtgcctgcaggctgacatctgcctgcacctgaaccgctcactgctgcagcactgcaaacccttccgaggggccaccaagggctgccttcgggccctggccatgaagttcaagaccacacatgcaccgccaggggacacactggtgcatgctggggacctgctcaccgccctgtacttcatctcccggggctccatcgagatcctgcggggcgacgtcgtcgtggccatcctggggaagaatgacatctttggggagcctctgaacctgtatgcaaggcctggcaagtcgaacggggatgtgcgggccctcacctactgtgacctacacaagatccatcgggactacctgctggaggtgctggacatgtaccctgagttctccgaccacttctggtccagcctggagatcaccttcaacctgcgagataccaacatgatcccgggctcccccggcagtacggagttagagggtggcttcagtcggcaacgcaagcgcaagttgtccttccgcaggcgcacggacaaggacacggagcagccaggggaggtgtcggccttggggccgggccgggcgggggcagggccgagtagccggggccggccgggggggccgtggggggagagcccgtccagtggcccctccagccctgagagcagtgaggatgagggcccaggccgcagctccagccccctccgcctggtgcccttctccagccccaggccccccggagagccgccgggtggggagcccctgatggaggactgcgagaagagcagcgacacttgcaaccccctgtcaggcgccttctcaggagtgtccaacattttcagcttctggggggacagtcggggccgccagtaccaggagctccctcgatgccccgcccccacccccagcctcctcaacatccccctctccagcccgggtcggcggccccggggcgacgtggagagcaggctggatgccctccagcgccagctcaacaggctggagacccggctgagtgcagacatggccactgtcctgcagctgctacagaggcagatgacgctggtcccgcccgcctacagtgctgtgaccaccccggggcctggccccacttccacatccccgctgttgcccgtcagccccctccccaccctcaccttggactcgctttctcaggtttcccagttcatggcgtgtgaggagctgcccccgggggccccagagcttccccaagaaggccccacacgacgcctctccctaccgggccagctgggggccctcacctcccagcccctgcacagacacggctcggacccgggcagttagtggggctgcccagtgtggacacgtggctcacccagggatcaaggcgctgctgggccgctccccttggaggccctgctcaggaggccctgaccgtggaaggggagaggaactcgaaagcacagctcctcccccagcccttgggaccatcttctcctgcagtcccctgggccccagtgagaggggcaggggcagggccggcagtaggtggggcctgtggtccccccactgccctgagggcattagctggtctaactgcccggaggcacccggccctgggccttaggcacctcaaggacttttctgctatttactgctcttattgttaaggataataattaaggatcatatgaataattaatgaagatgctgatgactatgaataataaataattatcctgaggaga

SEQ ID NO: 545 - DNA, 3884 bp, Homo sapiens
  source 1..3884: mol_type = genomic DNA
  misc_feature 1..3884: note = cDNA of KCNH2 gene SNP c.2510A>G (p.Asp837Gly)
atgccggtgcggaggggccacgtcgcgccgcagaacaccttcctggacaccatcatccgcaagtttgagggccagagccgtaagttcatcatcgccaacgctcgggtggagaactgcgccgtcatctactgcaacgacggcttctgcgagctgtgcggctactcgcgggccgaggtgatgcagcgaccctgcacctgcgacttcctgcacgggccgcgcacgcagcgccgcgctgccgcgcagatcgcgcaggcactgctgggcgccgaggagcgcaaagtggaaatcgccttctaccggaaagatgggagctgcttcctatgtctggtggatgtggtgcccgtgaagaacgaggatggggctgtcatcatgttcatcctcaatttcgaggtggtgatggagaaggacatggtggggtccccggctcatgacaccaaccaccggggcccccccaccagctggctggccccaggccgcgccaagaccttccgcctgaagctgcccgcgctgctggcgctgacggcccgggagtcgtcggtgcggtcgggcggcgcgggcggcgcgggcgccccgggggccgtggtggtggacgtggacctgacgcccgcggcacccagcagcgagtcgctggccctggacgaagtgacagccatggacaaccacgtggcagggctcgggcccgcggaggagcggcgtgcgctggtgggtcccggctctccgccccgcagcgcgcccggccagctcccatcgccccgggcgcacagcctcaaccccgacgcctcgggctccagctgcagcctggcccggacgcgctcccgagaaagctgcgccagcgtgcgccgcgcctcgtcggccgacgacatcgaggccatgcgcgccggggtgctgcccccgccaccgcgccacgccagcaccggggccatgcacccactgcgcagcggcttgctcaactccacctcggactccgacctcgtgcgctaccgcaccattagcaagattccccaaatcaccctcaactttgtggacctcaagggcgaccccttcttggcttcgcccaccagtgaccgtgagatcatagcacctaagataaaggagcgaacccacaatgtcactgagaaggtcacccaggtcctgtccctgggcgccgacgtgctgcctgagtacaagctgcaggcaccgcgcatccaccgctggaccatcctgcattacagccccttcaaggccgtgtgggactggctcatcctgctgctggtcatctacacggctgtcttcacaccctactcggctgccttcctgctgaaggagacggaagaaggcccgcctgctaccgagtgtggctacgcctgccagccgctggctgtggtggacctcatcgtggacatcatgttcattgtggacatcctcatcaacttccgcaccacctacgtcaatgccaacgaggaggtggtcagccaccccggccgcatcgccgtccactacttcaagggctggttcctcatcgacatggtggccgccatccccttcgacctgctcatcttcggctctggctctgaggagctgatcgggctgctgaagactgcgcggctgctgcggctggtgcgcgtggcgcggaagctggatcgctactcagagtacggcgcggccgtgctgttcttgctcatgtgcacctttgcgctcatcgcgcactggctagcctgcatctggtacgccatcggcaacatggagcagccacacatggactcacgcatcggctggctgcacaacctgggcgaccagataggcaaaccctacaacagcagcggcctgggcggcccctccatcaaggacaagtatgtgacggcgctctacttcaccttcagcagcctcaccagtgtgggcttcggcaacgtctctcccaacaccaactcagagaagatcttctccatctgcgtcatgctcattggctccctcatgtatgctagcatcttcggcaacgtgtcggccatcatccagcggctgtactcgggcacagcccgctaccacacacagatgctgcgggtgcgggagttcatccgcttccaccagatccccaatcccctgcgccagcgcctcgaggagtacttccagcacgcctggtcctacaccaacggcatcgacatgaacgcggtgctgaagggcttccctgagtgcctgcaggctgacatctgcctgcacctgaaccgctcactgctgcagcactgcaaacccttccgaggggccaccaagggctgccttcgggccctggccatgaagttcaagaccacacatgcaccgccaggggacacactggtgcatgctggggacctgctcaccgccctgtacttcatctcccggggctccatcgagatcctgcggggcgacgtcgtcgtggccatcctggggaagaatgacatctttggggagcctctgaacctgtatgcaaggcctggcaagtcgaacggggatgtgcgggccctcacctactgtgacctacacaagatccatcgggacggcctgctggaggtgctggacatgtaccctgagttctccgaccacttctggtccagcctggagatcaccttcaacctgcgagataccaacatgatcccgggctcccccggcagtacggagttagagggtggcttcagtcggcaacgcaagcgcaagttgtccttccgcaggcgcacggacaaggacacggagcagccaggggaggtgtcggccttggggccgggccgggcgggggcagggccgagtagccggggccggccgggggggccgtggggggagagcccgtccagtggcccctccagccctgagagcagtgaggatgagggcccaggccgcagctccagccccctccgcctggtgcccttctccagccccaggccccccggagagccgccgggtggggagcccctgatggaggactgcgagaagagcagcgacacttgcaaccccctgtcaggcgccttctcaggagtgtccaacattttcagcttctggggggacagtcggggccgccagtaccaggagctccctcgatgccccgcccccacccccagcctcctcaacatccccctctccagcccgggtcggcggccccggggcgacgtggagagcaggctggatgccctccagcgccagctcaacaggctggagacccggctgagtgcagacatggccactgtcctgcagctgctacagaggcagatgacgctggtcccgcccgcctacagtgctgtgaccaccccggggcctggccccacttccacatccccgctgttgcccgtcagccccctccccaccctcaccttggactcgctttctcaggtttcccagttcatggcgtgtgaggagctgcccccgggggccccagagcttccccaagaaggccccacacgacgcctctccctaccgggccagctgggggccctcacctcccagcccctgcacagacacggctcggacccgggcagttagtggggctgcccagtgtggacacgtggctcacccagggatcaaggcgctgctgggccgctccccttggaggccctgctcaggaggccctgaccgtggaaggggagaggaactcgaaagcacagctcctcccccagcccttgggaccatcttctcctgcagtcccctgggccccagtgagaggggcaggggcagggccggcagtaggtggggcctgtggtccccccactgccctgagggcattagctggtctaactgcccggaggcacccggccctgggccttaggcacctcaaggacttttctgctatttactgctcttattgttaaggataataattaaggatcatatgaataattaatgaagatgctgatgactatgaataataaataattatcctgaggaga

SEQ ID NO: 546 - DNA, 3884 bp, Homo sapiens
  source 1..3884: mol_type = genomic DNA
  misc_feature 1..3884: note = cDNA of KCNH2 gene SNP c.2515C>A (p.Leu839Met)
atgccggtgcggaggggccacgtcgcgccgcagaacaccttcctggacaccatcatccgcaagtttgagggccagagccgtaagttcatcatcgccaacgctcgggtggagaactgcgccgtcatctactgcaacgacggcttctgcgagctgtgcggctactcgcgggccgaggtgatgcagcgaccctgcacctgcgacttcctgcacgggccgcgcacgcagcgccgcgctgccgcgcagatcgcgcaggcactgctgggcgccgaggagcgcaaagtggaaatcgccttctaccggaaagatgggagctgcttcctatgtctggtggatgtggtgcccgtgaagaacgaggatggggctgtcatcatgttcatcctcaatttcgaggtggtgatggagaaggacatggtggggtccccggctcatgacaccaaccaccggggcccccccaccagctggctggccccaggccgcgccaagaccttccgcctgaagctgcccgcgctgctggcgctgacggcccgggagtcgtcggtgcggtcgggcggcgcgggcggcgcgggcgccccgggggccgtggtggtggacgtggacctgacgcccgcggcacccagcagcgagtcgctggccctggacgaagtgacagccatggacaaccacgtggcagggctcgggcccgcggaggagcggcgtgcgctggtgggtcccggctctccgccccgcagcgcgcccggccagctcccatcgccccgggcgcacagcctcaaccccgacgcctcgggctccagctgcagcctggcccggacgcgctcccgagaaagctgcgccagcgtgcgccgcgcctcgtcggccgacgacatcgaggccatgcgcgccggggtgctgcccccgccaccgcgccacgccagcaccggggccatgcacccactgcgcagcggcttgctcaactccacctcggactccgacctcgtgcgctaccgcaccattagcaagattccccaaatcaccctcaactttgtggacctcaagggcgaccccttcttggcttcgcccaccagtgaccgtgagatcatagcacctaagataaaggagcgaacccacaatgtcactgagaaggtcacccaggtcctgtccctgggcgccgacgtgctgcctgagtacaagctgcaggcaccgcgcatccaccgctggaccatcctgcattacagccccttcaaggccgtgtgggactggctcatcctgctgctggtcatctacacggctgtcttcacaccctactcggctgccttcctgctgaaggagacggaagaaggcccgcctgctaccgagtgtggctacgcctgccagccgctggctgtggtggacctcatcgtggacatcatgttcattgtggacatcctcatcaacttccgcaccacctacgtcaatgccaacgaggaggtggtcagccaccccggccgcatcgccgtccactacttcaagggctggttcctcatcgacatggtggccgccatccccttcgacctgctcatcttcggctctggctctgaggagctgatcgggctgctgaagactgcgcggctgctgcggctggtgcgcgtggcgcggaagctggatcgctactcagagtacggcgcggccgtgctgttcttgctcatgtgcacctttgcgctcatcgcgcactggctagcctgcatctggtacgccatcggcaacatggagcagccacacatggactcacgcatcggctggctgcacaacctgggcgaccagataggcaaaccctacaacagcagcggcctgggcggcccctccatcaaggacaagtatgtgacggcgctctacttcaccttcagcagcctcaccagtgtgggcttcggcaacgtctctcccaacaccaactcagagaagatcttctccatctgcgtcatgctcattggctccctcatgtatgctagcatcttcggcaacgtgtcggccatcatccagcggctgtactcgggcacagcccgctaccacacacagatgctgcgggtgcgggagttcatccgcttccaccagatccccaatcccctgcgccagcgcctcgaggagtacttccagcacgcctggtcctacaccaacggcatcgacatgaacgcggtgctgaagggcttccctgagtgcctgcaggctgacatctgcctgcacctgaaccgctcactgctgcagcactgcaaacccttccgaggggccaccaagggctgccttcgggccctggccatgaagttcaagaccacacatgcaccgccaggggacacactggtgcatgctggggacctgctcaccgccctgtacttcatctcccggggctccatcgagatcctgcggggcgacgtcgtcgtggccatcctggggaagaatgacatctttggggagcctctgaacctgtatgcaaggcctggcaagtcgaacggggatgtgcgggccctcacctactgtgacctacacaagatccatcgggacgacctgatggaggtgctggacatgtaccctgagttctccgaccacttctggtccagcctggagatcaccttcaacctgcgagataccaacatgatcccgggctcccccggcagtacggagttagagggtggcttcagtcggcaacgcaagcgcaagttgtccttccgcaggcgcacggacaaggacacggagcagccaggggaggtgtcggccttggggccgggccgggcgggggcagggccgagtagccggggccggccgggggggccgtggggggagagcccgtccagtggcccctccagccctgagagcagtgaggatgagggcccaggccgcagctccagccccctccgcctggtgcccttctccagccccaggccccccggagagccgccgggtggggagcccctgatggaggactgcgagaagagcagcgacacttgcaaccccctgtcaggcgccttctcaggagtgtccaacattttcagcttctggggggacagtcggggccgccagtaccaggagctccctcgatgccccgcccccacccccagcctcctcaacatccccctctccagcccgggtcggcggccccggggcgacgtggagagcaggctggatgccctccagcgccagctcaacaggctggagacccggctgagtgcagacatggccactgtcctgcagctgctacagaggcagatgacgctggtcccgcccgcctacagtgctgtgaccaccccggggcctggccccacttccacatccccgctgttgcccgtcagccccctccccaccctcaccttggactcgctttctcaggtttcccagttcatggcgtgtgaggagctgcccccgggggccccagagcttccccaagaaggccccacacgacgcctctccctaccgggccagctgggggccctcacctcccagcccctgcacagacacggctcggacccgggcagttagtggggctgcccagtgtggacacgtggctcacccagggatcaaggcgctgctgggccgctccccttggaggccctgctcaggaggccctgaccgtggaaggggagaggaactcgaaagcacagctcctcccccagcccttgggaccatcttctcctgcagtcccctgggccccagtgagaggggcaggggcagggccggcagtaggtggggcctgtggtccccccactgccctgagggcattagctggtctaactgcccggaggcacccggccctgggccttaggcacctcaaggacttttctgctatttactgctcttattgttaaggataataattaaggatcatatgaataattaatgaagatgctgatgactatgaataataaataattatcctgaggaga

SEQ ID NO: 547 - DNA, 3884 bp, Homo sapiens
  source 1..3884: mol_type = genomic DNA
  misc_feature 1..3884: note = cDNA of KCNH2 gene SNP c.251A>G (p.Gln84Arg)
atgccggtgcggaggggccacgtcgcgccgcagaacaccttcctggacaccatcatccgcaagtttgagggccagagccgtaagttcatcatcgccaacgctcgggtggagaactgcgccgtcatctactgcaacgacggcttctgcgagctgtgcggctactcgcgggccgaggtgatgcagcgaccctgcacctgcgacttcctgcacgggccgcgcacgcagcgccgcgctgccgcgcagatcgcgcgggcactgctgggcgccgaggagcgcaaagtggaaatcgccttctaccggaaagatgggagctgcttcctatgtctggtggatgtggtgcccgtgaagaacgaggatggggctgtcatcatgttcatcctcaatttcgaggtggtgatggagaaggacatggtggggtccccggctcatgacaccaaccaccggggcccccccaccagctggctggccccaggccgcgccaagaccttccgcctgaagctgcccgcgctgctggcgctgacggcccgggagtcgtcggtgcggtcgggcggcgcgggcggcgcgggcgccccgggggccgtggtggtggacgtggacctgacgcccgcggcacccagcagcgagtcgctggccctggacgaagtgacagccatggacaaccacgtggcagggctcgggcccgcggaggagcggcgtgcgctggtgggtcccggctctccgccccgcagcgcgcccggccagctcccatcgccccgggcgcacagcctcaaccccgacgcctcgggctccagctgcagcctggcccggacgcgctcccgagaaagctgcgccagcgtgcgccgcgcctcgtcggccgacgacatcgaggccatgcgcgccggggtgctgcccccgccaccgcgccacgccagcaccggggccatgcacccactgcgcagcggcttgctcaactccacctcggactccgacctcgtgcgctaccgcaccattagcaagattccccaaatcaccctcaactttgtggacctcaagggcgaccccttcttggcttcgcccaccagtgaccgtgagatcatagcacctaagataaaggagcgaacccacaatgtcactgagaaggtcacccaggtcctgtccctgggcgccgacgtgctgcctgagtacaagctgcaggcaccgcgcatccaccgctggaccatcctgcattacagccccttcaaggccgtgtgggactggctcatcctgctgctggtcatctacacggctgtcttcacaccctactcggctgccttcctgctgaaggagacggaagaaggcccgcctgctaccgagtgtggctacgcctgccagccgctggctgtggtggacctcatcgtggacatcatgttcattgtggacatcctcatcaacttccgcaccacctacgtcaatgccaacgaggaggtggtcagccaccccggccgcatcgccgtccactacttcaagggctggttcctcatcgacatggtggccgccatccccttcgacctgctcatcttcggctctggctctgaggagctgatcgggctgctgaagactgcgcggctgctgcggctggtgcgcgtggcgcggaagctggatcgctactcagagtacggcgcggccgtgctgttcttgctcatgtgcacctttgcgctcatcgcgcactggctagcctgcatctggtacgccatcggcaacatggagcagccacacatggactcacgcatcggctggctgcacaacctgggcgaccagataggcaaaccctacaacagcagcggcctgggcggcccctccatcaaggacaagtatgtgacggcgctctacttcaccttcagcagcctcaccagtgtgggcttcggcaacgtctctcccaacaccaactcagagaagatcttctccatctgcgtcatgctcattggctccctcatgtatgctagcatcttcggcaacgtgtcggccatcatccagcggctgtactcgggcacagcccgctaccacacacagatgctgcgggtgcgggagttcatccgcttccaccagatccccaatcccctgcgccagcgcctcgaggagtacttccagcacgcctggtcctacaccaacggcatcgacatgaacgcggtgctgaagggcttccctgagtgcctgcaggctgacatctgcctgcacctgaaccgctcactgctgcagcactgcaaacccttccgaggggccaccaagggctgccttcgggccctggccatgaagttcaagaccacacatgcaccgccaggggacacactggtgcatgctggggacctgctcaccgccctgtacttcatctcccggggctccatcgagatcctgcggggcgacgtcgtcgtggccatcctggggaagaatgacatctttggggagcctctgaacctgtatgcaaggcctggcaagtcgaacggggatgtgcgggccctcacctactgtgacctacacaagatccatcgggacgacctgctggaggtgctggacatgtaccctgagttctccgaccacttctggtccagcctggagatcaccttcaacctgcgagataccaacatgatcccgggctcccccggcagtacggagttagagggtggcttcagtcggcaacgcaagcgcaagttgtccttccgcaggcgcacggacaaggacacggagcagccaggggaggtgtcggccttggggccgggccgggcgggggcagggccgagtagccggggccggccgggggggccgtggggggagagcccgtccagtggcccctccagccctgagagcagtgaggatgagggcccaggccgcagctccagccccctccgcctggtgcccttctccagccccaggccccccggagagccgccgggtggggagcccctgatggaggactgcgagaagagcagcgacacttgcaaccccctgtcaggcgccttctcaggagtgtccaacattttcagcttctggggggacagtcggggccgccagtaccaggagctccctcgatgccccgcccccacccccagcctcctcaacatccccctctccagcccgggtcggcggccccggggcgacgtggagagcaggctggatgccctccagcgccagctcaacaggctggagacccggctgagtgcagacatggccactgtcctgcagctgctacagaggcagatgacgctggtcccgcccgcctacagtgctgtgaccaccccggggcctggccccacttccacatccccgctgttgcccgtcagccccctccccaccctcaccttggactcgctttctcaggtttcccagttcatggcgtgtgaggagctgcccccgggggccccagagcttccccaagaaggccccacacgacgcctctccctaccgggccagctgggggccctcacctcccagcccctgcacagacacggctcggacccgggcagttagtggggctgcccagtgtggacacgtggctcacccagggatcaaggcgctgctgggccgctccccttggaggccctgctcaggaggccctgaccgtggaaggggagaggaactcgaaagcacagctcctcccccagcccttgggaccatcttctcctgcagtcccctgggccccagtgagaggggcaggggcagggccggcagtaggtggggcctgtggtccccccactgccctgagggcattagctggtctaactgcccggaggcacccggccctgggccttaggcacctcaaggacttttctgctatttactgctcttattgttaaggataataattaaggatcatatgaataattaatgaagatgctgatgactatgaataataaataattatcctgaggaga

SEQ ID NO: 548 - DNA, 3884 bp, Homo sapiens
  source 1..3884: mol_type = genomic DNA
  misc_feature 1..3884: note = cDNA of KCNH2 gene SNP c.2525T>C (p.Leu842Pro)
atgccggtgcggaggggccacgtcgcgccgcagaacaccttcctggacaccatcatccgcaagtttgagggccagagccgtaagttcatcatcgccaacgctcgggtggagaactgcgccgtcatctactgcaacgacggcttctgcgagctgtgcggctactcgcgggccgaggtgatgcagcgaccctgcacctgcgacttcctgcacgggccgcgcacgcagcgccgcgctgccgcgcagatcgcgcaggcactgctgggcgccgaggagcgcaaagtggaaatcgccttctaccggaaagatgggagctgcttcctatgtctggtggatgtggtgcccgtgaagaacgaggatggggctgtcatcatgttcatcctcaatttcgaggtggtgatggagaaggacatggtggggtccccggctcatgacaccaaccaccggggcccccccaccagctggctggccccaggccgcgccaagaccttccgcctgaagctgcccgcgctgctggcgctgacggcccgggagtcgtcggtgcggtcgggcggcgcgggcggcgcgggcgccccgggggccgtggtggtggacgtggacctgacgcccgcggcacccagcagcgagtcgctggccctggacgaagtgacagccatggacaaccacgtggcagggctcgggcccgcggaggagcggcgtgcgctggtgggtcccggctctccgccccgcagcgcgcccggccagctcccatcgccccgggcgcacagcctcaaccccgacgcctcgggctccagctgcagcctggcccggacgcgctcccgagaaagctgcgccagcgtgcgccgcgcctcgtcggccgacgacatcgaggccatgcgcgccggggtgctgcccccgccaccgcgccacgccagcaccggggccatgcacccactgcgcagcggcttgctcaactccacctcggactccgacctcgtgcgctaccgcaccattagcaagattccccaaatcaccctcaactttgtggacctcaagggcgaccccttcttggcttcgcccaccagtgaccgtgagatcatagcacctaagataaaggagcgaacccacaatgtcactgagaaggtcacccaggtcctgtccctgggcgccgacgtgctgcctgagtacaagctgcaggcaccgcgcatccaccgctggaccatcctgcattacagccccttcaaggccgtgtgggactggctcatcctgctgctggtcatctacacggctgtcttcacaccctactcggctgccttcctgctgaaggagacggaagaaggcccgcctgctaccgagtgtggctacgcctgccagccgctggctgtggtggacctcatcgtggacatcatgttcattgtggacatcctcatcaacttccgcaccacctacgtcaatgccaacgaggaggtggtcagccaccccggccgcatcgccgtccactacttcaagggctggttcctcatcgacatggtggccgccatccccttcgacctgctcatcttcggctctggctctgaggagctgatcgggctgctgaagactgcgcggctgctgcggctggtgcgcgtggcgcggaagctggatcgctactcagagtacggcgcggccgtgctgttcttgctcatgtgcacctttgcgctcatcgcgcactggctagcctgcatctggtacgccatcggcaacatggagcagccacacatggactcacgcatcggctggctgcacaacctgggcgaccagataggcaaaccctacaacagcagcggcctgggcggcccctccatcaaggacaagtatgtgacggcgctctacttcaccttcagcagcctcaccagtgtgggcttcggcaacgtctctcccaacaccaactcagagaagatcttctccatctgcgtcatgctcattggctccctcatgtatgctagcatcttcggcaacgtgtcggccatcatccagcggctgtactcgggcacagcccgctaccacacacagatgctgcgggtgcgggagttcatccgcttccaccagatccccaatcccctgcgccagcgcctcgaggagtacttccagcacgcctggtcctacaccaacggcatcgacatgaacgcggtgctgaagggcttccctgagtgcctgcaggctgacatctgcctgcacctgaaccgctcactgctgcagcactgcaaacccttccgaggggccaccaagggctgccttcgggccctggccatgaagttcaagaccacacatgcaccgccaggggacacactggtgcatgctggggacctgctcaccgccctgtacttcatctcccggggctccatcgagatcctgcggggcgacgtcgtcgtggccatcctggggaagaatgacatctttggggagcctctgaacctgtatgcaaggcctggcaagtcgaacggggatgtgcgggccctcacctactgtgacctacacaagatccatcgggacgacctgctggaggtgccggacatgtaccctgagttctccgaccacttctggtccagcctggagatcaccttcaacctgcgagataccaacatgatcccgggctcccccggcagtacggagttagagggtggcttcagtcggcaacgcaagcgcaagttgtccttccgcaggcgcacggacaaggacacggagcagccaggggaggtgtcggccttggggccgggccgggcgggggcagggccgagtagccggggccggccgggggggccgtggggggagagcccgtccagtggcccctccagccctgagagcagtgaggatgagggcccaggccgcagctccagccccctccgcctggtgcccttctccagccccaggccccccggagagccgccgggtggggagcccctgatggaggactgcgagaagagcagcgacacttgcaaccccctgtcaggcgccttctcaggagtgtccaacattttcagcttctggggggacagtcggggccgccagtaccaggagctccctcgatgccccgcccccacccccagcctcctcaacatccccctctccagcccgggtcggcggccccggggcgacgtggagagcaggctggatgccctccagcgccagctcaacaggctggagacccggctgagtgcagacatggccactgtcctgcagctgctacagaggcagatgacgctggtcccgcccgcctacagtgctgtgaccaccccggggcctggccccacttccacatccccgctgttgcccgtcagccccctccccaccctcaccttggactcgctttctcaggtttcccagttcatggcgtgtgaggagctgcccccgggggccccagagcttccccaagaaggccccacacgacgcctctccctaccgggccagctgggggccctcacctcccagcccctgcacagacacggctcggacccgggcagttagtggggctgcccagtgtggacacgtggctcacccagggatcaaggcgctgctgggccgctccccttggaggccctgctcaggaggccctgaccgtggaaggggagaggaactcgaaagcacagctcctcccccagcccttgggaccatcttctcctgcagtcccctgggccccagtgagaggggcaggggcagggccggcagtaggtggggcctgtggtccccccactgccctgagggcattagctggtctaactgcccggaggcacccggccctgggccttaggcacctcaaggacttttctgctatttactgctcttattgttaaggataataattaaggatcatatgaataattaatgaagatgctgatgactatgaataataaataattatcctgaggaga

SEQ ID NO: 549 - DNA, 3884 bp, Homo sapiens
  source 1..3884: mol_type = genomic DNA
  misc_feature 1..3884: note = cDNA of KCNH2 gene SNP c.2530A>G (p.Met844Val)
atgccggtgcggaggggccacgtcgcgccgcagaacaccttcctggacaccatcatccgcaagtttgagggccagagccgtaagttcatcatcgccaacgctcgggtggagaactgcgccgtcatctactgcaacgacggcttctgcgagctgtgcggctactcgcgggccgaggtgatgcagcgaccctgcacctgcgacttcctgcacgggccgcgcacgcagcgccgcgctgccgcgcagatcgcgcaggcactgctgggcgccgaggagcgcaaagtggaaatcgccttctaccggaaagatgggagctgcttcctatgtctggtggatgtggtgcccgtgaagaacgaggatggggctgtcatcatgttcatcctcaatttcgaggtggtgatggagaaggacatggtggggtccccggctcatgacaccaaccaccggggcccccccaccagctggctggccccaggccgcgccaagaccttccgcctgaagctgcccgcgctgctggcgctgacggcccgggagtcgtcggtgcggtcgggcggcgcgggcggcgcgggcgccccgggggccgtggtggtggacgtggacctgacgcccgcggcacccagcagcgagtcgctggccctggacgaagtgacagccatggacaaccacgtggcagggctcgggcccgcggaggagcggcgtgcgctggtgggtcccggctctccgccccgcagcgcgcccggccagctcccatcgccccgggcgcacagcctcaaccccgacgcctcgggctccagctgcagcctggcccggacgcgctcccgagaaagctgcgccagcgtgcgccgcgcctcgtcggccgacgacatcgaggccatgcgcgccggggtgctgcccccgccaccgcgccacgccagcaccggggccatgcacccactgcgcagcggcttgctcaactccacctcggactccgacctcgtgcgctaccgcaccattagcaagattccccaaatcaccctcaactttgtggacctcaagggcgaccccttcttggcttcgcccaccagtgaccgtgagatcatagcacctaagataaaggagcgaacccacaatgtcactgagaaggtcacccaggtcctgtccctgggcgccgacgtgctgcctgagtacaagctgcaggcaccgcgcatccaccgctggaccatcctgcattacagccccttcaaggccgtgtgggactggctcatcctgctgctggtcatctacacggctgtcttcacaccctactcggctgccttcctgctgaaggagacggaagaaggcccgcctgctaccgagtgtggctacgcctgccagccgctggctgtggtggacctcatcgtggacatcatgttcattgtggacatcctcatcaacttccgcaccacctacgtcaatgccaacgaggaggtggtcagccaccccggccgcatcgccgtccactacttcaagggctggttcctcatcgacatggtggccgccatccccttcgacctgctcatcttcggctctggctctgaggagctgatcgggctgctgaagactgcgcggctgctgcggctggtgcgcgtggcgcggaagctggatcgctactcagagtacggcgcggccgtgctgttcttgctcatgtgcacctttgcgctcatcgcgcactggctagcctgcatctggtacgccatcggcaacatggagcagccacacatggactcacgcatcggctggctgcacaacctgggcgaccagataggcaaaccctacaacagcagcggcctgggcggcccctccatcaaggacaagtatgtgacggcgctctacttcaccttcagcagcctcaccagtgtgggcttcggcaacgtctctcccaacaccaactcagagaagatcttctccatctgcgtcatgctcattggctccctcatgtatgctagcatcttcggcaacgtgtcggccatcatccagcggctgtactcgggcacagcccgctaccacacacagatgctgcgggtgcgggagttcatccgcttccaccagatccccaatcccctgcgccagcgcctcgaggagtacttccagcacgcctggtcctacaccaacggcatcgacatgaacgcggtgctgaagggcttccctgagtgcctgcaggctgacatctgcctgcacctgaaccgctcactgctgcagcactgcaaacccttccgaggggccaccaagggctgccttcgggccctggccatgaagttcaagaccacacatgcaccgccaggggacacactggtgcatgctggggacctgctcaccgccctgtacttcatctcccggggctccatcgagatcctgcggggcgacgtcgtcgtggccatcctggggaagaatgacatctttggggagcctctgaacctgtatgcaaggcctggcaagtcgaacggggatgtgcgggccctcacctactgtgacctacacaagatccatcgggacgacctgctggaggtgctggacgtgtaccctgagttctccgaccacttctggtccagcctggagatcaccttcaacctgcgagataccaacatgatcccgggctcccccggcagtacggagttagagggtggcttcagtcggcaacgcaagcgcaagttgtccttccgcaggcgcacggacaaggacacggagcagccaggggaggtgtcggccttggggccgggccgggcgggggcagggccgagtagccggggccggccgggggggccgtggggggagagcccgtccagtggcccctccagccctgagagcagtgaggatgagggcccaggccgcagctccagccccctccgcctggtgcccttctccagccccaggccccccggagagccgccgggtggggagcccctgatggaggactgcgagaagagcagcgacacttgcaaccccctgtcaggcgccttctcaggagtgtccaacattttcagcttctggggggacagtcggggccgccagtaccaggagctccctcgatgccccgcccccacccccagcctcctcaacatccccctctccagcccgggtcggcggccccggggcgacgtggagagcaggctggatgccctccagcgccagctcaacaggctggagacccggctgagtgcagacatggccactgtcctgcagctgctacagaggcagatgacgctggtcccgcccgcctacagtgctgtgaccaccccggggcctggccccacttccacatccccgctgttgcccgtcagccccctccccaccctcaccttggactcgctttctcaggtttcccagttcatggcgtgtgaggagctgcccccgggggccccagagcttccccaagaaggccccacacgacgcctctccctaccgggccagctgggggccctcacctcccagcccctgcacagacacggctcggacccgggcagttagtggggctgcccagtgtggacacgtggctcacccagggatcaaggcgctgctgggccgctccccttggaggccctgctcaggaggccctgaccgtggaaggggagaggaactcgaaagcacagctcctcccccagcccttgggaccatcttctcctgcagtcccctgggccccagtgagaggggcaggggcagggccggcagtaggtggggcctgtggtccccccactgccctgagggcattagctggtctaactgcccggaggcacccggccctgggccttaggcacctcaaggacttttctgctatttactgctcttattgttaaggataataattaaggatcatatgaataattaatgaagatgctgatgactatgaataataaataattatcctgaggaga

SEQ ID NO: 550 - DNA, 3884 bp, Homo sapiens
  source 1..3884: mol_type = genomic DNA
  misc_feature 1..3884: note = cDNA of KCNH2 gene SNP c.2536C>A (p.Pro846Thr)
atgccggtgcggaggggccacgtcgcgccgcagaacaccttcctggacaccatcatccgcaagtttgagggccagagccgtaagttcatcatcgccaacgctcgggtggagaactgcgccgtcatctactgcaacgacggcttctgcgagctgtgcggctactcgcgggccgaggtgatgcagcgaccctgcacctgcgacttcctgcacgggccgcgcacgcagcgccgcgctgccgcgcagatcgcgcaggcactgctgggcgccgaggagcgcaaagtggaaatcgccttctaccggaaagatgggagctgcttcctatgtctggtggatgtggtgcccgtgaagaacgaggatggggctgtcatcatgttcatcctcaatttcgaggtggtgatggagaaggacatggtggggtccccggctcatgacaccaaccaccggggcccccccaccagctggctggccccaggccgcgccaagaccttccgcctgaagctgcccgcgctgctggcgctgacggcccgggagtcgtcggtgcggtcgggcggcgcgggcggcgcgggcgccccgggggccgtggtggtggacgtggacctgacgcccgcggcacccagcagcgagtcgctggccctggacgaagtgacagccatggacaaccacgtggcagggctcgggcccgcggaggagcggcgtgcgctggtgggtcccggctctccgccccgcagcgcgcccggccagctcccatcgccccgggcgcacagcctcaaccccgacgcctcgggctccagctgcagcctggcccggacgcgctcccgagaaagctgcgccagcgtgcgccgcgcctcgtcggccgacgacatcgaggccatgcgcgccggggtgctgcccccgccaccgcgccacgccagcaccggggccatgcacccactgcgcagcggcttgctcaactccacctcggactccgacctcgtgcgctaccgcaccattagcaagattccccaaatcaccctcaactttgtggacctcaagggcgaccccttcttggcttcgcccaccagtgaccgtgagatcatagcacctaagataaaggagcgaacccacaatgtcactgagaaggtcacccaggtcctgtccctgggcgccgacgtgctgcctgagtacaagctgcaggcaccgcgcatccaccgctggaccatcctgcattacagccccttcaaggccgtgtgggactggctcatcctgctgctggtcatctacacggctgtcttcacaccctactcggctgccttcctgctgaaggagacggaagaaggcccgcctgctaccgagtgtggctacgcctgccagccgctggctgtggtggacctcatcgtggacatcatgttcattgtggacatcctcatcaacttccgcaccacctacgtcaatgccaacgaggaggtggtcagccaccccggccgcatcgccgtccactacttcaagggctggttcctcatcgacatggtggccgccatccccttcgacctgctcatcttcggctctggctctgaggagctgatcgggctgctgaagactgcgcggctgctgcggctggtgcgcgtggcgcggaagctggatcgctactcagagtacggcgcggccgtgctgttcttgctcatgtgcacctttgcgctcatcgcgcactggctagcctgcatctggtacgccatcggcaacatggagcagccacacatggactcacgcatcggctggctgcacaacctgggcgaccagataggcaaaccctacaacagcagcggcctgggcggcccctccatcaaggacaagtatgtgacggcgctctacttcaccttcagcagcctcaccagtgtgggcttcggcaacgtctctcccaacaccaactcagagaagatcttctccatctgcgtcatgctcattggctccctcatgtatgctagcatcttcggcaacgtgtcggccatcatccagcggctgtactcgggcacagcccgctaccacacacagatgctgcgggtgcgggagttcatccgcttccaccagatccccaatcccctgcgccagcgcctcgaggagtacttccagcacgcctggtcctacaccaacggcatcgacatgaacgcggtgctgaagggcttccctgagtgcctgcaggctgacatctgcctgcacctgaaccgctcactgctgcagcactgcaaacccttccgaggggccaccaagggctgccttcgggccctggccatgaagttcaagaccacacatgcaccgccaggggacacactggtgcatgctggggacctgctcaccgccctgtacttcatctcccggggctccatcgagatcctgcggggcgacgtcgtcgtggccatcctggggaagaatgacatctttggggagcctctgaacctgtatgcaaggcctggcaagtcgaacggggatgtgcgggccctcacctactgtgacctacacaagatccatcgggacgacctgctggaggtgctggacatgtacactgagttctccgaccacttctggtccagcctggagatcaccttcaacctgcgagataccaacatgatcccgggctcccccggcagtacggagttagagggtggcttcagtcggcaacgcaagcgcaagttgtccttccgcaggcgcacggacaaggacacggagcagccaggggaggtgtcggccttggggccgggccgggcgggggcagggccgagtagccggggccggccgggggggccgtggggggagagcccgtccagtggcccctccagccctgagagcagtgaggatgagggcccaggccgcagctccagccccctccgcctggtgcccttctccagccccaggccccccggagagccgccgggtggggagcccctgatggaggactgcgagaagagcagcgacacttgcaaccccctgtcaggcgccttctcaggagtgtccaacattttcagcttctggggggacagtcggggccgccagtaccaggagctccctcgatgccccgcccccacccccagcctcctcaacatccccctctccagcccgggtcggcggccccggggcgacgtggagagcaggctggatgccctccagcgccagctcaacaggctggagacccggctgagtgcagacatggccactgtcctgcagctgctacagaggcagatgacgctggtcccgcccgcctacagtgctgtgaccaccccggggcctggccccacttccacatccccgctgttgcccgtcagccccctccccaccctcaccttggactcgctttctcaggtttcccagttcatggcgtgtgaggagctgcccccgggggccccagagcttccccaagaaggccccacacgacgcctctccctaccgggccagctgggggccctcacctcccagcccctgcacagacacggctcggacccgggcagttagtggggctgcccagtgtggacacgtggctcacccagggatcaaggcgctgctgggccgctccccttggaggccctgctcaggaggccctgaccgtggaaggggagaggaactcgaaagcacagctcctcccccagcccttgggaccatcttctcctgcagtcccctgggccccagtgagaggggcaggggcagggccggcagtaggtggggcctgtggtccccccactgccctgagggcattagctggtctaactgcccggaggcacccggccctgggccttaggcacctcaaggacttttctgctatttactgctcttattgttaaggataataattaaggatcatatgaataattaatgaagatgctgatgactatgaataataaataattatcctgaggaga

SEQ ID NO: 551 - DNA, 3884 bp, Homo sapiens
  source 1..3884: mol_type = genomic DNA
  misc_feature 1..3884: note = cDNA of KCNH2 gene SNP c.2536C>G (p.Pro846Ala)
atgccggtgcggaggggccacgtcgcgccgcagaacaccttcctggacaccatcatccgcaagtttgagggccagagccgtaagttcatcatcgccaacgctcgggtggagaactgcgccgtcatctactgcaacgacggcttctgcgagctgtgcggctactcgcgggccgaggtgatgcagcgaccctgcacctgcgacttcctgcacgggccgcgcacgcagcgccgcgctgccgcgcagatcgcgcaggcactgctgggcgccgaggagcgcaaagtggaaatcgccttctaccggaaagatgggagctgcttcctatgtctggtggatgtggtgcccgtgaagaacgaggatggggctgtcatcatgttcatcctcaatttcgaggtggtgatggagaaggacatggtggggtccccggctcatgacaccaaccaccggggcccccccaccagctggctggccccaggccgcgccaagaccttccgcctgaagctgcccgcgctgctggcgctgacggcccgggagtcgtcggtgcggtcgggcggcgcgggcggcgcgggcgccccgggggccgtggtggtggacgtggacctgacgcccgcggcacccagcagcgagtcgctggccctggacgaagtgacagccatggacaaccacgtggcagggctcgggcccgcggaggagcggcgtgcgctggtgggtcccggctctccgccccgcagcgcgcccggccagctcccatcgccccgggcgcacagcctcaaccccgacgcctcgggctccagctgcagcctggcccggacgcgctcccgagaaagctgcgccagcgtgcgccgcgcctcgtcggccgacgacatcgaggccatgcgcgccggggtgctgcccccgccaccgcgccacgccagcaccggggccatgcacccactgcgcagcggcttgctcaactccacctcggactccgacctcgtgcgctaccgcaccattagcaagattccccaaatcaccctcaactttgtggacctcaagggcgaccccttcttggcttcgcccaccagtgaccgtgagatcatagcacctaagataaaggagcgaacccacaatgtcactgagaaggtcacccaggtcctgtccctgggcgccgacgtgctgcctgagtacaagctgcaggcaccgcgcatccaccgctggaccatcctgcattacagccccttcaaggccgtgtgggactggctcatcctgctgctggtcatctacacggctgtcttcacaccctactcggctgccttcctgctgaaggagacggaagaaggcccgcctgctaccgagtgtggctacgcctgccagccgctggctgtggtggacctcatcgtggacatcatgttcattgtggacatcctcatcaacttccgcaccacctacgtcaatgccaacgaggaggtggtcagccaccccggccgcatcgccgtccactacttcaagggctggttcctcatcgacatggtggccgccatccccttcgacctgctcatcttcggctctggctctgaggagctgatcgggctgctgaagactgcgcggctgctgcggctggtgcgcgtggcgcggaagctggatcgctactcagagtacggcgcggccgtgctgttcttgctcatgtgcacctttgcgctcatcgcgcactggctagcctgcatctggtacgccatcggcaacatggagcagccacacatggactcacgcatcggctggctgcacaacctgggcgaccagataggcaaaccctacaacagcagcggcctgggcggcccctccatcaaggacaagtatgtgacggcgctctacttcaccttcagcagcctcaccagtgtgggcttcggcaacgtctctcccaacaccaactcagagaagatcttctccatctgcgtcatgctcattggctccctcatgtatgctagcatcttcggcaacgtgtcggccatcatccagcggctgtactcgggcacagcccgctaccacacacagatgctgcgggtgcgggagttcatccgcttccaccagatccccaatcccctgcgccagcgcctcgaggagtacttccagcacgcctggtcctacaccaacggcatcgacatgaacgcggtgctgaagggcttccctgagtgcctgcaggctgacatctgcctgcacctgaaccgctcactgctgcagcactgcaaacccttccgaggggccaccaagggctgccttcgggccctggccatgaagttcaagaccacacatgcaccgccaggggacacactggtgcatgctggggacctgctcaccgccctgtacttcatctcccggggctccatcgagatcctgcggggcgacgtcgtcgtggccatcctggggaagaatgacatctttggggagcctctgaacctgtatgcaaggcctggcaagtcgaacggggatgtgcgggccctcacctactgtgacctacacaagatccatcgggacgacctgctggaggtgctggacatgtacgctgagttctccgaccacttctggtccagcctggagatcaccttcaacctgcgagataccaacatgatcccgggctcccccggcagtacggagttagagggtggcttcagtcggcaacgcaagcgcaagttgtccttccgcaggcgcacggacaaggacacggagcagccaggggaggtgtcggccttggggccgggccgggcgggggcagggccgagtagccggggccggccgggggggccgtggggggagagcccgtccagtggcccctccagccctgagagcagtgaggatgagggcccaggccgcagctccagccccctccgcctggtgcccttctccagccccaggccccccggagagccgccgggtggggagcccctgatggaggactgcgagaagagcagcgacacttgcaaccccctgtcaggcgccttctcaggagtgtccaacattttcagcttctggggggacagtcggggccgccagtaccaggagctccctcgatgccccgcccccacccccagcctcctcaacatccccctctccagcccgggtcggcggccccggggcgacgtggagagcaggctggatgccctccagcgccagctcaacaggctggagacccggctgagtgcagacatggccactgtcctgcagctgctacagaggcagatgacgctggtcccgcccgcctacagtgctgtgaccaccccggggcctggccccacttccacatccccgctgttgcccgtcagccccctccccaccctcaccttggactcgctttctcaggtttcccagttcatggcgtgtgaggagctgcccccgggggccccagagcttccccaagaaggccccacacgacgcctctccctaccgggccagctgggggccctcacctcccagcccctgcacagacacggctcggacccgggcagttagtggggctgcccagtgtggacacgtggctcacccagggatcaaggcgctgctgggccgctccccttggaggccctgctcaggaggccctgaccgtggaaggggagaggaactcgaaagcacagctcctcccccagcccttgggaccatcttctcctgcagtcccctgggccccagtgagaggggcaggggcagggccggcagtaggtggggcctgtggtccccccactgccctgagggcattagctggtctaactgcccggaggcacccggccctgggccttaggcacctcaaggacttttctgctatttactgctcttattgttaaggataataattaaggatcatatgaataattaatgaagatgctgatgactatgaataataaataattatcctgaggaga

SEQ ID NO: 552 - DNA, 3884 bp, Homo sapiens
  source 1..3884: mol_type = genomic DNA
  misc_feature 1..3884: note = cDNA of KCNH2 gene SNP c.2536C>T (p.Pro846Ser)
atgccggtgcggaggggccacgtcgcgccgcagaacaccttcctggacaccatcatccgcaagtttgagggccagagccgtaagttcatcatcgccaacgctcgggtggagaactgcgccgtcatctactgcaacgacggcttctgcgagctgtgcggctactcgcgggccgaggtgatgcagcgaccctgcacctgcgacttcctgcacgggccgcgcacgcagcgccgcgctgccgcgcagatcgcgcaggcactgctgggcgccgaggagcgcaaagtggaaatcgccttctaccggaaagatgggagctgcttcctatgtctggtggatgtggtgcccgtgaagaacgaggatggggctgtcatcatgttcatcctcaatttcgaggtggtgatggagaaggacatggtggggtccccggctcatgacaccaaccaccggggcccccccaccagctggctggccccaggccgcgccaagaccttccgcctgaagctgcccgcgctgctggcgctgacggcccgggagtcgtcggtgcggtcgggcggcgcgggcggcgcgggcgccccgggggccgtggtggtggacgtggacctgacgcccgcggcacccagcagcgagtcgctggccctggacgaagtgacagccatggacaaccacgtggcagggctcgggcccgcggaggagcggcgtgcgctggtgggtcccggctctccgccccgcagcgcgcccggccagctcccatcgccccgggcgcacagcctcaaccccgacgcctcgggctccagctgcagcctggcccggacgcgctcccgagaaagctgcgccagcgtgcgccgcgcctcgtcggccgacgacatcgaggccatgcgcgccggggtgctgcccccgccaccgcgccacgccagcaccggggccatgcacccactgcgcagcggcttgctcaactccacctcggactccgacctcgtgcgctaccgcaccattagcaagattccccaaatcaccctcaactttgtggacctcaagggcgaccccttcttggcttcgcccaccagtgaccgtgagatcatagcacctaagataaaggagcgaacccacaatgtcactgagaaggtcacccaggtcctgtccctgggcgccgacgtgctgcctgagtacaagctgcaggcaccgcgcatccaccgctggaccatcctgcattacagccccttcaaggccgtgtgggactggctcatcctgctgctggtcatctacacggctgtcttcacaccctactcggctgccttcctgctgaaggagacggaagaaggcccgcctgctaccgagtgtggctacgcctgccagccgctggctgtggtggacctcatcgtggacatcatgttcattgtggacatcctcatcaacttccgcaccacctacgtcaatgccaacgaggaggtggtcagccaccccggccgcatcgccgtccactacttcaagggctggttcctcatcgacatggtggccgccatccccttcgacctgctcatcttcggctctggctctgaggagctgatcgggctgctgaagactgcgcggctgctgcggctggtgcgcgtggcgcggaagctggatcgctactcagagtacggcgcggccgtgctgttcttgctcatgtgcacctttgcgctcatcgcgcactggctagcctgcatctggtacgccatcggcaacatggagcagccacacatggactcacgcatcggctggctgcacaacctgggcgaccagataggcaaaccctacaacagcagcggcctgggcggcccctccatcaaggacaagtatgtgacggcgctctacttcaccttcagcagcctcaccagtgtgggcttcggcaacgtctctcccaacaccaactcagagaagatcttctccatctgcgtcatgctcattggctccctcatgtatgctagcatcttcggcaacgtgtcggccatcatccagcggctgtactcgggcacagcccgctaccacacacagatgctgcgggtgcgggagttcatccgcttccaccagatccccaatcccctgcgccagcgcctcgaggagtacttccagcacgcctggtcctacaccaacggcatcgacatgaacgcggtgctgaagggcttccctgagtgcctgcaggctgacatctgcctgcacctgaaccgctcactgctgcagcactgcaaacccttccgaggggccaccaagggctgccttcgggccctggccatgaagttcaagaccacacatgcaccgccaggggacacactggtgcatgctggggacctgctcaccgccctgtacttcatctcccggggctccatcgagatcctgcggggcgacgtcgtcgtggccatcctggggaagaatgacatctttggggagcctctgaacctgtatgcaaggcctggcaagtcgaacggggatgtgcgggccctcacctactgtgacctacacaagatccatcgggacgacctgctggaggtgctggacatgtactctgagttctccgaccacttctggtccagcctggagatcaccttcaacctgcgagataccaacatgatcccgggctcccccggcagtacggagttagagggtggcttcagtcggcaacgcaagcgcaagttgtccttccgcaggcgcacggacaaggacacggagcagccaggggaggtgtcggccttggggccgggccgggcgggggcagggccgagtagccggggccggccgggggggccgtggggggagagcccgtccagtggcccctccagccctgagagcagtgaggatgagggcccaggccgcagctccagccccctccgcctggtgcccttctccagccccaggccccccggagagccgccgggtggggagcccctgatggaggactgcgagaagagcagcgacacttgcaaccccctgtcaggcgccttctcaggagtgtccaacattttcagcttctggggggacagtcggggccgccagtaccaggagctccctcgatgccccgcccccacccccagcctcctcaacatccccctctccagcccgggtcggcggccccggggcgacgtggagagcaggctggatgccctccagcgccagctcaacaggctggagacccggctgagtgcagacatggccactgtcctgcagctgctacagaggcagatgacgctggtcccgcccgcctacagtgctgtgaccaccccggggcctggccccacttccacatccccgctgttgcccgtcagccccctccccaccctcaccttggactcgctttctcaggtttcccagttcatggcgtgtgaggagctgcccccgggggccccagagcttccccaagaaggccccacacgacgcctctccctaccgggccagctgggggccctcacctcccagcccctgcacagacacggctcggacccgggcagttagtggggctgcccagtgtggacacgtggctcacccagggatcaaggcgctgctgggccgctccccttggaggccctgctcaggaggccctgaccgtggaaggggagaggaactcgaaagcacagctcctcccccagcccttgggaccatcttctcctgcagtcccctgggccccagtgagaggggcaggggcagggccggcagtaggtggggcctgtggtccccccactgccctgagggcattagctggtctaactgcccggaggcacccggccctgggccttaggcacctcaaggacttttctgctatttactgctcttattgttaaggataataattaaggatcatatgaataattaatgaagatgctgatgactatgaataataaataattatcctgaggaga

SEQ ID NO: 553 - DNA, 3884 bp, Homo sapiens
  source 1..3884: mol_type = genomic DNA
  misc_feature 1..3884: note = cDNA of KCNH2 gene SNP c.2537C>T (p.Pro846Leu)
atgccggtgcggaggggccacgtcgcgccgcagaacaccttcctggacaccatcatccgcaagtttgagggccagagccgtaagttcatcatcgccaacgctcgggtggagaactgcgccgtcatctactgcaacgacggcttctgcgagctgtgcggctactcgcgggccgaggtgatgcagcgaccctgcacctgcgacttcctgcacgggccgcgcacgcagcgccgcgctgccgcgcagatcgcgcaggcactgctgggcgccgaggagcgcaaagtggaaatcgccttctaccggaaagatgggagctgcttcctatgtctggtggatgtggtgcccgtgaagaacgaggatggggctgtcatcatgttcatcctcaatttcgaggtggtgatggagaaggacatggtggggtccccggctcatgacaccaaccaccggggcccccccaccagctggctggccccaggccgcgccaagaccttccgcctgaagctgcccgcgctgctggcgctgacggcccgggagtcgtcggtgcggtcgggcggcgcgggcggcgcgggcgccccgggggccgtggtggtggacgtggacctgacgcccgcggcacccagcagcgagtcgctggccctggacgaagtgacagccatggacaaccacgtggcagggctcgggcccgcggaggagcggcgtgcgctggtgggtcccggctctccgccccgcagcgcgcccggccagctcccatcgccccgggcgcacagcctcaaccccgacgcctcgggctccagctgcagcctggcccggacgcgctcccgagaaagctgcgccagcgtgcgccgcgcctcgtcggccgacgacatcgaggccatgcgcgccggggtgctgcccccgccaccgcgccacgccagcaccggggccatgcacccactgcgcagcggcttgctcaactccacctcggactccgacctcgtgcgctaccgcaccattagcaagattccccaaatcaccctcaactttgtggacctcaagggcgaccccttcttggcttcgcccaccagtgaccgtgagatcatagcacctaagataaaggagcgaacccacaatgtcactgagaaggtcacccaggtcctgtccctgggcgccgacgtgctgcctgagtacaagctgcaggcaccgcgcatccaccgctggaccatcctgcattacagccccttcaaggccgtgtgggactggctcatcctgctgctggtcatctacacggctgtcttcacaccctactcggctgccttcctgctgaaggagacggaagaaggcccgcctgctaccgagtgtggctacgcctgccagccgctggctgtggtggacctcatcgtggacatcatgttcattgtggacatcctcatcaacttccgcaccacctacgtcaatgccaacgaggaggtggtcagccaccccggccgcatcgccgtccactacttcaagggctggttcctcatcgacatggtggccgccatccccttcgacctgctcatcttcggctctggctctgaggagctgatcgggctgctgaagactgcgcggctgctgcggctggtgcgcgtggcgcggaagctggatcgctactcagagtacggcgcggccgtgctgttcttgctcatgtgcacctttgcgctcatcgcgcactggctagcctgcatctggtacgccatcggcaacatggagcagccacacatggactcacgcatcggctggctgcacaacctgggcgaccagataggcaaaccctacaacagcagcggcctgggcggcccctccatcaaggacaagtatgtgacggcgctctacttcaccttcagcagcctcaccagtgtgggcttcggcaacgtctctcccaacaccaactcagagaagatcttctccatctgcgtcatgctcattggctccctcatgtatgctagcatcttcggcaacgtgtcggccatcatccagcggctgtactcgggcacagcccgctaccacacacagatgctgcgggtgcgggagttcatccgcttccaccagatccccaatcccctgcgccagcgcctcgaggagtacttccagcacgcctggtcctacaccaacggcatcgacatgaacgcggtgctgaagggcttccctgagtgcctgcaggctgacatctgcctgcacctgaaccgctcactgctgcagcactgcaaacccttccgaggggccaccaagggctgccttcgggccctggccatgaagttcaagaccacacatgcaccgccaggggacacactggtgcatgctggggacctgctcaccgccctgtacttcatctcccggggctccatcgagatcctgcggggcgacgtcgtcgtggccatcctggggaagaatgacatctttggggagcctctgaacctgtatgcaaggcctggcaagtcgaacggggatgtgcgggccctcacctactgtgacctacacaagatccatcgggacgacctgctggaggtgctggacatgtaccttgagttctccgaccacttctggtccagcctggagatcaccttcaacctgcgagataccaacatgatcccgggctcccccggcagtacggagttagagggtggcttcagtcggcaacgcaagcgcaagttgtccttccgcaggcgcacggacaaggacacggagcagccaggggaggtgtcggccttggggccgggccgggcgggggcagggccgagtagccggggccggccgggggggccgtggggggagagcccgtccagtggcccctccagccctgagagcagtgaggatgagggcccaggccgcagctccagccccctccgcctggtgcccttctccagccccaggccccccggagagccgccgggtggggagcccctgatggaggactgcgagaagagcagcgacacttgcaaccccctgtcaggcgccttctcaggagtgtccaacattttcagcttctggggggacagtcggggccgccagtaccaggagctccctcgatgccccgcccccacccccagcctcctcaacatccccctctccagcccgggtcggcggccccggggcgacgtggagagcaggctggatgccctccagcgccagctcaacaggctggagacccggctgagtgcagacatggccactgtcctgcagctgctacagaggcagatgacgctggtcccgcccgcctacagtgctgtgaccaccccggggcctggccccacttccacatccccgctgttgcccgtcagccccctccccaccctcaccttggactcgctttctcaggtttcccagttcatggcgtgtgaggagctgcccccgggggccccagagcttccccaagaaggccccacacgacgcctctccctaccgggccagctgggggccctcacctcccagcccctgcacagacacggctcggacccgggcagttagtggggctgcccagtgtggacacgtggctcacccagggatcaaggcgctgctgggccgctccccttggaggccctgctcaggaggccctgaccgtggaaggggagaggaactcgaaagcacagctcctcccccagcccttgggaccatcttctcctgcagtcccctgggccccagtgagaggggcaggggcagggccggcagtaggtggggcctgtggtccccccactgccctgagggcattagctggtctaactgcccggaggcacccggccctgggccttaggcacctcaaggacttttctgctatttactgctcttattgttaaggataataattaaggatcatatgaataattaatgaagatgctgatgactatgaataataaataattatcctgaggaga

SEQ ID NO: 554 - DNA, 3884 bp, Homo sapiens
  source 1..3884: mol_type = genomic DNA
  misc_feature 1..3884: note = cDNA of KCNH2 gene SNP c.253G>A (p.Ala85Thr)
atgccggtgcggaggggccacgtcgcgccgcagaacaccttcctggacaccatcatccgcaagtttgagggccagagccgtaagttcatcatcgccaacgctcgggtggagaactgcgccgtcatctactgcaacgacggcttctgcgagctgtgcggctactcgcgggccgaggtgatgcagcgaccctgcacctgcgacttcctgcacgggccgcgcacgcagcgccgcgctgccgcgcagatcgcgcagacactgctgggcgccgaggagcgcaaagtggaaatcgccttctaccggaaagatgggagctgcttcctatgtctggtggatgtggtgcccgtgaagaacgaggatggggctgtcatcatgttcatcctcaatttcgaggtggtgatggagaaggacatggtggggtccccggctcatgacaccaaccaccggggcccccccaccagctggctggccccaggccgcgccaagaccttccgcctgaagctgcccgcgctgctggcgctgacggcccgggagtcgtcggtgcggtcgggcggcgcgggcggcgcgggcgccccgggggccgtggtggtggacgtggacctgacgcccgcggcacccagcagcgagtcgctggccctggacgaagtgacagccatggacaaccacgtggcagggctcgggcccgcggaggagcggcgtgcgctggtgggtcccggctctccgccccgcagcgcgcccggccagctcccatcgccccgggcgcacagcctcaaccccgacgcctcgggctccagctgcagcctggcccggacgcgctcccgagaaagctgcgccagcgtgcgccgcgcctcgtcggccgacgacatcgaggccatgcgcgccggggtgctgcccccgccaccgcgccacgccagcaccggggccatgcacccactgcgcagcggcttgctcaactccacctcggactccgacctcgtgcgctaccgcaccattagcaagattccccaaatcaccctcaactttgtggacctcaagggcgaccccttcttggcttcgcccaccagtgaccgtgagatcatagcacctaagataaaggagcgaacccacaatgtcactgagaaggtcacccaggtcctgtccctgggcgccgacgtgctgcctgagtacaagctgcaggcaccgcgcatccaccgctggaccatcctgcattacagccccttcaaggccgtgtgggactggctcatcctgctgctggtcatctacacggctgtcttcacaccctactcggctgccttcctgctgaaggagacggaagaaggcccgcctgctaccgagtgtggctacgcctgccagccgctggctgtggtggacctcatcgtggacatcatgttcattgtggacatcctcatcaacttccgcaccacctacgtcaatgccaacgaggaggtggtcagccaccccggccgcatcgccgtccactacttcaagggctggttcctcatcgacatggtggccgccatccccttcgacctgctcatcttcggctctggctctgaggagctgatcgggctgctgaagactgcgcggctgctgcggctggtgcgcgtggcgcggaagctggatcgctactcagagtacggcgcggccgtgctgttcttgctcatgtgcacctttgcgctcatcgcgcactggctagcctgcatctggtacgccatcggcaacatggagcagccacacatggactcacgcatcggctggctgcacaacctgggcgaccagataggcaaaccctacaacagcagcggcctgggcggcccctccatcaaggacaagtatgtgacggcgctctacttcaccttcagcagcctcaccagtgtgggcttcggcaacgtctctcccaacaccaactcagagaagatcttctccatctgcgtcatgctcattggctccctcatgtatgctagcatcttcggcaacgtgtcggccatcatccagcggctgtactcgggcacagcccgctaccacacacagatgctgcgggtgcgggagttcatccgcttccaccagatccccaatcccctgcgccagcgcctcgaggagtacttccagcacgcctggtcctacaccaacggcatcgacatgaacgcggtgctgaagggcttccctgagtgcctgcaggctgacatctgcctgcacctgaaccgctcactgctgcagcactgcaaacccttccgaggggccaccaagggctgccttcgggccctggccatgaagttcaagaccacacatgcaccgccaggggacacactggtgcatgctggggacctgctcaccgccctgtacttcatctcccggggctccatcgagatcctgcggggcgacgtcgtcgtggccatcctggggaagaatgacatctttggggagcctctgaacctgtatgcaaggcctggcaagtcgaacggggatgtgcgggccctcacctactgtgacctacacaagatccatcgggacgacctgctggaggtgctggacatgtaccctgagttctccgaccacttctggtccagcctggagatcaccttcaacctgcgagataccaacatgatcccgggctcccccggcagtacggagttagagggtggcttcagtcggcaacgcaagcgcaagttgtccttccgcaggcgcacggacaaggacacggagcagccaggggaggtgtcggccttggggccgggccgggcgggggcagggccgagtagccggggccggccgggggggccgtggggggagagcccgtccagtggcccctccagccctgagagcagtgaggatgagggcccaggccgcagctccagccccctccgcctggtgcccttctccagccccaggccccccggagagccgccgggtggggagcccctgatggaggactgcgagaagagcagcgacacttgcaaccccctgtcaggcgccttctcaggagtgtccaacattttcagcttctggggggacagtcggggccgccagtaccaggagctccctcgatgccccgcccccacccccagcctcctcaacatccccctctccagcccgggtcggcggccccggggcgacgtggagagcaggctggatgccctccagcgccagctcaacaggctggagacccggctgagtgcagacatggccactgtcctgcagctgctacagaggcagatgacgctggtcccgcccgcctacagtgctgtgaccaccccggggcctggccccacttccacatccccgctgttgcccgtcagccccctccccaccctcaccttggactcgctttctcaggtttcccagttcatggcgtgtgaggagctgcccccgggggccccagagcttccccaagaaggccccacacgacgcctctccctaccgggccagctgggggccctcacctcccagcccctgcacagacacggctcggacccgggcagttagtggggctgcccagtgtggacacgtggctcacccagggatcaaggcgctgctgggccgctccccttggaggccctgctcaggaggccctgaccgtggaaggggagaggaactcgaaagcacagctcctcccccagcccttgggaccatcttctcctgcagtcccctgggccccagtgagaggggcaggggcagggccggcagtaggtggggcctgtggtccccccactgccctgagggcattagctggtctaactgcccggaggcacccggccctgggccttaggcacctcaaggacttttctgctatttactgctcttattgttaaggataataattaaggatcatatgaataattaatgaagatgctgatgactatgaataataaataattatcctgaggaga

SEQ ID NO: 555 - DNA, 3884 bp, Homo sapiens
  source 1..3884: mol_type = genomic DNA
  misc_feature 1..3884: note = cDNA of KCNH2 gene SNP c.253G>C (p.Ala85Pro)
atgccggtgcggaggggccacgtcgcgccgcagaacaccttcctggacaccatcatccgcaagtttgagggccagagccgtaagttcatcatcgccaacgctcgggtggagaactgcgccgtcatctactgcaacgacggcttctgcgagctgtgcggctactcgcgggccgaggtgatgcagcgaccctgcacctgcgacttcctgcacgggccgcgcacgcagcgccgcgctgccgcgcagatcgcgcagccactgctgggcgccgaggagcgcaaagtggaaatcgccttctaccggaaagatgggagctgcttcctatgtctggtggatgtggtgcccgtgaagaacgaggatggggctgtcatcatgttcatcctcaatttcgaggtggtgatggagaaggacatggtggggtccccggctcatgacaccaaccaccggggcccccccaccagctggctggccccaggccgcgccaagaccttccgcctgaagctgcccgcgctgctggcgctgacggcccgggagtcgtcggtgcggtcgggcggcgcgggcggcgcgggcgccccgggggccgtggtggtggacgtggacctgacgcccgcggcacccagcagcgagtcgctggccctggacgaagtgacagccatggacaaccacgtggcagggctcgggcccgcggaggagcggcgtgcgctggtgggtcccggctctccgccccgcagcgcgcccggccagctcccatcgccccgggcgcacagcctcaaccccgacgcctcgggctccagctgcagcctggcccggacgcgctcccgagaaagctgcgccagcgtgcgccgcgcctcgtcggccgacgacatcgaggccatgcgcgccggggtgctgcccccgccaccgcgccacgccagcaccggggccatgcacccactgcgcagcggcttgctcaactccacctcggactccgacctcgtgcgctaccgcaccattagcaagattccccaaatcaccctcaactttgtggacctcaagggcgaccccttcttggcttcgcccaccagtgaccgtgagatcatagcacctaagataaaggagcgaacccacaatgtcactgagaaggtcacccaggtcctgtccctgggcgccgacgtgctgcctgagtacaagctgcaggcaccgcgcatccaccgctggaccatcctgcattacagccccttcaaggccgtgtgggactggctcatcctgctgctggtcatctacacggctgtcttcacaccctactcggctgccttcctgctgaaggagacggaagaaggcccgcctgctaccgagtgtggctacgcctgccagccgctggctgtggtggacctcatcgtggacatcatgttcattgtggacatcctcatcaacttccgcaccacctacgtcaatgccaacgaggaggtggtcagccaccccggccgcatcgccgtccactacttcaagggctggttcctcatcgacatggtggccgccatccccttcgacctgctcatcttcggctctggctctgaggagctgatcgggctgctgaagactgcgcggctgctgcggctggtgcgcgtggcgcggaagctggatcgctactcagagtacggcgcggccgtgctgttcttgctcatgtgcacctttgcgctcatcgcgcactggctagcctgcatctggtacgccatcggcaacatggagcagccacacatggactcacgcatcggctggctgcacaacctgggcgaccagataggcaaaccctacaacagcagcggcctgggcggcccctccatcaaggacaagtatgtgacggcgctctacttcaccttcagcagcctcaccagtgtgggcttcggcaacgtctctcccaacaccaactcagagaagatcttctccatctgcgtcatgctcattggctccctcatgtatgctagcatcttcggcaacgtgtcggccatcatccagcggctgtactcgggcacagcccgctaccacacacagatgctgcgggtgcgggagttcatccgcttccaccagatccccaatcccctgcgccagcgcctcgaggagtacttccagcacgcctggtcctacaccaacggcatcgacatgaacgcggtgctgaagggcttccctgagtgcctgcaggctgacatctgcctgcacctgaaccgctcactgctgcagcactgcaaacccttccgaggggccaccaagggctgccttcgggccctggccatgaagttcaagaccacacatgcaccgccaggggacacactggtgcatgctggggacctgctcaccgccctgtacttcatctcccggggctccatcgagatcctgcggggcgacgtcgtcgtggccatcctggggaagaatgacatctttggggagcctctgaacctgtatgcaaggcctggcaagtcgaacggggatgtgcgggccctcacctactgtgacctacacaagatccatcgggacgacctgctggaggtgctggacatgtaccctgagttctccgaccacttctggtccagcctggagatcaccttcaacctgcgagataccaacatgatcccgggctcccccggcagtacggagttagagggtggcttcagtcggcaacgcaagcgcaagttgtccttccgcaggcgcacggacaaggacacggagcagccaggggaggtgtcggccttggggccgggccgggcgggggcagggccgagtagccggggccggccgggggggccgtggggggagagcccgtccagtggcccctccagccctgagagcagtgaggatgagggcccaggccgcagctccagccccctccgcctggtgcccttctccagccccaggccccccggagagccgccgggtggggagcccctgatggaggactgcgagaagagcagcgacacttgcaaccccctgtcaggcgccttctcaggagtgtccaacattttcagcttctggggggacagtcggggccgccagtaccaggagctccctcgatgccccgcccccacccccagcctcctcaacatccccctctccagcccgggtcggcggccccggggcgacgtggagagcaggctggatgccctccagcgccagctcaacaggctggagacccggctgagtgcagacatggccactgtcctgcagctgctacagaggcagatgacgctggtcccgcccgcctacagtgctgtgaccaccccggggcctggccccacttccacatccccgctgttgcccgtcagccccctccccaccctcaccttggactcgctttctcaggtttcccagttcatggcgtgtgaggagctgcccccgggggccccagagcttccccaagaaggccccacacgacgcctctccctaccgggccagctgggggccctcacctcccagcccctgcacagacacggctcggacccgggcagttagtggggctgcccagtgtggacacgtggctcacccagggatcaaggcgctgctgggccgctccccttggaggccctgctcaggaggccctgaccgtggaaggggagaggaactcgaaagcacagctcctcccccagcccttgggaccatcttctcctgcagtcccctgggccccagtgagaggggcaggggcagggccggcagtaggtggggcctgtggtccccccactgccctgagggcattagctggtctaactgcccggaggcacccggccctgggccttaggcacctcaaggacttttctgctatttactgctcttattgttaaggataataattaaggatcatatgaataattaatgaagatgctgatgactatgaataataaataattatcctgaggaga

SEQ ID NO: 556 - DNA, 3884 bp, Homo sapiens
  source 1..3884: mol_type = genomic DNA
  misc_feature 1..3884: note = cDNA of KCNH2 gene SNP c.2548G>T (p.Asp850Tyr)
atgccggtgcggaggggccacgtcgcgccgcagaacaccttcctggacaccatcatccgcaagtttgagggccagagccgtaagttcatcatcgccaacgctcgggtggagaactgcgccgtcatctactgcaacgacggcttctgcgagctgtgcggctactcgcgggccgaggtgatgcagcgaccctgcacctgcgacttcctgcacgggccgcgcacgcagcgccgcgctgccgcgcagatcgcgcaggcactgctgggcgccgaggagcgcaaagtggaaatcgccttctaccggaaagatgggagctgcttcctatgtctggtggatgtggtgcccgtgaagaacgaggatggggctgtcatcatgttcatcctcaatttcgaggtggtgatggagaaggacatggtggggtccccggctcatgacaccaaccaccggggcccccccaccagctggctggccccaggccgcgccaagaccttccgcctgaagctgcccgcgctgctggcgctgacggcccgggagtcgtcggtgcggtcgggcggcgcgggcggcgcgggcgccccgggggccgtggtggtggacgtggacctgacgcccgcggcacccagcagcgagtcgctggccctggacgaagtgacagccatggacaaccacgtggcagggctcgggcccgcggaggagcggcgtgcgctggtgggtcccggctctccgccccgcagcgcgcccggccagctcccatcgccccgggcgcacagcctcaaccccgacgcctcgggctccagctgcagcctggcccggacgcgctcccgagaaagctgcgccagcgtgcgccgcgcctcgtcggccgacgacatcgaggccatgcgcgccggggtgctgcccccgccaccgcgccacgccagcaccggggccatgcacccactgcgcagcggcttgctcaactccacctcggactccgacctcgtgcgctaccgcaccattagcaagattccccaaatcaccctcaactttgtggacctcaagggcgaccccttcttggcttcgcccaccagtgaccgtgagatcatagcacctaagataaaggagcgaacccacaatgtcactgagaaggtcacccaggtcctgtccctgggcgccgacgtgctgcctgagtacaagctgcaggcaccgcgcatccaccgctggaccatcctgcattacagccccttcaaggccgtgtgggactggctcatcctgctgctggtcatctacacggctgtcttcacaccctactcggctgccttcctgctgaaggagacggaagaaggcccgcctgctaccgagtgtggctacgcctgccagccgctggctgtggtggacctcatcgtggacatcatgttcattgtggacatcctcatcaacttccgcaccacctacgtcaatgccaacgaggaggtggtcagccaccccggccgcatcgccgtccactacttcaagggctggttcctcatcgacatggtggccgccatccccttcgacctgctcatcttcggctctggctctgaggagctgatcgggctgctgaagactgcgcggctgctgcggctggtgcgcgtggcgcggaagctggatcgctactcagagtacggcgcggccgtgctgttcttgctcatgtgcacctttgcgctcatcgcgcactggctagcctgcatctggtacgccatcggcaacatggagcagccacacatggactcacgcatcggctggctgcacaacctgggcgaccagataggcaaaccctacaacagcagcggcctgggcggcccctccatcaaggacaagtatgtgacggcgctctacttcaccttcagcagcctcaccagtgtgggcttcggcaacgtctctcccaacaccaactcagagaagatcttctccatctgcgtcatgctcattggctccctcatgtatgctagcatcttcggcaacgtgtcggccatcatccagcggctgtactcgggcacagcccgctaccacacacagatgctgcgggtgcgggagttcatccgcttccaccagatccccaatcccctgcgccagcgcctcgaggagtacttccagcacgcctggtcctacaccaacggcatcgacatgaacgcggtgctgaagggcttccctgagtgcctgcaggctgacatctgcctgcacctgaaccgctcactgctgcagcactgcaaacccttccgaggggccaccaagggctgccttcgggccctggccatgaagttcaagaccacacatgcaccgccaggggacacactggtgcatgctggggacctgctcaccgccctgtacttcatctcccggggctccatcgagatcctgcggggcgacgtcgtcgtggccatcctggggaagaatgacatctttggggagcctctgaacctgtatgcaaggcctggcaagtcgaacggggatgtgcgggccctcacctactgtgacctacacaagatccatcgggacgacctgctggaggtgctggacatgtaccctgagttctcctaccacttctggtccagcctggagatcaccttcaacctgcgagataccaacatgatcccgggctcccccggcagtacggagttagagggtggcttcagtcggcaacgcaagcgcaagttgtccttccgcaggcgcacggacaaggacacggagcagccaggggaggtgtcggccttggggccgggccgggcgggggcagggccgagtagccggggccggccgggggggccgtggggggagagcccgtccagtggcccctccagccctgagagcagtgaggatgagggcccaggccgcagctccagccccctccgcctggtgcccttctccagccccaggccccccggagagccgccgggtggggagcccctgatggaggactgcgagaagagcagcgacacttgcaaccccctgtcaggcgccttctcaggagtgtccaacattttcagcttctggggggacagtcggggccgccagtaccaggagctccctcgatgccccgcccccacccccagcctcctcaacatccccctctccagcccgggtcggcggccccggggcgacgtggagagcaggctggatgccctccagcgccagctcaacaggctggagacccggctgagtgcagacatggccactgtcctgcagctgctacagaggcagatgacgctggtcccgcccgcctacagtgctgtgaccaccccggggcctggccccacttccacatccccgctgttgcccgtcagccccctccccaccctcaccttggactcgctttctcaggtttcccagttcatggcgtgtgaggagctgcccccgggggccccagagcttccccaagaaggccccacacgacgcctctccctaccgggccagctgggggccctcacctcccagcccctgcacagacacggctcggacccgggcagttagtggggctgcccagtgtggacacgtggctcacccagggatcaaggcgctgctgggccgctccccttggaggccctgctcaggaggccctgaccgtggaaggggagaggaactcgaaagcacagctcctcccccagcccttgggaccatcttctcctgcagtcccctgggccccagtgagaggggcaggggcagggccggcagtaggtggggcctgtggtccccccactgccctgagggcattagctggtctaactgcccggaggcacccggccctgggccttaggcacctcaaggacttttctgctatttactgctcttattgttaaggataataattaaggatcatatgaataattaatgaagatgctgatgactatgaataataaataattatcctgaggaga

SEQ ID NO: 557 - DNA, 3884 bp, Homo sapiens
  source 1..3884: mol_type = genomic DNA
  misc_feature 1..3884: note = cDNA of KCNH2 gene SNP c.254C>T (p.Ala85Val)
atgccggtgcggaggggccacgtcgcgccgcagaacaccttcctggacaccatcatccgcaagtttgagggccagagccgtaagttcatcatcgccaacgctcgggtggagaactgcgccgtcatctactgcaacgacggcttctgcgagctgtgcggctactcgcgggccgaggtgatgcagcgaccctgcacctgcgacttcctgcacgggccgcgcacgcagcgccgcgctgccgcgcagatcgcgcaggtactgctgggcgccgaggagcgcaaagtggaaatcgccttctaccggaaagatgggagctgcttcctatgtctggtggatgtggtgcccgtgaagaacgaggatggggctgtcatcatgttcatcctcaatttcgaggtggtgatggagaaggacatggtggggtccccggctcatgacaccaaccaccggggcccccccaccagctggctggccccaggccgcgccaagaccttccgcctgaagctgcccgcgctgctggcgctgacggcccgggagtcgtcggtgcggtcgggcggcgcgggcggcgcgggcgccccgggggccgtggtggtggacgtggacctgacgcccgcggcacccagcagcgagtcgctggccctggacgaagtgacagccatggacaaccacgtggcagggctcgggcccgcggaggagcggcgtgcgctggtgggtcccggctctccgccccgcagcgcgcccggccagctcccatcgccccgggcgcacagcctcaaccccgacgcctcgggctccagctgcagcctggcccggacgcgctcccgagaaagctgcgccagcgtgcgccgcgcctcgtcggccgacgacatcgaggccatgcgcgccggggtgctgcccccgccaccgcgccacgccagcaccggggccatgcacccactgcgcagcggcttgctcaactccacctcggactccgacctcgtgcgctaccgcaccattagcaagattccccaaatcaccctcaactttgtggacctcaagggcgaccccttcttggcttcgcccaccagtgaccgtgagatcatagcacctaagataaaggagcgaacccacaatgtcactgagaaggtcacccaggtcctgtccctgggcgccgacgtgctgcctgagtacaagctgcaggcaccgcgcatccaccgctggaccatcctgcattacagccccttcaaggccgtgtgggactggctcatcctgctgctggtcatctacacggctgtcttcacaccctactcggctgccttcctgctgaaggagacggaagaaggcccgcctgctaccgagtgtggctacgcctgccagccgctggctgtggtggacctcatcgtggacatcatgttcattgtggacatcctcatcaacttccgcaccacctacgtcaatgccaacgaggaggtggtcagccaccccggccgcatcgccgtccactacttcaagggctggttcctcatcgacatggtggccgccatccccttcgacctgctcatcttcggctctggctctgaggagctgatcgggctgctgaagactgcgcggctgctgcggctggtgcgcgtggcgcggaagctggatcgctactcagagtacggcgcggccgtgctgttcttgctcatgtgcacctttgcgctcatcgcgcactggctagcctgcatctggtacgccatcggcaacatggagcagccacacatggactcacgcatcggctggctgcacaacctgggcgaccagataggcaaaccctacaacagcagcggcctgggcggcccctccatcaaggacaagtatgtgacggcgctctacttcaccttcagcagcctcaccagtgtgggcttcggcaacgtctctcccaacaccaactcagagaagatcttctccatctgcgtcatgctcattggctccctcatgtatgctagcatcttcggcaacgtgtcggccatcatccagcggctgtactcgggcacagcccgctaccacacacagatgctgcgggtgcgggagttcatccgcttccaccagatccccaatcccctgcgccagcgcctcgaggagtacttccagcacgcctggtcctacaccaacggcatcgacatgaacgcggtgctgaagggcttccctgagtgcctgcaggctgacatctgcctgcacctgaaccgctcactgctgcagcactgcaaacccttccgaggggccaccaagggctgccttcgggccctggccatgaagttcaagaccacacatgcaccgccaggggacacactggtgcatgctggggacctgctcaccgccctgtacttcatctcccggggctccatcgagatcctgcggggcgacgtcgtcgtggccatcctggggaagaatgacatctttggggagcctctgaacctgtatgcaaggcctggcaagtcgaacggggatgtgcgggccctcacctactgtgacctacacaagatccatcgggacgacctgctggaggtgctggacatgtaccctgagttctccgaccacttctggtccagcctggagatcaccttcaacctgcgagataccaacatgatcccgggctcccccggcagtacggagttagagggtggcttcagtcggcaacgcaagcgcaagttgtccttccgcaggcgcacggacaaggacacggagcagccaggggaggtgtcggccttggggccgggccgggcgggggcagggccgagtagccggggccggccgggggggccgtggggggagagcccgtccagtggcccctccagccctgagagcagtgaggatgagggcccaggccgcagctccagccccctccgcctggtgcccttctccagccccaggccccccggagagccgccgggtggggagcccctgatggaggactgcgagaagagcagcgacacttgcaaccccctgtcaggcgccttctcaggagtgtccaacattttcagcttctggggggacagtcggggccgccagtaccaggagctccctcgatgccccgcccccacccccagcctcctcaacatccccctctccagcccgggtcggcggccccggggcgacgtggagagcaggctggatgccctccagcgccagctcaacaggctggagacccggctgagtgcagacatggccactgtcctgcagctgctacagaggcagatgacgctggtcccgcccgcctacagtgctgtgaccaccccggggcctggccccacttccacatccccgctgttgcccgtcagccccctccccaccctcaccttggactcgctttctcaggtttcccagttcatggcgtgtgaggagctgcccccgggggccccagagcttccccaagaaggccccacacgacgcctctccctaccgggccagctgggggccctcacctcccagcccctgcacagacacggctcggacccgggcagttagtggggctgcccagtgtggacacgtggctcacccagggatcaaggcgctgctgggccgctccccttggaggccctgctcaggaggccctgaccgtggaaggggagaggaactcgaaagcacagctcctcccccagcccttgggaccatcttctcctgcagtcccctgggccccagtgagaggggcaggggcagggccggcagtaggtggggcctgtggtccccccactgccctgagggcattagctggtctaactgcccggaggcacccggccctgggccttaggcacctcaaggacttttctgctatttactgctcttattgttaaggataataattaaggatcatatgaataattaatgaagatgctgatgactatgaataataaataattatcctgaggaga

SEQ ID NO: 558 - DNA, 3884 bp, Homo sapiens
  source 1..3884: mol_type = genomic DNA
  misc_feature 1..3884: note = cDNA of KCNH2 gene SNP c.2566C>G (p.Leu856Val)
atgccggtgcggaggggccacgtcgcgccgcagaacaccttcctggacaccatcatccgcaagtttgagggccagagccgtaagttcatcatcgccaacgctcgggtggagaactgcgccgtcatctactgcaacgacggcttctgcgagctgtgcggctactcgcgggccgaggtgatgcagcgaccctgcacctgcgacttcctgcacgggccgcgcacgcagcgccgcgctgccgcgcagatcgcgcaggcactgctgggcgccgaggagcgcaaagtggaaatcgccttctaccggaaagatgggagctgcttcctatgtctggtggatgtggtgcccgtgaagaacgaggatggggctgtcatcatgttcatcctcaatttcgaggtggtgatggagaaggacatggtggggtccccggctcatgacaccaaccaccggggcccccccaccagctggctggccccaggccgcgccaagaccttccgcctgaagctgcccgcgctgctggcgctgacggcccgggagtcgtcggtgcggtcgggcggcgcgggcggcgcgggcgccccgggggccgtggtggtggacgtggacctgacgcccgcggcacccagcagcgagtcgctggccctggacgaagtgacagccatggacaaccacgtggcagggctcgggcccgcggaggagcggcgtgcgctggtgggtcccggctctccgccccgcagcgcgcccggccagctcccatcgccccgggcgcacagcctcaaccccgacgcctcgggctccagctgcagcctggcccggacgcgctcccgagaaagctgcgccagcgtgcgccgcgcctcgtcggccgacgacatcgaggccatgcgcgccggggtgctgcccccgccaccgcgccacgccagcaccggggccatgcacccactgcgcagcggcttgctcaactccacctcggactccgacctcgtgcgctaccgcaccattagcaagattccccaaatcaccctcaactttgtggacctcaagggcgaccccttcttggcttcgcccaccagtgaccgtgagatcatagcacctaagataaaggagcgaacccacaatgtcactgagaaggtcacccaggtcctgtccctgggcgccgacgtgctgcctgagtacaagctgcaggcaccgcgcatccaccgctggaccatcctgcattacagccccttcaaggccgtgtgggactggctcatcctgctgctggtcatctacacggctgtcttcacaccctactcggctgccttcctgctgaaggagacggaagaaggcccgcctgctaccgagtgtggctacgcctgccagccgctggctgtggtggacctcatcgtggacatcatgttcattgtggacatcctcatcaacttccgcaccacctacgtcaatgccaacgaggaggtggtcagccaccccggccgcatcgccgtccactacttcaagggctggttcctcatcgacatggtggccgccatccccttcgacctgctcatcttcggctctggctctgaggagctgatcgggctgctgaagactgcgcggctgctgcggctggtgcgcgtggcgcggaagctggatcgctactcagagtacggcgcggccgtgctgttcttgctcatgtgcacctttgcgctcatcgcgcactggctagcctgcatctggtacgccatcggcaacatggagcagccacacatggactcacgcatcggctggctgcacaacctgggcgaccagataggcaaaccctacaacagcagcggcctgggcggcccctccatcaaggacaagtatgtgacggcgctctacttcaccttcagcagcctcaccagtgtgggcttcggcaacgtctctcccaacaccaactcagagaagatcttctccatctgcgtcatgctcattggctccctcatgtatgctagcatcttcggcaacgtgtcggccatcatccagcggctgtactcgggcacagcccgctaccacacacagatgctgcgggtgcgggagttcatccgcttccaccagatccccaatcccctgcgccagcgcctcgaggagtacttccagcacgcctggtcctacaccaacggcatcgacatgaacgcggtgctgaagggcttccctgagtgcctgcaggctgacatctgcctgcacctgaaccgctcactgctgcagcactgcaaacccttccgaggggccaccaagggctgccttcgggccctggccatgaagttcaagaccacacatgcaccgccaggggacacactggtgcatgctggggacctgctcaccgccctgtacttcatctcccggggctccatcgagatcctgcggggcgacgtcgtcgtggccatcctggggaagaatgacatctttggggagcctctgaacctgtatgcaaggcctggcaagtcgaacggggatgtgcgggccctcacctactgtgacctacacaagatccatcgggacgacctgctggaggtgctggacatgtaccctgagttctccgaccacttctggtccagcgtggagatcaccttcaacctgcgagataccaacatgatcccgggctcccccggcagtacggagttagagggtggcttcagtcggcaacgcaagcgcaagttgtccttccgcaggcgcacggacaaggacacggagcagccaggggaggtgtcggccttggggccgggccgggcgggggcagggccgagtagccggggccggccgggggggccgtggggggagagcccgtccagtggcccctccagccctgagagcagtgaggatgagggcccaggccgcagctccagccccctccgcctggtgcccttctccagccccaggccccccggagagccgccgggtggggagcccctgatggaggactgcgagaagagcagcgacacttgcaaccccctgtcaggcgccttctcaggagtgtccaacattttcagcttctggggggacagtcggggccgccagtaccaggagctccctcgatgccccgcccccacccccagcctcctcaacatccccctctccagcccgggtcggcggccccggggcgacgtggagagcaggctggatgccctccagcgccagctcaacaggctggagacccggctgagtgcagacatggccactgtcctgcagctgctacagaggcagatgacgctggtcccgcccgcctacagtgctgtgaccaccccggggcctggccccacttccacatccccgctgttgcccgtcagccccctccccaccctcaccttggactcgctttctcaggtttcccagttcatggcgtgtgaggagctgcccccgggggccccagagcttccccaagaaggccccacacgacgcctctccctaccgggccagctgggggccctcacctcccagcccctgcacagacacggctcggacccgggcagttagtggggctgcccagtgtggacacgtggctcacccagggatcaaggcgctgctgggccgctccccttggaggccctgctcaggaggccctgaccgtggaaggggagaggaactcgaaagcacagctcctcccccagcccttgggaccatcttctcctgcagtcccctgggccccagtgagaggggcaggggcagggccggcagtaggtggggcctgtggtccccccactgccctgagggcattagctggtctaactgcccggaggcacccggccctgggccttaggcacctcaaggacttttctgctatttactgctcttattgttaaggataataattaaggatcatatgaataattaatgaagatgctgatgactatgaataataaataattatcctgaggaga

SEQ ID NO: 559 - DNA, 3884 bp, Homo sapiens
  source 1..3884: mol_type = genomic DNA
  misc_feature 1..3884: note = cDNA of KCNH2 gene SNP c.2573T>C (p.Ile858Thr)
atgccggtgcggaggggccacgtcgcgccgcagaacaccttcctggacaccatcatccgcaagtttgagggccagagccgtaagttcatcatcgccaacgctcgggtggagaactgcgccgtcatctactgcaacgacggcttctgcgagctgtgcggctactcgcgggccgaggtgatgcagcgaccctgcacctgcgacttcctgcacgggccgcgcacgcagcgccgcgctgccgcgcagatcgcgcaggcactgctgggcgccgaggagcgcaaagtggaaatcgccttctaccggaaagatgggagctgcttcctatgtctggtggatgtggtgcccgtgaagaacgaggatggggctgtcatcatgttcatcctcaatttcgaggtggtgatggagaaggacatggtggggtccccggctcatgacaccaaccaccggggcccccccaccagctggctggccccaggccgcgccaagaccttccgcctgaagctgcccgcgctgctggcgctgacggcccgggagtcgtcggtgcggtcgggcggcgcgggcggcgcgggcgccccgggggccgtggtggtggacgtggacctgacgcccgcggcacccagcagcgagtcgctggccctggacgaagtgacagccatggacaaccacgtggcagggctcgggcccgcggaggagcggcgtgcgctggtgggtcccggctctccgccccgcagcgcgcccggccagctcccatcgccccgggcgcacagcctcaaccccgacgcctcgggctccagctgcagcctggcccggacgcgctcccgagaaagctgcgccagcgtgcgccgcgcctcgtcggccgacgacatcgaggccatgcgcgccggggtgctgcccccgccaccgcgccacgccagcaccggggccatgcacccactgcgcagcggcttgctcaactccacctcggactccgacctcgtgcgctaccgcaccattagcaagattccccaaatcaccctcaactttgtggacctcaagggcgaccccttcttggcttcgcccaccagtgaccgtgagatcatagcacctaagataaaggagcgaacccacaatgtcactgagaaggtcacccaggtcctgtccctgggcgccgacgtgctgcctgagtacaagctgcaggcaccgcgcatccaccgctggaccatcctgcattacagccccttcaaggccgtgtgggactggctcatcctgctgctggtcatctacacggctgtcttcacaccctactcggctgccttcctgctgaaggagacggaagaaggcccgcctgctaccgagtgtggctacgcctgccagccgctggctgtggtggacctcatcgtggacatcatgttcattgtggacatcctcatcaacttccgcaccacctacgtcaatgccaacgaggaggtggtcagccaccccggccgcatcgccgtccactacttcaagggctggttcctcatcgacatggtggccgccatccccttcgacctgctcatcttcggctctggctctgaggagctgatcgggctgctgaagactgcgcggctgctgcggctggtgcgcgtggcgcggaagctggatcgctactcagagtacggcgcggccgtgctgttcttgctcatgtgcacctttgcgctcatcgcgcactggctagcctgcatctggtacgccatcggcaacatggagcagccacacatggactcacgcatcggctggctgcacaacctgggcgaccagataggcaaaccctacaacagcagcggcctgggcggcccctccatcaaggacaagtatgtgacggcgctctacttcaccttcagcagcctcaccagtgtgggcttcggcaacgtctctcccaacaccaactcagagaagatcttctccatctgcgtcatgctcattggctccctcatgtatgctagcatcttcggcaacgtgtcggccatcatccagcggctgtactcgggcacagcccgctaccacacacagatgctgcgggtgcgggagttcatccgcttccaccagatccccaatcccctgcgccagcgcctcgaggagtacttccagcacgcctggtcctacaccaacggcatcgacatgaacgcggtgctgaagggcttccctgagtgcctgcaggctgacatctgcctgcacctgaaccgctcactgctgcagcactgcaaacccttccgaggggccaccaagggctgccttcgggccctggccatgaagttcaagaccacacatgcaccgccaggggacacactggtgcatgctggggacctgctcaccgccctgtacttcatctcccggggctccatcgagatcctgcggggcgacgtcgtcgtggccatcctggggaagaatgacatctttggggagcctctgaacctgtatgcaaggcctggcaagtcgaacggggatgtgcgggccctcacctactgtgacctacacaagatccatcgggacgacctgctggaggtgctggacatgtaccctgagttctccgaccacttctggtccagcctggagaccaccttcaacctgcgagataccaacatgatcccgggctcccccggcagtacggagttagagggtggcttcagtcggcaacgcaagcgcaagttgtccttccgcaggcgcacggacaaggacacggagcagccaggggaggtgtcggccttggggccgggccgggcgggggcagggccgagtagccggggccggccgggggggccgtggggggagagcccgtccagtggcccctccagccctgagagcagtgaggatgagggcccaggccgcagctccagccccctccgcctggtgcccttctccagccccaggccccccggagagccgccgggtggggagcccctgatggaggactgcgagaagagcagcgacacttgcaaccccctgtcaggcgccttctcaggagtgtccaacattttcagcttctggggggacagtcggggccgccagtaccaggagctccctcgatgccccgcccccacccccagcctcctcaacatccccctctccagcccgggtcggcggccccggggcgacgtggagagcaggctggatgccctccagcgccagctcaacaggctggagacccggctgagtgcagacatggccactgtcctgcagctgctacagaggcagatgacgctggtcccgcccgcctacagtgctgtgaccaccccggggcctggccccacttccacatccccgctgttgcccgtcagccccctccccaccctcaccttggactcgctttctcaggtttcccagttcatggcgtgtgaggagctgcccccgggggccccagagcttccccaagaaggccccacacgacgcctctccctaccgggccagctgggggccctcacctcccagcccctgcacagacacggctcggacccgggcagttagtggggctgcccagtgtggacacgtggctcacccagggatcaaggcgctgctgggccgctccccttggaggccctgctcaggaggccctgaccgtggaaggggagaggaactcgaaagcacagctcctcccccagcccttgggaccatcttctcctgcagtcccctgggccccagtgagaggggcaggggcagggccggcagtaggtggggcctgtggtccccccactgccctgagggcattagctggtctaactgcccggaggcacccggccctgggccttaggcacctcaaggacttttctgctatttactgctcttattgttaaggataataattaaggatcatatgaataattaatgaagatgctgatgactatgaataataaataattatcctgaggaga

SEQ ID NO: 560 - DNA, 3884 bp, Homo sapiens
  source 1..3884: mol_type = genomic DNA
  misc_feature 1..3884: note = cDNA of KCNH2 gene SNP c.2576C>T (p.Thr859Ile)
atgccggtgcggaggggccacgtcgcgccgcagaacaccttcctggacaccatcatccgcaagtttgagggccagagccgtaagttcatcatcgccaacgctcgggtggagaactgcgccgtcatctactgcaacgacggcttctgcgagctgtgcggctactcgcgggccgaggtgatgcagcgaccctgcacctgcgacttcctgcacgggccgcgcacgcagcgccgcgctgccgcgcagatcgcgcaggcactgctgggcgccgaggagcgcaaagtggaaatcgccttctaccggaaagatgggagctgcttcctatgtctggtggatgtggtgcccgtgaagaacgaggatggggctgtcatcatgttcatcctcaatttcgaggtggtgatggagaaggacatggtggggtccccggctcatgacaccaaccaccggggcccccccaccagctggctggccccaggccgcgccaagaccttccgcctgaagctgcccgcgctgctggcgctgacggcccgggagtcgtcggtgcggtcgggcggcgcgggcggcgcgggcgccccgggggccgtggtggtggacgtggacctgacgcccgcggcacccagcagcgagtcgctggccctggacgaagtgacagccatggacaaccacgtggcagggctcgggcccgcggaggagcggcgtgcgctggtgggtcccggctctccgccccgcagcgcgcccggccagctcccatcgccccgggcgcacagcctcaaccccgacgcctcgggctccagctgcagcctggcccggacgcgctcccgagaaagctgcgccagcgtgcgccgcgcctcgtcggccgacgacatcgaggccatgcgcgccggggtgctgcccccgccaccgcgccacgccagcaccggggccatgcacccactgcgcagcggcttgctcaactccacctcggactccgacctcgtgcgctaccgcaccattagcaagattccccaaatcaccctcaactttgtggacctcaagggcgaccccttcttggcttcgcccaccagtgaccgtgagatcatagcacctaagataaaggagcgaacccacaatgtcactgagaaggtcacccaggtcctgtccctgggcgccgacgtgctgcctgagtacaagctgcaggcaccgcgcatccaccgctggaccatcctgcattacagccccttcaaggccgtgtgggactggctcatcctgctgctggtcatctacacggctgtcttcacaccctactcggctgccttcctgctgaaggagacggaagaaggcccgcctgctaccgagtgtggctacgcctgccagccgctggctgtggtggacctcatcgtggacatcatgttcattgtggacatcctcatcaacttccgcaccacctacgtcaatgccaacgaggaggtggtcagccaccccggccgcatcgccgtccactacttcaagggctggttcctcatcgacatggtggccgccatccccttcgacctgctcatcttcggctctggctctgaggagctgatcgggctgctgaagactgcgcggctgctgcggctggtgcgcgtggcgcggaagctggatcgctactcagagtacggcgcggccgtgctgttcttgctcatgtgcacctttgcgctcatcgcgcactggctagcctgcatctggtacgccatcggcaacatggagcagccacacatggactcacgcatcggctggctgcacaacctgggcgaccagataggcaaaccctacaacagcagcggcctgggcggcccctccatcaaggacaagtatgtgacggcgctctacttcaccttcagcagcctcaccagtgtgggcttcggcaacgtctctcccaacaccaactcagagaagatcttctccatctgcgtcatgctcattggctccctcatgtatgctagcatcttcggcaacgtgtcggccatcatccagcggctgtactcgggcacagcccgctaccacacacagatgctgcgggtgcgggagttcatccgcttccaccagatccccaatcccctgcgccagcgcctcgaggagtacttccagcacgcctggtcctacaccaacggcatcgacatgaacgcggtgctgaagggcttccctgagtgcctgcaggctgacatctgcctgcacctgaaccgctcactgctgcagcactgcaaacccttccgaggggccaccaagggctgccttcgggccctggccatgaagttcaagaccacacatgcaccgccaggggacacactggtgcatgctggggacctgctcaccgccctgtacttcatctcccggggctccatcgagatcctgcggggcgacgtcgtcgtggccatcctggggaagaatgacatctttggggagcctctgaacctgtatgcaaggcctggcaagtcgaacggggatgtgcgggccctcacctactgtgacctacacaagatccatcgggacgacctgctggaggtgctggacatgtaccctgagttctccgaccacttctggtccagcctggagatcatcttcaacctgcgagataccaacatgatcccgggctcccccggcagtacggagttagagggtggcttcagtcggcaacgcaagcgcaagttgtccttccgcaggcgcacggacaaggacacggagcagccaggggaggtgtcggccttggggccgggccgggcgggggcagggccgagtagccggggccggccgggggggccgtggggggagagcccgtccagtggcccctccagccctgagagcagtgaggatgagggcccaggccgcagctccagccccctccgcctggtgcccttctccagccccaggccccccggagagccgccgggtggggagcccctgatggaggactgcgagaagagcagcgacacttgcaaccccctgtcaggcgccttctcaggagtgtccaacattttcagcttctggggggacagtcggggccgccagtaccaggagctccctcgatgccccgcccccacccccagcctcctcaacatccccctctccagcccgggtcggcggccccggggcgacgtggagagcaggctggatgccctccagcgccagctcaacaggctggagacccggctgagtgcagacatggccactgtcctgcagctgctacagaggcagatgacgctggtcccgcccgcctacagtgctgtgaccaccccggggcctggccccacttccacatccccgctgttgcccgtcagccccctccccaccctcaccttggactcgctttctcaggtttcccagttcatggcgtgtgaggagctgcccccgggggccccagagcttccccaagaaggccccacacgacgcctctccctaccgggccagctgggggccctcacctcccagcccctgcacagacacggctcggacccgggcagttagtggggctgcccagtgtggacacgtggctcacccagggatcaaggcgctgctgggccgctccccttggaggccctgctcaggaggccctgaccgtggaaggggagaggaactcgaaagcacagctcctcccccagcccttgggaccatcttctcctgcagtcccctgggccccagtgagaggggcaggggcagggccggcagtaggtggggcctgtggtccccccactgccctgagggcattagctggtctaactgcccggaggcacccggccctgggccttaggcacctcaaggacttttctgctatttactgctcttattgttaaggataataattaaggatcatatgaataattaatgaagatgctgatgactatgaataataaataattatcctgaggaga

SEQ ID NO: 561 - DNA, 3884 bp, Homo sapiens
  source 1..3884: mol_type = genomic DNA
  misc_feature 1..3884: note = cDNA of KCNH2 gene SNP c.257T>C (p.Leu86Pro)
atgccggtgcggaggggccacgtcgcgccgcagaacaccttcctggacaccatcatccgcaagtttgagggccagagccgtaagttcatcatcgccaacgctcgggtggagaactgcgccgtcatctactgcaacgacggcttctgcgagctgtgcggctactcgcgggccgaggtgatgcagcgaccctgcacctgcgacttcctgcacgggccgcgcacgcagcgccgcgctgccgcgcagatcgcgcaggcaccgctgggcgccgaggagcgcaaagtggaaatcgccttctaccggaaagatgggagctgcttcctatgtctggtggatgtggtgcccgtgaagaacgaggatggggctgtcatcatgttcatcctcaatttcgaggtggtgatggagaaggacatggtggggtccccggctcatgacaccaaccaccggggcccccccaccagctggctggccccaggccgcgccaagaccttccgcctgaagctgcccgcgctgctggcgctgacggcccgggagtcgtcggtgcggtcgggcggcgcgggcggcgcgggcgccccgggggccgtggtggtggacgtggacctgacgcccgcggcacccagcagcgagtcgctggccctggacgaagtgacagccatggacaaccacgtggcagggctcgggcccgcggaggagcggcgtgcgctggtgggtcccggctctccgccccgcagcgcgcccggccagctcccatcgccccgggcgcacagcctcaaccccgacgcctcgggctccagctgcagcctggcccggacgcgctcccgagaaagctgcgccagcgtgcgccgcgcctcgtcggccgacgacatcgaggccatgcgcgccggggtgctgcccccgccaccgcgccacgccagcaccggggccatgcacccactgcgcagcggcttgctcaactccacctcggactccgacctcgtgcgctaccgcaccattagcaagattccccaaatcaccctcaactttgtggacctcaagggcgaccccttcttggcttcgcccaccagtgaccgtgagatcatagcacctaagataaaggagcgaacccacaatgtcactgagaaggtcacccaggtcctgtccctgggcgccgacgtgctgcctgagtacaagctgcaggcaccgcgcatccaccgctggaccatcctgcattacagccccttcaaggccgtgtgggactggctcatcctgctgctggtcatctacacggctgtcttcacaccctactcggctgccttcctgctgaaggagacggaagaaggcccgcctgctaccgagtgtggctacgcctgccagccgctggctgtggtggacctcatcgtggacatcatgttcattgtggacatcctcatcaacttccgcaccacctacgtcaatgccaacgaggaggtggtcagccaccccggccgcatcgccgtccactacttcaagggctggttcctcatcgacatggtggccgccatccccttcgacctgctcatcttcggctctggctctgaggagctgatcgggctgctgaagactgcgcggctgctgcggctggtgcgcgtggcgcggaagctggatcgctactcagagtacggcgcggccgtgctgttcttgctcatgtgcacctttgcgctcatcgcgcactggctagcctgcatctggtacgccatcggcaacatggagcagccacacatggactcacgcatcggctggctgcacaacctgggcgaccagataggcaaaccctacaacagcagcggcctgggcggcccctccatcaaggacaagtatgtgacggcgctctacttcaccttcagcagcctcaccagtgtgggcttcggcaacgtctctcccaacaccaactcagagaagatcttctccatctgcgtcatgctcattggctccctcatgtatgctagcatcttcggcaacgtgtcggccatcatccagcggctgtactcgggcacagcccgctaccacacacagatgctgcgggtgcgggagttcatccgcttccaccagatccccaatcccctgcgccagcgcctcgaggagtacttccagcacgcctggtcctacaccaacggcatcgacatgaacgcggtgctgaagggcttccctgagtgcctgcaggctgacatctgcctgcacctgaaccgctcactgctgcagcactgcaaacccttccgaggggccaccaagggctgccttcgggccctggccatgaagttcaagaccacacatgcaccgccaggggacacactggtgcatgctggggacctgctcaccgccctgtacttcatctcccggggctccatcgagatcctgcggggcgacgtcgtcgtggccatcctggggaagaatgacatctttggggagcctctgaacctgtatgcaaggcctggcaagtcgaacggggatgtgcgggccctcacctactgtgacctacacaagatccatcgggacgacctgctggaggtgctggacatgtaccctgagttctccgaccacttctggtccagcctggagatcaccttcaacctgcgagataccaacatgatcccgggctcccccggcagtacggagttagagggtggcttcagtcggcaacgcaagcgcaagttgtccttccgcaggcgcacggacaaggacacggagcagccaggggaggtgtcggccttggggccgggccgggcgggggcagggccgagtagccggggccggccgggggggccgtggggggagagcccgtccagtggcccctccagccctgagagcagtgaggatgagggcccaggccgcagctccagccccctccgcctggtgcccttctccagccccaggccccccggagagccgccgggtggggagcccctgatggaggactgcgagaagagcagcgacacttgcaaccccctgtcaggcgccttctcaggagtgtccaacattttcagcttctggggggacagtcggggccgccagtaccaggagctccctcgatgccccgcccccacccccagcctcctcaacatccccctctccagcccgggtcggcggccccggggcgacgtggagagcaggctggatgccctccagcgccagctcaacaggctggagacccggctgagtgcagacatggccactgtcctgcagctgctacagaggcagatgacgctggtcccgcccgcctacagtgctgtgaccaccccggggcctggccccacttccacatccccgctgttgcccgtcagccccctccccaccctcaccttggactcgctttctcaggtttcccagttcatggcgtgtgaggagctgcccccgggggccccagagcttccccaagaaggccccacacgacgcctctccctaccgggccagctgggggccctcacctcccagcccctgcacagacacggctcggacccgggcagttagtggggctgcccagtgtggacacgtggctcacccagggatcaaggcgctgctgggccgctccccttggaggccctgctcaggaggccctgaccgtggaaggggagaggaactcgaaagcacagctcctcccccagcccttgggaccatcttctcctgcagtcccctgggccccagtgagaggggcaggggcagggccggcagtaggtggggcctgtggtccccccactgccctgagggcattagctggtctaactgcccggaggcacccggccctgggccttaggcacctcaaggacttttctgctatttactgctcttattgttaaggataataattaaggatcatatgaataattaatgaagatgctgatgactatgaataataaataattatcctgaggaga

SEQ ID NO: 562 - DNA, 3884 bp, Homo sapiens
  source 1..3884: mol_type = genomic DNA
  misc_feature 1..3884: note = cDNA of KCNH2 gene SNP c.257T>G (p.Leu86Arg)
atgccggtgcggaggggccacgtcgcgccgcagaacaccttcctggacaccatcatccgcaagtttgagggccagagccgtaagttcatcatcgccaacgctcgggtggagaactgcgccgtcatctactgcaacgacggcttctgcgagctgtgcggctactcgcgggccgaggtgatgcagcgaccctgcacctgcgacttcctgcacgggccgcgcacgcagcgccgcgctgccgcgcagatcgcgcaggcacggctgggcgccgaggagcgcaaagtggaaatcgccttctaccggaaagatgggagctgcttcctatgtctggtggatgtggtgcccgtgaagaacgaggatggggctgtcatcatgttcatcctcaatttcgaggtggtgatggagaaggacatggtggggtccccggctcatgacaccaaccaccggggcccccccaccagctggctggccccaggccgcgccaagaccttccgcctgaagctgcccgcgctgctggcgctgacggcccgggagtcgtcggtgcggtcgggcggcgcgggcggcgcgggcgccccgggggccgtggtggtggacgtggacctgacgcccgcggcacccagcagcgagtcgctggccctggacgaagtgacagccatggacaaccacgtggcagggctcgggcccgcggaggagcggcgtgcgctggtgggtcccggctctccgccccgcagcgcgcccggccagctcccatcgccccgggcgcacagcctcaaccccgacgcctcgggctccagctgcagcctggcccggacgcgctcccgagaaagctgcgccagcgtgcgccgcgcctcgtcggccgacgacatcgaggccatgcgcgccggggtgctgcccccgccaccgcgccacgccagcaccggggccatgcacccactgcgcagcggcttgctcaactccacctcggactccgacctcgtgcgctaccgcaccattagcaagattccccaaatcaccctcaactttgtggacctcaagggcgaccccttcttggcttcgcccaccagtgaccgtgagatcatagcacctaagataaaggagcgaacccacaatgtcactgagaaggtcacccaggtcctgtccctgggcgccgacgtgctgcctgagtacaagctgcaggcaccgcgcatccaccgctggaccatcctgcattacagccccttcaaggccgtgtgggactggctcatcctgctgctggtcatctacacggctgtcttcacaccctactcggctgccttcctgctgaaggagacggaagaaggcccgcctgctaccgagtgtggctacgcctgccagccgctggctgtggtggacctcatcgtggacatcatgttcattgtggacatcctcatcaacttccgcaccacctacgtcaatgccaacgaggaggtggtcagccaccccggccgcatcgccgtccactacttcaagggctggttcctcatcgacatggtggccgccatccccttcgacctgctcatcttcggctctggctctgaggagctgatcgggctgctgaagactgcgcggctgctgcggctggtgcgcgtggcgcggaagctggatcgctactcagagtacggcgcggccgtgctgttcttgctcatgtgcacctttgcgctcatcgcgcactggctagcctgcatctggtacgccatcggcaacatggagcagccacacatggactcacgcatcggctggctgcacaacctgggcgaccagataggcaaaccctacaacagcagcggcctgggcggcccctccatcaaggacaagtatgtgacggcgctctacttcaccttcagcagcctcaccagtgtgggcttcggcaacgtctctcccaacaccaactcagagaagatcttctccatctgcgtcatgctcattggctccctcatgtatgctagcatcttcggcaacgtgtcggccatcatccagcggctgtactcgggcacagcccgctaccacacacagatgctgcgggtgcgggagttcatccgcttccaccagatccccaatcccctgcgccagcgcctcgaggagtacttccagcacgcctggtcctacaccaacggcatcgacatgaacgcggtgctgaagggcttccctgagtgcctgcaggctgacatctgcctgcacctgaaccgctcactgctgcagcactgcaaacccttccgaggggccaccaagggctgccttcgggccctggccatgaagttcaagaccacacatgcaccgccaggggacacactggtgcatgctggggacctgctcaccgccctgtacttcatctcccggggctccatcgagatcctgcggggcgacgtcgtcgtggccatcctggggaagaatgacatctttggggagcctctgaacctgtatgcaaggcctggcaagtcgaacggggatgtgcgggccctcacctactgtgacctacacaagatccatcgggacgacctgctggaggtgctggacatgtaccctgagttctccgaccacttctggtccagcctggagatcaccttcaacctgcgagataccaacatgatcccgggctcccccggcagtacggagttagagggtggcttcagtcggcaacgcaagcgcaagttgtccttccgcaggcgcacggacaaggacacggagcagccaggggaggtgtcggccttggggccgggccgggcgggggcagggccgagtagccggggccggccgggggggccgtggggggagagcccgtccagtggcccctccagccctgagagcagtgaggatgagggcccaggccgcagctccagccccctccgcctggtgcccttctccagccccaggccccccggagagccgccgggtggggagcccctgatggaggactgcgagaagagcagcgacacttgcaaccccctgtcaggcgccttctcaggagtgtccaacattttcagcttctggggggacagtcggggccgccagtaccaggagctccctcgatgccccgcccccacccccagcctcctcaacatccccctctccagcccgggtcggcggccccggggcgacgtggagagcaggctggatgccctccagcgccagctcaacaggctggagacccggctgagtgcagacatggccactgtcctgcagctgctacagaggcagatgacgctggtcccgcccgcctacagtgctgtgaccaccccggggcctggccccacttccacatccccgctgttgcccgtcagccccctccccaccctcaccttggactcgctttctcaggtttcccagttcatggcgtgtgaggagctgcccccgggggccccagagcttccccaagaaggccccacacgacgcctctccctaccgggccagctgggggccctcacctcccagcccctgcacagacacggctcggacccgggcagttagtggggctgcccagtgtggacacgtggctcacccagggatcaaggcgctgctgggccgctccccttggaggccctgctcaggaggccctgaccgtggaaggggagaggaactcgaaagcacagctcctcccccagcccttgggaccatcttctcctgcagtcccctgggccccagtgagaggggcaggggcagggccggcagtaggtggggcctgtggtccccccactgccctgagggcattagctggtctaactgcccggaggcacccggccctgggccttaggcacctcaaggacttttctgctatttactgctcttattgttaaggataataattaaggatcatatgaataattaatgaagatgctgatgactatgaataataaataattatcctgaggaga

SEQ ID NO: 563 - DNA, 3884 bp, Homo sapiens
  source 1..3884: mol_type = genomic DNA
  misc_feature 1..3884: note = cDNA of KCNH2 gene SNP c.2581A>C (p.Asn861His)
atgccggtgcggaggggccacgtcgcgccgcagaacaccttcctggacaccatcatccgcaagtttgagggccagagccgtaagttcatcatcgccaacgctcgggtggagaactgcgccgtcatctactgcaacgacggcttctgcgagctgtgcggctactcgcgggccgaggtgatgcagcgaccctgcacctgcgacttcctgcacgggccgcgcacgcagcgccgcgctgccgcgcagatcgcgcaggcactgctgggcgccgaggagcgcaaagtggaaatcgccttctaccggaaagatgggagctgcttcctatgtctggtggatgtggtgcccgtgaagaacgaggatggggctgtcatcatgttcatcctcaatttcgaggtggtgatggagaaggacatggtggggtccccggctcatgacaccaaccaccggggcccccccaccagctggctggccccaggccgcgccaagaccttccgcctgaagctgcccgcgctgctggcgctgacggcccgggagtcgtcggtgcggtcgggcggcgcgggcggcgcgggcgccccgggggccgtggtggtggacgtggacctgacgcccgcggcacccagcagcgagtcgctggccctggacgaagtgacagccatggacaaccacgtggcagggctcgggcccgcggaggagcggcgtgcgctggtgggtcccggctctccgccccgcagcgcgcccggccagctcccatcgccccgggcgcacagcctcaaccccgacgcctcgggctccagctgcagcctggcccggacgcgctcccgagaaagctgcgccagcgtgcgccgcgcctcgtcggccgacgacatcgaggccatgcgcgccggggtgctgcccccgccaccgcgccacgccagcaccggggccatgcacccactgcgcagcggcttgctcaactccacctcggactccgacctcgtgcgctaccgcaccattagcaagattccccaaatcaccctcaactttgtggacctcaagggcgaccccttcttggcttcgcccaccagtgaccgtgagatcatagcacctaagataaaggagcgaacccacaatgtcactgagaaggtcacccaggtcctgtccctgggcgccgacgtgctgcctgagtacaagctgcaggcaccgcgcatccaccgctggaccatcctgcattacagccccttcaaggccgtgtgggactggctcatcctgctgctggtcatctacacggctgtcttcacaccctactcggctgccttcctgctgaaggagacggaagaaggcccgcctgctaccgagtgtggctacgcctgccagccgctggctgtggtggacctcatcgtggacatcatgttcattgtggacatcctcatcaacttccgcaccacctacgtcaatgccaacgaggaggtggtcagccaccccggccgcatcgccgtccactacttcaagggctggttcctcatcgacatggtggccgccatccccttcgacctgctcatcttcggctctggctctgaggagctgatcgggctgctgaagactgcgcggctgctgcggctggtgcgcgtggcgcggaagctggatcgctactcagagtacggcgcggccgtgctgttcttgctcatgtgcacctttgcgctcatcgcgcactggctagcctgcatctggtacgccatcggcaacatggagcagccacacatggactcacgcatcggctggctgcacaacctgggcgaccagataggcaaaccctacaacagcagcggcctgggcggcccctccatcaaggacaagtatgtgacggcgctctacttcaccttcagcagcctcaccagtgtgggcttcggcaacgtctctcccaacaccaactcagagaagatcttctccatctgcgtcatgctcattggctccctcatgtatgctagcatcttcggcaacgtgtcggccatcatccagcggctgtactcgggcacagcccgctaccacacacagatgctgcgggtgcgggagttcatccgcttccaccagatccccaatcccctgcgccagcgcctcgaggagtacttccagcacgcctggtcctacaccaacggcatcgacatgaacgcggtgctgaagggcttccctgagtgcctgcaggctgacatctgcctgcacctgaaccgctcactgctgcagcactgcaaacccttccgaggggccaccaagggctgccttcgggccctggccatgaagttcaagaccacacatgcaccgccaggggacacactggtgcatgctggggacctgctcaccgccctgtacttcatctcccggggctccatcgagatcctgcggggcgacgtcgtcgtggccatcctggggaagaatgacatctttggggagcctctgaacctgtatgcaaggcctggcaagtcgaacggggatgtgcgggccctcacctactgtgacctacacaagatccatcgggacgacctgctggaggtgctggacatgtaccctgagttctccgaccacttctggtccagcctggagatcaccttccacctgcgagataccaacatgatcccgggctcccccggcagtacggagttagagggtggcttcagtcggcaacgcaagcgcaagttgtccttccgcaggcgcacggacaaggacacggagcagccaggggaggtgtcggccttggggccgggccgggcgggggcagggccgagtagccggggccggccgggggggccgtggggggagagcccgtccagtggcccctccagccctgagagcagtgaggatgagggcccaggccgcagctccagccccctccgcctggtgcccttctccagccccaggccccccggagagccgccgggtggggagcccctgatggaggactgcgagaagagcagcgacacttgcaaccccctgtcaggcgccttctcaggagtgtccaacattttcagcttctggggggacagtcggggccgccagtaccaggagctccctcgatgccccgcccccacccccagcctcctcaacatccccctctccagcccgggtcggcggccccggggcgacgtggagagcaggctggatgccctccagcgccagctcaacaggctggagacccggctgagtgcagacatggccactgtcctgcagctgctacagaggcagatgacgctggtcccgcccgcctacagtgctgtgaccaccccggggcctggccccacttccacatccccgctgttgcccgtcagccccctccccaccctcaccttggactcgctttctcaggtttcccagttcatggcgtgtgaggagctgcccccgggggccccagagcttccccaagaaggccccacacgacgcctctccctaccgggccagctgggggccctcacctcccagcccctgcacagacacggctcggacccgggcagttagtggggctgcccagtgtggacacgtggctcacccagggatcaaggcgctgctgggccgctccccttggaggccctgctcaggaggccctgaccgtggaaggggagaggaactcgaaagcacagctcctcccccagcccttgggaccatcttctcctgcagtcccctgggccccagtgagaggggcaggggcagggccggcagtaggtggggcctgtggtccccccactgccctgagggcattagctggtctaactgcccggaggcacccggccctgggccttaggcacctcaaggacttttctgctatttactgctcttattgttaaggataataattaaggatcatatgaataattaatgaagatgctgatgactatgaataataaataattatcctgaggaga

SEQ ID NO: 564 - DNA, 3884 bp, Homo sapiens
  source 1..3884: mol_type = genomic DNA
  misc_feature 1..3884: note = cDNA of KCNH2 gene SNP c.2582A>C (p.Asn861Thr)
atgccggtgcggaggggccacgtcgcgccgcagaacaccttcctggacaccatcatccgcaagtttgagggccagagccgtaagttcatcatcgccaacgctcgggtggagaactgcgccgtcatctactgcaacgacggcttctgcgagctgtgcggctactcgcgggccgaggtgatgcagcgaccctgcacctgcgacttcctgcacgggccgcgcacgcagcgccgcgctgccgcgcagatcgcgcaggcactgctgggcgccgaggagcgcaaagtggaaatcgccttctaccggaaagatgggagctgcttcctatgtctggtggatgtggtgcccgtgaagaacgaggatggggctgtcatcatgttcatcctcaatttcgaggtggtgatggagaaggacatggtggggtccccggctcatgacaccaaccaccggggcccccccaccagctggctggccccaggccgcgccaagaccttccgcctgaagctgcccgcgctgctggcgctgacggcccgggagtcgtcggtgcggtcgggcggcgcgggcggcgcgggcgccccgggggccgtggtggtggacgtggacctgacgcccgcggcacccagcagcgagtcgctggccctggacgaagtgacagccatggacaaccacgtggcagggctcgggcccgcggaggagcggcgtgcgctggtgggtcccggctctccgccccgcagcgcgcccggccagctcccatcgccccgggcgcacagcctcaaccccgacgcctcgggctccagctgcagcctggcccggacgcgctcccgagaaagctgcgccagcgtgcgccgcgcctcgtcggccgacgacatcgaggccatgcgcgccggggtgctgcccccgccaccgcgccacgccagcaccggggccatgcacccactgcgcagcggcttgctcaactccacctcggactccgacctcgtgcgctaccgcaccattagcaagattccccaaatcaccctcaactttgtggacctcaagggcgaccccttcttggcttcgcccaccagtgaccgtgagatcatagcacctaagataaaggagcgaacccacaatgtcactgagaaggtcacccaggtcctgtccctgggcgccgacgtgctgcctgagtacaagctgcaggcaccgcgcatccaccgctggaccatcctgcattacagccccttcaaggccgtgtgggactggctcatcctgctgctggtcatctacacggctgtcttcacaccctactcggctgccttcctgctgaaggagacggaagaaggcccgcctgctaccgagtgtggctacgcctgccagccgctggctgtggtggacctcatcgtggacatcatgttcattgtggacatcctcatcaacttccgcaccacctacgtcaatgccaacgaggaggtggtcagccaccccggccgcatcgccgtccactacttcaagggctggttcctcatcgacatggtggccgccatccccttcgacctgctcatcttcggctctggctctgaggagctgatcgggctgctgaagactgcgcggctgctgcggctggtgcgcgtggcgcggaagctggatcgctactcagagtacggcgcggccgtgctgttcttgctcatgtgcacctttgcgctcatcgcgcactggctagcctgcatctggtacgccatcggcaacatggagcagccacacatggactcacgcatcggctggctgcacaacctgggcgaccagataggcaaaccctacaacagcagcggcctgggcggcccctccatcaaggacaagtatgtgacggcgctctacttcaccttcagcagcctcaccagtgtgggcttcggcaacgtctctcccaacaccaactcagagaagatcttctccatctgcgtcatgctcattggctccctcatgtatgctagcatcttcggcaacgtgtcggccatcatccagcggctgtactcgggcacagcccgctaccacacacagatgctgcgggtgcgggagttcatccgcttccaccagatccccaatcccctgcgccagcgcctcgaggagtacttccagcacgcctggtcctacaccaacggcatcgacatgaacgcggtgctgaagggcttccctgagtgcctgcaggctgacatctgcctgcacctgaaccgctcactgctgcagcactgcaaacccttccgaggggccaccaagggctgccttcgggccctggccatgaagttcaagaccacacatgcaccgccaggggacacactggtgcatgctggggacctgctcaccgccctgtacttcatctcccggggctccatcgagatcctgcggggcgacgtcgtcgtggccatcctggggaagaatgacatctttggggagcctctgaacctgtatgcaaggcctggcaagtcgaacggggatgtgcgggccctcacctactgtgacctacacaagatccatcgggacgacctgctggaggtgctggacatgtaccctgagttctccgaccacttctggtccagcctggagatcaccttcaccctgcgagataccaacatgatcccgggctcccccggcagtacggagttagagggtggcttcagtcggcaacgcaagcgcaagttgtccttccgcaggcgcacggacaaggacacggagcagccaggggaggtgtcggccttggggccgggccgggcgggggcagggccgagtagccggggccggccgggggggccgtggggggagagcccgtccagtggcccctccagccctgagagcagtgaggatgagggcccaggccgcagctccagccccctccgcctggtgcccttctccagccccaggccccccggagagccgccgggtggggagcccctgatggaggactgcgagaagagcagcgacacttgcaaccccctgtcaggcgccttctcaggagtgtccaacattttcagcttctggggggacagtcggggccgccagtaccaggagctccctcgatgccccgcccccacccccagcctcctcaacatccccctctccagcccgggtcggcggccccggggcgacgtggagagcaggctggatgccctccagcgccagctcaacaggctggagacccggctgagtgcagacatggccactgtcctgcagctgctacagaggcagatgacgctggtcccgcccgcctacagtgctgtgaccaccccggggcctggccccacttccacatccccgctgttgcccgtcagccccctccccaccctcaccttggactcgctttctcaggtttcccagttcatggcgtgtgaggagctgcccccgggggccccagagcttccccaagaaggccccacacgacgcctctccctaccgggccagctgggggccctcacctcccagcccctgcacagacacggctcggacccgggcagttagtggggctgcccagtgtggacacgtggctcacccagggatcaaggcgctgctgggccgctccccttggaggccctgctcaggaggccctgaccgtggaaggggagaggaactcgaaagcacagctcctcccccagcccttgggaccatcttctcctgcagtcccctgggccccagtgagaggggcaggggcagggccggcagtaggtggggcctgtggtccccccactgccctgagggcattagctggtctaactgcccggaggcacccggccctgggccttaggcacctcaaggacttttctgctatttactgctcttattgttaaggataataattaaggatcatatgaataattaatgaagatgctgatgactatgaataataaataattatcctgaggaga

SEQ ID NO: 565 - DNA, 3884 bp, Homo sapiens
  source 1..3884: mol_type = genomic DNA
  misc_feature 1..3884: note = cDNA of KCNH2 gene SNP c.2582A>G (p.Asn861Ser)
atgccggtgcggaggggccacgtcgcgccgcagaacaccttcctggacaccatcatccgcaagtttgagggccagagccgtaagttcatcatcgccaacgctcgggtggagaactgcgccgtcatctactgcaacgacggcttctgcgagctgtgcggctactcgcgggccgaggtgatgcagcgaccctgcacctgcgacttcctgcacgggccgcgcacgcagcgccgcgctgccgcgcagatcgcgcaggcactgctgggcgccgaggagcgcaaagtggaaatcgccttctaccggaaagatgggagctgcttcctatgtctggtggatgtggtgcccgtgaagaacgaggatggggctgtcatcatgttcatcctcaatttcgaggtggtgatggagaaggacatggtggggtccccggctcatgacaccaaccaccggggcccccccaccagctggctggccccaggccgcgccaagaccttccgcctgaagctgcccgcgctgctggcgctgacggcccgggagtcgtcggtgcggtcgggcggcgcgggcggcgcgggcgccccgggggccgtggtggtggacgtggacctgacgcccgcggcacccagcagcgagtcgctggccctggacgaagtgacagccatggacaaccacgtggcagggctcgggcccgcggaggagcggcgtgcgctggtgggtcccggctctccgccccgcagcgcgcccggccagctcccatcgccccgggcgcacagcctcaaccccgacgcctcgggctccagctgcagcctggcccggacgcgctcccgagaaagctgcgccagcgtgcgccgcgcctcgtcggccgacgacatcgaggccatgcgcgccggggtgctgcccccgccaccgcgccacgccagcaccggggccatgcacccactgcgcagcggcttgctcaactccacctcggactccgacctcgtgcgctaccgcaccattagcaagattccccaaatcaccctcaactttgtggacctcaagggcgaccccttcttggcttcgcccaccagtgaccgtgagatcatagcacctaagataaaggagcgaacccacaatgtcactgagaaggtcacccaggtcctgtccctgggcgccgacgtgctgcctgagtacaagctgcaggcaccgcgcatccaccgctggaccatcctgcattacagccccttcaaggccgtgtgggactggctcatcctgctgctggtcatctacacggctgtcttcacaccctactcggctgccttcctgctgaaggagacggaagaaggcccgcctgctaccgagtgtggctacgcctgccagccgctggctgtggtggacctcatcgtggacatcatgttcattgtggacatcctcatcaacttccgcaccacctacgtcaatgccaacgaggaggtggtcagccaccccggccgcatcgccgtccactacttcaagggctggttcctcatcgacatggtggccgccatccccttcgacctgctcatcttcggctctggctctgaggagctgatcgggctgctgaagactgcgcggctgctgcggctggtgcgcgtggcgcggaagctggatcgctactcagagtacggcgcggccgtgctgttcttgctcatgtgcacctttgcgctcatcgcgcactggctagcctgcatctggtacgccatcggcaacatggagcagccacacatggactcacgcatcggctggctgcacaacctgggcgaccagataggcaaaccctacaacagcagcggcctgggcggcccctccatcaaggacaagtatgtgacggcgctctacttcaccttcagcagcctcaccagtgtgggcttcggcaacgtctctcccaacaccaactcagagaagatcttctccatctgcgtcatgctcattggctccctcatgtatgctagcatcttcggcaacgtgtcggccatcatccagcggctgtactcgggcacagcccgctaccacacacagatgctgcgggtgcgggagttcatccgcttccaccagatccccaatcccctgcgccagcgcctcgaggagtacttccagcacgcctggtcctacaccaacggcatcgacatgaacgcggtgctgaagggcttccctgagtgcctgcaggctgacatctgcctgcacctgaaccgctcactgctgcagcactgcaaacccttccgaggggccaccaagggctgccttcgggccctggccatgaagttcaagaccacacatgcaccgccaggggacacactggtgcatgctggggacctgctcaccgccctgtacttcatctcccggggctccatcgagatcctgcggggcgacgtcgtcgtggccatcctggggaagaatgacatctttggggagcctctgaacctgtatgcaaggcctggcaagtcgaacggggatgtgcgggccctcacctactgtgacctacacaagatccatcgggacgacctgctggaggtgctggacatgtaccctgagttctccgaccacttctggtccagcctggagatcaccttcagcctgcgagataccaacatgatcccgggctcccccggcagtacggagttagagggtggcttcagtcggcaacgcaagcgcaagttgtccttccgcaggcgcacggacaaggacacggagcagccaggggaggtgtcggccttggggccgggccgggcgggggcagggccgagtagccggggccggccgggggggccgtggggggagagcccgtccagtggcccctccagccctgagagcagtgaggatgagggcccaggccgcagctccagccccctccgcctggtgcccttctccagccccaggccccccggagagccgccgggtggggagcccctgatggaggactgcgagaagagcagcgacacttgcaaccccctgtcaggcgccttctcaggagtgtccaacattttcagcttctggggggacagtcggggccgccagtaccaggagctccctcgatgccccgcccccacccccagcctcctcaacatccccctctccagcccgggtcggcggccccggggcgacgtggagagcaggctggatgccctccagcgccagctcaacaggctggagacccggctgagtgcagacatggccactgtcctgcagctgctacagaggcagatgacgctggtcccgcccgcctacagtgctgtgaccaccccggggcctggccccacttccacatccccgctgttgcccgtcagccccctccccaccctcaccttggactcgctttctcaggtttcccagttcatggcgtgtgaggagctgcccccgggggccccagagcttccccaagaaggccccacacgacgcctctccctaccgggccagctgggggccctcacctcccagcccctgcacagacacggctcggacccgggcagttagtggggctgcccagtgtggacacgtggctcacccagggatcaaggcgctgctgggccgctccccttggaggccctgctcaggaggccctgaccgtggaaggggagaggaactcgaaagcacagctcctcccccagcccttgggaccatcttctcctgcagtcccctgggccccagtgagaggggcaggggcagggccggcagtaggtggggcctgtggtccccccactgccctgagggcattagctggtctaactgcccggaggcacccggccctgggccttaggcacctcaaggacttttctgctatttactgctcttattgttaaggataataattaaggatcatatgaataattaatgaagatgctgatgactatgaataataaataattatcctgaggaga

SEQ ID NO: 566 - DNA, 3884 bp, Homo sapiens
  source 1..3884: mol_type = genomic DNA
  misc_feature 1..3884: note = cDNA of KCNH2 gene SNP c.2582A>T (p.Asn861Ile)
atgccggtgcggaggggccacgtcgcgccgcagaacaccttcctggacaccatcatccgcaagtttgagggccagagccgtaagttcatcatcgccaacgctcgggtggagaactgcgccgtcatctactgcaacgacggcttctgcgagctgtgcggctactcgcgggccgaggtgatgcagcgaccctgcacctgcgacttcctgcacgggccgcgcacgcagcgccgcgctgccgcgcagatcgcgcaggcactgctgggcgccgaggagcgcaaagtggaaatcgccttctaccggaaagatgggagctgcttcctatgtctggtggatgtggtgcccgtgaagaacgaggatggggctgtcatcatgttcatcctcaatttcgaggtggtgatggagaaggacatggtggggtccccggctcatgacaccaaccaccggggcccccccaccagctggctggccccaggccgcgccaagaccttccgcctgaagctgcccgcgctgctggcgctgacggcccgggagtcgtcggtgcggtcgggcggcgcgggcggcgcgggcgccccgggggccgtggtggtggacgtggacctgacgcccgcggcacccagcagcgagtcgctggccctggacgaagtgacagccatggacaaccacgtggcagggctcgggcccgcggaggagcggcgtgcgctggtgggtcccggctctccgccccgcagcgcgcccggccagctcccatcgccccgggcgcacagcctcaaccccgacgcctcgggctccagctgcagcctggcccggacgcgctcccgagaaagctgcgccagcgtgcgccgcgcctcgtcggccgacgacatcgaggccatgcgcgccggggtgctgcccccgccaccgcgccacgccagcaccggggccatgcacccactgcgcagcggcttgctcaactccacctcggactccgacctcgtgcgctaccgcaccattagcaagattccccaaatcaccctcaactttgtggacctcaagggcgaccccttcttggcttcgcccaccagtgaccgtgagatcatagcacctaagataaaggagcgaacccacaatgtcactgagaaggtcacccaggtcctgtccctgggcgccgacgtgctgcctgagtacaagctgcaggcaccgcgcatccaccgctggaccatcctgcattacagccccttcaaggccgtgtgggactggctcatcctgctgctggtcatctacacggctgtcttcacaccctactcggctgccttcctgctgaaggagacggaagaaggcccgcctgctaccgagtgtggctacgcctgccagccgctggctgtggtggacctcatcgtggacatcatgttcattgtggacatcctcatcaacttccgcaccacctacgtcaatgccaacgaggaggtggtcagccaccccggccgcatcgccgtccactacttcaagggctggttcctcatcgacatggtggccgccatccccttcgacctgctcatcttcggctctggctctgaggagctgatcgggctgctgaagactgcgcggctgctgcggctggtgcgcgtggcgcggaagctggatcgctactcagagtacggcgcggccgtgctgttcttgctcatgtgcacctttgcgctcatcgcgcactggctagcctgcatctggtacgccatcggcaacatggagcagccacacatggactcacgcatcggctggctgcacaacctgggcgaccagataggcaaaccctacaacagcagcggcctgggcggcccctccatcaaggacaagtatgtgacggcgctctacttcaccttcagcagcctcaccagtgtgggcttcggcaacgtctctcccaacaccaactcagagaagatcttctccatctgcgtcatgctcattggctccctcatgtatgctagcatcttcggcaacgtgtcggccatcatccagcggctgtactcgggcacagcccgctaccacacacagatgctgcgggtgcgggagttcatccgcttccaccagatccccaatcccctgcgccagcgcctcgaggagtacttccagcacgcctggtcctacaccaacggcatcgacatgaacgcggtgctgaagggcttccctgagtgcctgcaggctgacatctgcctgcacctgaaccgctcactgctgcagcactgcaaacccttccgaggggccaccaagggctgccttcgggccctggccatgaagttcaagaccacacatgcaccgccaggggacacactggtgcatgctggggacctgctcaccgccctgtacttcatctcccggggctccatcgagatcctgcggggcgacgtcgtcgtggccatcctggggaagaatgacatctttggggagcctctgaacctgtatgcaaggcctggcaagtcgaacggggatgtgcgggccctcacctactgtgacctacacaagatccatcgggacgacctgctggaggtgctggacatgtaccctgagttctccgaccacttctggtccagcctggagatcaccttcatcctgcgagataccaacatgatcccgggctcccccggcagtacggagttagagggtggcttcagtcggcaacgcaagcgcaagttgtccttccgcaggcgcacggacaaggacacggagcagccaggggaggtgtcggccttggggccgggccgggcgggggcagggccgagtagccggggccggccgggggggccgtggggggagagcccgtccagtggcccctccagccctgagagcagtgaggatgagggcccaggccgcagctccagccccctccgcctggtgcccttctccagccccaggccccccggagagccgccgggtggggagcccctgatggaggactgcgagaagagcagcgacacttgcaaccccctgtcaggcgccttctcaggagtgtccaacattttcagcttctggggggacagtcggggccgccagtaccaggagctccctcgatgccccgcccccacccccagcctcctcaacatccccctctccagcccgggtcggcggccccggggcgacgtggagagcaggctggatgccctccagcgccagctcaacaggctggagacccggctgagtgcagacatggccactgtcctgcagctgctacagaggcagatgacgctggtcccgcccgcctacagtgctgtgaccaccccggggcctggccccacttccacatccccgctgttgcccgtcagccccctccccaccctcaccttggactcgctttctcaggtttcccagttcatggcgtgtgaggagctgcccccgggggccccagagcttccccaagaaggccccacacgacgcctctccctaccgggccagctgggggccctcacctcccagcccctgcacagacacggctcggacccgggcagttagtggggctgcccagtgtggacacgtggctcacccagggatcaaggcgctgctgggccgctccccttggaggccctgctcaggaggccctgaccgtggaaggggagaggaactcgaaagcacagctcctcccccagcccttgggaccatcttctcctgcagtcccctgggccccagtgagaggggcaggggcagggccggcagtaggtggggcctgtggtccccccactgccctgagggcattagctggtctaactgcccggaggcacccggccctgggccttaggcacctcaaggacttttctgctatttactgctcttattgttaaggataataattaaggatcatatgaataattaatgaagatgctgatgactatgaataataaataattatcctgaggaga

SEQ ID NO: 567 - DNA, 3884 bp, Homo sapiens
  source 1..3884: mol_type = genomic DNA
  misc_feature 1..3884: note = cDNA of KCNH2 gene SNP c.2587C>T (p.Arg863Ter)
atgccggtgcggaggggccacgtcgcgccgcagaacaccttcctggacaccatcatccgcaagtttgagggccagagccgtaagttcatcatcgccaacgctcgggtggagaactgcgccgtcatctactgcaacgacggcttctgcgagctgtgcggctactcgcgggccgaggtgatgcagcgaccctgcacctgcgacttcctgcacgggccgcgcacgcagcgccgcgctgccgcgcagatcgcgcaggcactgctgggcgccgaggagcgcaaagtggaaatcgccttctaccggaaagatgggagctgcttcctatgtctggtggatgtggtgcccgtgaagaacgaggatggggctgtcatcatgttcatcctcaatttcgaggtggtgatggagaaggacatggtggggtccccggctcatgacaccaaccaccggggcccccccaccagctggctggccccaggccgcgccaagaccttccgcctgaagctgcccgcgctgctggcgctgacggcccgggagtcgtcggtgcggtcgggcggcgcgggcggcgcgggcgccccgggggccgtggtggtggacgtggacctgacgcccgcggcacccagcagcgagtcgctggccctggacgaagtgacagccatggacaaccacgtggcagggctcgggcccgcggaggagcggcgtgcgctggtgggtcccggctctccgccccgcagcgcgcccggccagctcccatcgccccgggcgcacagcctcaaccccgacgcctcgggctccagctgcagcctggcccggacgcgctcccgagaaagctgcgccagcgtgcgccgcgcctcgtcggccgacgacatcgaggccatgcgcgccggggtgctgcccccgccaccgcgccacgccagcaccggggccatgcacccactgcgcagcggcttgctcaactccacctcggactccgacctcgtgcgctaccgcaccattagcaagattccccaaatcaccctcaactttgtggacctcaagggcgaccccttcttggcttcgcccaccagtgaccgtgagatcatagcacctaagataaaggagcgaacccacaatgtcactgagaaggtcacccaggtcctgtccctgggcgccgacgtgctgcctgagtacaagctgcaggcaccgcgcatccaccgctggaccatcctgcattacagccccttcaaggccgtgtgggactggctcatcctgctgctggtcatctacacggctgtcttcacaccctactcggctgccttcctgctgaaggagacggaagaaggcccgcctgctaccgagtgtggctacgcctgccagccgctggctgtggtggacctcatcgtggacatcatgttcattgtggacatcctcatcaacttccgcaccacctacgtcaatgccaacgaggaggtggtcagccaccccggccgcatcgccgtccactacttcaagggctggttcctcatcgacatggtggccgccatccccttcgacctgctcatcttcggctctggctctgaggagctgatcgggctgctgaagactgcgcggctgctgcggctggtgcgcgtggcgcggaagctggatcgctactcagagtacggcgcggccgtgctgttcttgctcatgtgcacctttgcgctcatcgcgcactggctagcctgcatctggtacgccatcggcaacatggagcagccacacatggactcacgcatcggctggctgcacaacctgggcgaccagataggcaaaccctacaacagcagcggcctgggcggcccctccatcaaggacaagtatgtgacggcgctctacttcaccttcagcagcctcaccagtgtgggcttcggcaacgtctctcccaacaccaactcagagaagatcttctccatctgcgtcatgctcattggctccctcatgtatgctagcatcttcggcaacgtgtcggccatcatccagcggctgtactcgggcacagcccgctaccacacacagatgctgcgggtgcgggagttcatccgcttccaccagatccccaatcccctgcgccagcgcctcgaggagtacttccagcacgcctggtcctacaccaacggcatcgacatgaacgcggtgctgaagggcttccctgagtgcctgcaggctgacatctgcctgcacctgaaccgctcactgctgcagcactgcaaacccttccgaggggccaccaagggctgccttcgggccctggccatgaagttcaagaccacacatgcaccgccaggggacacactggtgcatgctggggacctgctcaccgccctgtacttcatctcccggggctccatcgagatcctgcggggcgacgtcgtcgtggccatcctggggaagaatgacatctttggggagcctctgaacctgtatgcaaggcctggcaagtcgaacggggatgtgcgggccctcacctactgtgacctacacaagatccatcgggacgacctgctggaggtgctggacatgtaccctgagttctccgaccacttctggtccagcctggagatcaccttcaacctgtgagataccaacatgatcccgggctcccccggcagtacggagttagagggtggcttcagtcggcaacgcaagcgcaagttgtccttccgcaggcgcacggacaaggacacggagcagccaggggaggtgtcggccttggggccgggccgggcgggggcagggccgagtagccggggccggccgggggggccgtggggggagagcccgtccagtggcccctccagccctgagagcagtgaggatgagggcccaggccgcagctccagccccctccgcctggtgcccttctccagccccaggccccccggagagccgccgggtggggagcccctgatggaggactgcgagaagagcagcgacacttgcaaccccctgtcaggcgccttctcaggagtgtccaacattttcagcttctggggggacagtcggggccgccagtaccaggagctccctcgatgccccgcccccacccccagcctcctcaacatccccctctccagcccgggtcggcggccccggggcgacgtggagagcaggctggatgccctccagcgccagctcaacaggctggagacccggctgagtgcagacatggccactgtcctgcagctgctacagaggcagatgacgctggtcccgcccgcctacagtgctgtgaccaccccggggcctggccccacttccacatccccgctgttgcccgtcagccccctccccaccctcaccttggactcgctttctcaggtttcccagttcatggcgtgtgaggagctgcccccgggggccccagagcttccccaagaaggccccacacgacgcctctccctaccgggccagctgggggccctcacctcccagcccctgcacagacacggctcggacccgggcagttagtggggctgcccagtgtggacacgtggctcacccagggatcaaggcgctgctgggccgctccccttggaggccctgctcaggaggccctgaccgtggaaggggagaggaactcgaaagcacagctcctcccccagcccttgggaccatcttctcctgcagtcccctgggccccagtgagaggggcaggggcagggccggcagtaggtggggcctgtggtccccccactgccctgagggcattagctggtctaactgcccggaggcacccggccctgggccttaggcacctcaaggacttttctgctatttactgctcttattgttaaggataataattaaggatcatatgaataattaatgaagatgctgatgactatgaataataaataattatcctgaggaga

SEQ ID NO: 568 - DNA, 3884 bp, Homo sapiens
  source 1..3884: mol_type = genomic DNA
  misc_feature 1..3884: note = cDNA of KCNH2 gene SNP c.2588G>A (p.Arg863Gln)
atgccggtgcggaggggccacgtcgcgccgcagaacaccttcctggacaccatcatccgcaagtttgagggccagagccgtaagttcatcatcgccaacgctcgggtggagaactgcgccgtcatctactgcaacgacggcttctgcgagctgtgcggctactcgcgggccgaggtgatgcagcgaccctgcacctgcgacttcctgcacgggccgcgcacgcagcgccgcgctgccgcgcagatcgcgcaggcactgctgggcgccgaggagcgcaaagtggaaatcgccttctaccggaaagatgggagctgcttcctatgtctggtggatgtggtgcccgtgaagaacgaggatggggctgtcatcatgttcatcctcaatttcgaggtggtgatggagaaggacatggtggggtccccggctcatgacaccaaccaccggggcccccccaccagctggctggccccaggccgcgccaagaccttccgcctgaagctgcccgcgctgctggcgctgacggcccgggagtcgtcggtgcggtcgggcggcgcgggcggcgcgggcgccccgggggccgtggtggtggacgtggacctgacgcccgcggcacccagcagcgagtcgctggccctggacgaagtgacagccatggacaaccacgtggcagggctcgggcccgcggaggagcggcgtgcgctggtgggtcccggctctccgccccgcagcgcgcccggccagctcccatcgccccgggcgcacagcctcaaccccgacgcctcgggctccagctgcagcctggcccggacgcgctcccgagaaagctgcgccagcgtgcgccgcgcctcgtcggccgacgacatcgaggccatgcgcgccggggtgctgcccccgccaccgcgccacgccagcaccggggccatgcacccactgcgcagcggcttgctcaactccacctcggactccgacctcgtgcgctaccgcaccattagcaagattccccaaatcaccctcaactttgtggacctcaagggcgaccccttcttggcttcgcccaccagtgaccgtgagatcatagcacctaagataaaggagcgaacccacaatgtcactgagaaggtcacccaggtcctgtccctgggcgccgacgtgctgcctgagtacaagctgcaggcaccgcgcatccaccgctggaccatcctgcattacagccccttcaaggccgtgtgggactggctcatcctgctgctggtcatctacacggctgtcttcacaccctactcggctgccttcctgctgaaggagacggaagaaggcccgcctgctaccgagtgtggctacgcctgccagccgctggctgtggtggacctcatcgtggacatcatgttcattgtggacatcctcatcaacttccgcaccacctacgtcaatgccaacgaggaggtggtcagccaccccggccgcatcgccgtccactacttcaagggctggttcctcatcgacatggtggccgccatccccttcgacctgctcatcttcggctctggctctgaggagctgatcgggctgctgaagactgcgcggctgctgcggctggtgcgcgtggcgcggaagctggatcgctactcagagtacggcgcggccgtgctgttcttgctcatgtgcacctttgcgctcatcgcgcactggctagcctgcatctggtacgccatcggcaacatggagcagccacacatggactcacgcatcggctggctgcacaacctgggcgaccagataggcaaaccctacaacagcagcggcctgggcggcccctccatcaaggacaagtatgtgacggcgctctacttcaccttcagcagcctcaccagtgtgggcttcggcaacgtctctcccaacaccaactcagagaagatcttctccatctgcgtcatgctcattggctccctcatgtatgctagcatcttcggcaacgtgtcggccatcatccagcggctgtactcgggcacagcccgctaccacacacagatgctgcgggtgcgggagttcatccgcttccaccagatccccaatcccctgcgccagcgcctcgaggagtacttccagcacgcctggtcctacaccaacggcatcgacatgaacgcggtgctgaagggcttccctgagtgcctgcaggctgacatctgcctgcacctgaaccgctcactgctgcagcactgcaaacccttccgaggggccaccaagggctgccttcgggccctggccatgaagttcaagaccacacatgcaccgccaggggacacactggtgcatgctggggacctgctcaccgccctgtacttcatctcccggggctccatcgagatcctgcggggcgacgtcgtcgtggccatcctggggaagaatgacatctttggggagcctctgaacctgtatgcaaggcctggcaagtcgaacggggatgtgcgggccctcacctactgtgacctacacaagatccatcgggacgacctgctggaggtgctggacatgtaccctgagttctccgaccacttctggtccagcctggagatcaccttcaacctgcaagataccaacatgatcccgggctcccccggcagtacggagttagagggtggcttcagtcggcaacgcaagcgcaagttgtccttccgcaggcgcacggacaaggacacggagcagccaggggaggtgtcggccttggggccgggccgggcgggggcagggccgagtagccggggccggccgggggggccgtggggggagagcccgtccagtggcccctccagccctgagagcagtgaggatgagggcccaggccgcagctccagccccctccgcctggtgcccttctccagccccaggccccccggagagccgccgggtggggagcccctgatggaggactgcgagaagagcagcgacacttgcaaccccctgtcaggcgccttctcaggagtgtccaacattttcagcttctggggggacagtcggggccgccagtaccaggagctccctcgatgccccgcccccacccccagcctcctcaacatccccctctccagcccgggtcggcggccccggggcgacgtggagagcaggctggatgccctccagcgccagctcaacaggctggagacccggctgagtgcagacatggccactgtcctgcagctgctacagaggcagatgacgctggtcccgcccgcctacagtgctgtgaccaccccggggcctggccccacttccacatccccgctgttgcccgtcagccccctccccaccctcaccttggactcgctttctcaggtttcccagttcatggcgtgtgaggagctgcccccgggggccccagagcttccccaagaaggccccacacgacgcctctccctaccgggccagctgggggccctcacctcccagcccctgcacagacacggctcggacccgggcagttagtggggctgcccagtgtggacacgtggctcacccagggatcaaggcgctgctgggccgctccccttggaggccctgctcaggaggccctgaccgtggaaggggagaggaactcgaaagcacagctcctcccccagcccttgggaccatcttctcctgcagtcccctgggccccagtgagaggggcaggggcagggccggcagtaggtggggcctgtggtccccccactgccctgagggcattagctggtctaactgcccggaggcacccggccctgggccttaggcacctcaaggacttttctgctatttactgctcttattgttaaggataataattaaggatcatatgaataattaatgaagatgctgatgactatgaataataaataattatcctgaggaga

SEQ ID NO: 569 - DNA, 3884 bp, Homo sapiens
  source 1..3884: mol_type = genomic DNA
  misc_feature 1..3884: note = cDNA of KCNH2 gene SNP c.2591A>G (p.Asp864Gly)
atgccggtgcggaggggccacgtcgcgccgcagaacaccttcctggacaccatcatccgcaagtttgagggccagagccgtaagttcatcatcgccaacgctcgggtggagaactgcgccgtcatctactgcaacgacggcttctgcgagctgtgcggctactcgcgggccgaggtgatgcagcgaccctgcacctgcgacttcctgcacgggccgcgcacgcagcgccgcgctgccgcgcagatcgcgcaggcactgctgggcgccgaggagcgcaaagtggaaatcgccttctaccggaaagatgggagctgcttcctatgtctggtggatgtggtgcccgtgaagaacgaggatggggctgtcatcatgttcatcctcaatttcgaggtggtgatggagaaggacatggtggggtccccggctcatgacaccaaccaccggggcccccccaccagctggctggccccaggccgcgccaagaccttccgcctgaagctgcccgcgctgctggcgctgacggcccgggagtcgtcggtgcggtcgggcggcgcgggcggcgcgggcgccccgggggccgtggtggtggacgtggacctgacgcccgcggcacccagcagcgagtcgctggccctggacgaagtgacagccatggacaaccacgtggcagggctcgggcccgcggaggagcggcgtgcgctggtgggtcccggctctccgccccgcagcgcgcccggccagctcccatcgccccgggcgcacagcctcaaccccgacgcctcgggctccagctgcagcctggcccggacgcgctcccgagaaagctgcgccagcgtgcgccgcgcctcgtcggccgacgacatcgaggccatgcgcgccggggtgctgcccccgccaccgcgccacgccagcaccggggccatgcacccactgcgcagcggcttgctcaactccacctcggactccgacctcgtgcgctaccgcaccattagcaagattccccaaatcaccctcaactttgtggacctcaagggcgaccccttcttggcttcgcccaccagtgaccgtgagatcatagcacctaagataaaggagcgaacccacaatgtcactgagaaggtcacccaggtcctgtccctgggcgccgacgtgctgcctgagtacaagctgcaggcaccgcgcatccaccgctggaccatcctgcattacagccccttcaaggccgtgtgggactggctcatcctgctgctggtcatctacacggctgtcttcacaccctactcggctgccttcctgctgaaggagacggaagaaggcccgcctgctaccgagtgtggctacgcctgccagccgctggctgtggtggacctcatcgtggacatcatgttcattgtggacatcctcatcaacttccgcaccacctacgtcaatgccaacgaggaggtggtcagccaccccggccgcatcgccgtccactacttcaagggctggttcctcatcgacatggtggccgccatccccttcgacctgctcatcttcggctctggctctgaggagctgatcgggctgctgaagactgcgcggctgctgcggctggtgcgcgtggcgcggaagctggatcgctactcagagtacggcgcggccgtgctgttcttgctcatgtgcacctttgcgctcatcgcgcactggctagcctgcatctggtacgccatcggcaacatggagcagccacacatggactcacgcatcggctggctgcacaacctgggcgaccagataggcaaaccctacaacagcagcggcctgggcggcccctccatcaaggacaagtatgtgacggcgctctacttcaccttcagcagcctcaccagtgtgggcttcggcaacgtctctcccaacaccaactcagagaagatcttctccatctgcgtcatgctcattggctccctcatgtatgctagcatcttcggcaacgtgtcggccatcatccagcggctgtactcgggcacagcccgctaccacacacagatgctgcgggtgcgggagttcatccgcttccaccagatccccaatcccctgcgccagcgcctcgaggagtacttccagcacgcctggtcctacaccaacggcatcgacatgaacgcggtgctgaagggcttccctgagtgcctgcaggctgacatctgcctgcacctgaaccgctcactgctgcagcactgcaaacccttccgaggggccaccaagggctgccttcgggccctggccatgaagttcaagaccacacatgcaccgccaggggacacactggtgcatgctggggacctgctcaccgccctgtacttcatctcccggggctccatcgagatcctgcggggcgacgtcgtcgtggccatcctggggaagaatgacatctttggggagcctctgaacctgtatgcaaggcctggcaagtcgaacggggatgtgcgggccctcacctactgtgacctacacaagatccatcgggacgacctgctggaggtgctggacatgtaccctgagttctccgaccacttctggtccagcctggagatcaccttcaacctgcgaggtaccaacatgatcccgggctcccccggcagtacggagttagagggtggcttcagtcggcaacgcaagcgcaagttgtccttccgcaggcgcacggacaaggacacggagcagccaggggaggtgtcggccttggggccgggccgggcgggggcagggccgagtagccggggccggccgggggggccgtggggggagagcccgtccagtggcccctccagccctgagagcagtgaggatgagggcccaggccgcagctccagccccctccgcctggtgcccttctccagccccaggccccccggagagccgccgggtggggagcccctgatggaggactgcgagaagagcagcgacacttgcaaccccctgtcaggcgccttctcaggagtgtccaacattttcagcttctggggggacagtcggggccgccagtaccaggagctccctcgatgccccgcccccacccccagcctcctcaacatccccctctccagcccgggtcggcggccccggggcgacgtggagagcaggctggatgccctccagcgccagctcaacaggctggagacccggctgagtgcagacatggccactgtcctgcagctgctacagaggcagatgacgctggtcccgcccgcctacagtgctgtgaccaccccggggcctggccccacttccacatccccgctgttgcccgtcagccccctccccaccctcaccttggactcgctttctcaggtttcccagttcatggcgtgtgaggagctgcccccgggggccccagagcttccccaagaaggccccacacgacgcctctccctaccgggccagctgggggccctcacctcccagcccctgcacagacacggctcggacccgggcagttagtggggctgcccagtgtggacacgtggctcacccagggatcaaggcgctgctgggccgctccccttggaggccctgctcaggaggccctgaccgtggaaggggagaggaactcgaaagcacagctcctcccccagcccttgggaccatcttctcctgcagtcccctgggccccagtgagaggggcaggggcagggccggcagtaggtggggcctgtggtccccccactgccctgagggcattagctggtctaactgcccggaggcacccggccctgggccttaggcacctcaaggacttttctgctatttactgctcttattgttaaggataataattaaggatcatatgaataattaatgaagatgctgatgactatgaataataaataattatcctgaggaga

SEQ ID NO: 570 - DNA, 3884 bp, Homo sapiens
  source 1..3884: mol_type = genomic DNA
  misc_feature 1..3884: note = cDNA of KCNH2 gene SNP c.2594C>T (p.Thr865Ile)
atgccggtgcggaggggccacgtcgcgccgcagaacaccttcctggacaccatcatccgcaagtttgagggccagagccgtaagttcatcatcgccaacgctcgggtggagaactgcgccgtcatctactgcaacgacggcttctgcgagctgtgcggctactcgcgggccgaggtgatgcagcgaccctgcacctgcgacttcctgcacgggccgcgcacgcagcgccgcgctgccgcgcagatcgcgcaggcactgctgggcgccgaggagcgcaaagtggaaatcgccttctaccggaaagatgggagctgcttcctatgtctggtggatgtggtgcccgtgaagaacgaggatggggctgtcatcatgttcatcctcaatttcgaggtggtgatggagaaggacatggtggggtccccggctcatgacaccaaccaccggggcccccccaccagctggctggccccaggccgcgccaagaccttccgcctgaagctgcccgcgctgctggcgctgacggcccgggagtcgtcggtgcggtcgggcggcgcgggcggcgcgggcgccccgggggccgtggtggtggacgtggacctgacgcccgcggcacccagcagcgagtcgctggccctggacgaagtgacagccatggacaaccacgtggcagggctcgggcccgcggaggagcggcgtgcgctggtgggtcccggctctccgccccgcagcgcgcccggccagctcccatcgccccgggcgcacagcctcaaccccgacgcctcgggctccagctgcagcctggcccggacgcgctcccgagaaagctgcgccagcgtgcgccgcgcctcgtcggccgacgacatcgaggccatgcgcgccggggtgctgcccccgccaccgcgccacgccagcaccggggccatgcacccactgcgcagcggcttgctcaactccacctcggactccgacctcgtgcgctaccgcaccattagcaagattccccaaatcaccctcaactttgtggacctcaagggcgaccccttcttggcttcgcccaccagtgaccgtgagatcatagcacctaagataaaggagcgaacccacaatgtcactgagaaggtcacccaggtcctgtccctgggcgccgacgtgctgcctgagtacaagctgcaggcaccgcgcatccaccgctggaccatcctgcattacagccccttcaaggccgtgtgggactggctcatcctgctgctggtcatctacacggctgtcttcacaccctactcggctgccttcctgctgaaggagacggaagaaggcccgcctgctaccgagtgtggctacgcctgccagccgctggctgtggtggacctcatcgtggacatcatgttcattgtggacatcctcatcaacttccgcaccacctacgtcaatgccaacgaggaggtggtcagccaccccggccgcatcgccgtccactacttcaagggctggttcctcatcgacatggtggccgccatccccttcgacctgctcatcttcggctctggctctgaggagctgatcgggctgctgaagactgcgcggctgctgcggctggtgcgcgtggcgcggaagctggatcgctactcagagtacggcgcggccgtgctgttcttgctcatgtgcacctttgcgctcatcgcgcactggctagcctgcatctggtacgccatcggcaacatggagcagccacacatggactcacgcatcggctggctgcacaacctgggcgaccagataggcaaaccctacaacagcagcggcctgggcggcccctccatcaaggacaagtatgtgacggcgctctacttcaccttcagcagcctcaccagtgtgggcttcggcaacgtctctcccaacaccaactcagagaagatcttctccatctgcgtcatgctcattggctccctcatgtatgctagcatcttcggcaacgtgtcggccatcatccagcggctgtactcgggcacagcccgctaccacacacagatgctgcgggtgcgggagttcatccgcttccaccagatccccaatcccctgcgccagcgcctcgaggagtacttccagcacgcctggtcctacaccaacggcatcgacatgaacgcggtgctgaagggcttccctgagtgcctgcaggctgacatctgcctgcacctgaaccgctcactgctgcagcactgcaaacccttccgaggggccaccaagggctgccttcgggccctggccatgaagttcaagaccacacatgcaccgccaggggacacactggtgcatgctggggacctgctcaccgccctgtacttcatctcccggggctccatcgagatcctgcggggcgacgtcgtcgtggccatcctggggaagaatgacatctttggggagcctctgaacctgtatgcaaggcctggcaagtcgaacggggatgtgcgggccctcacctactgtgacctacacaagatccatcgggacgacctgctggaggtgctggacatgtaccctgagttctccgaccacttctggtccagcctggagatcaccttcaacctgcgagatatcaacatgatcccgggctcccccggcagtacggagttagagggtggcttcagtcggcaacgcaagcgcaagttgtccttccgcaggcgcacggacaaggacacggagcagccaggggaggtgtcggccttggggccgggccgggcgggggcagggccgagtagccggggccggccgggggggccgtggggggagagcccgtccagtggcccctccagccctgagagcagtgaggatgagggcccaggccgcagctccagccccctccgcctggtgcccttctccagccccaggccccccggagagccgccgggtggggagcccctgatggaggactgcgagaagagcagcgacacttgcaaccccctgtcaggcgccttctcaggagtgtccaacattttcagcttctggggggacagtcggggccgccagtaccaggagctccctcgatgccccgcccccacccccagcctcctcaacatccccctctccagcccgggtcggcggccccggggcgacgtggagagcaggctggatgccctccagcgccagctcaacaggctggagacccggctgagtgcagacatggccactgtcctgcagctgctacagaggcagatgacgctggtcccgcccgcctacagtgctgtgaccaccccggggcctggccccacttccacatccccgctgttgcccgtcagccccctccccaccctcaccttggactcgctttctcaggtttcccagttcatggcgtgtgaggagctgcccccgggggccccagagcttccccaagaaggccccacacgacgcctctccctaccgggccagctgggggccctcacctcccagcccctgcacagacacggctcggacccgggcagttagtggggctgcccagtgtggacacgtggctcacccagggatcaaggcgctgctgggccgctccccttggaggccctgctcaggaggccctgaccgtggaaggggagaggaactcgaaagcacagctcctcccccagcccttgggaccatcttctcctgcagtcccctgggccccagtgagaggggcaggggcagggccggcagtaggtggggcctgtggtccccccactgccctgagggcattagctggtctaactgcccggaggcacccggccctgggccttaggcacctcaaggacttttctgctatttactgctcttattgttaaggataataattaaggatcatatgaataattaatgaagatgctgatgactatgaataataaataattatcctgaggaga

SEQ ID NO: 571 - DNA, 3884 bp, Homo sapiens
  source 1..3884: mol_type = genomic DNA
  misc_feature 1..3884: note = cDNA of KCNH2 gene SNP c.2600T>C (p.Met867Thr)
atgccggtgcggaggggccacgtcgcgccgcagaacaccttcctggacaccatcatccgcaagtttgagggccagagccgtaagttcatcatcgccaacgctcgggtggagaactgcgccgtcatctactgcaacgacggcttctgcgagctgtgcggctactcgcgggccgaggtgatgcagcgaccctgcacctgcgacttcctgcacgggccgcgcacgcagcgccgcgctgccgcgcagatcgcgcaggcactgctgggcgccgaggagcgcaaagtggaaatcgccttctaccggaaagatgggagctgcttcctatgtctggtggatgtggtgcccgtgaagaacgaggatggggctgtcatcatgttcatcctcaatttcgaggtggtgatggagaaggacatggtggggtccccggctcatgacaccaaccaccggggcccccccaccagctggctggccccaggccgcgccaagaccttccgcctgaagctgcccgcgctgctggcgctgacggcccgggagtcgtcggtgcggtcgggcggcgcgggcggcgcgggcgccccgggggccgtggtggtggacgtggacctgacgcccgcggcacccagcagcgagtcgctggccctggacgaagtgacagccatggacaaccacgtggcagggctcgggcccgcggaggagcggcgtgcgctggtgggtcccggctctccgccccgcagcgcgcccggccagctcccatcgccccgggcgcacagcctcaaccccgacgcctcgggctccagctgcagcctggcccggacgcgctcccgagaaagctgcgccagcgtgcgccgcgcctcgtcggccgacgacatcgaggccatgcgcgccggggtgctgcccccgccaccgcgccacgccagcaccggggccatgcacccactgcgcagcggcttgctcaactccacctcggactccgacctcgtgcgctaccgcaccattagcaagattccccaaatcaccctcaactttgtggacctcaagggcgaccccttcttggcttcgcccaccagtgaccgtgagatcatagcacctaagataaaggagcgaacccacaatgtcactgagaaggtcacccaggtcctgtccctgggcgccgacgtgctgcctgagtacaagctgcaggcaccgcgcatccaccgctggaccatcctgcattacagccccttcaaggccgtgtgggactggctcatcctgctgctggtcatctacacggctgtcttcacaccctactcggctgccttcctgctgaaggagacggaagaaggcccgcctgctaccgagtgtggctacgcctgccagccgctggctgtggtggacctcatcgtggacatcatgttcattgtggacatcctcatcaacttccgcaccacctacgtcaatgccaacgaggaggtggtcagccaccccggccgcatcgccgtccactacttcaagggctggttcctcatcgacatggtggccgccatccccttcgacctgctcatcttcggctctggctctgaggagctgatcgggctgctgaagactgcgcggctgctgcggctggtgcgcgtggcgcggaagctggatcgctactcagagtacggcgcggccgtgctgttcttgctcatgtgcacctttgcgctcatcgcgcactggctagcctgcatctggtacgccatcggcaacatggagcagccacacatggactcacgcatcggctggctgcacaacctgggcgaccagataggcaaaccctacaacagcagcggcctgggcggcccctccatcaaggacaagtatgtgacggcgctctacttcaccttcagcagcctcaccagtgtgggcttcggcaacgtctctcccaacaccaactcagagaagatcttctccatctgcgtcatgctcattggctccctcatgtatgctagcatcttcggcaacgtgtcggccatcatccagcggctgtactcgggcacagcccgctaccacacacagatgctgcgggtgcgggagttcatccgcttccaccagatccccaatcccctgcgccagcgcctcgaggagtacttccagcacgcctggtcctacaccaacggcatcgacatgaacgcggtgctgaagggcttccctgagtgcctgcaggctgacatctgcctgcacctgaaccgctcactgctgcagcactgcaaacccttccgaggggccaccaagggctgccttcgggccctggccatgaagttcaagaccacacatgcaccgccaggggacacactggtgcatgctggggacctgctcaccgccctgtacttcatctcccggggctccatcgagatcctgcggggcgacgtcgtcgtggccatcctggggaagaatgacatctttggggagcctctgaacctgtatgcaaggcctggcaagtcgaacggggatgtgcgggccctcacctactgtgacctacacaagatccatcgggacgacctgctggaggtgctggacatgtaccctgagttctccgaccacttctggtccagcctggagatcaccttcaacctgcgagataccaacacgatcccgggctcccccggcagtacggagttagagggtggcttcagtcggcaacgcaagcgcaagttgtccttccgcaggcgcacggacaaggacacggagcagccaggggaggtgtcggccttggggccgggccgggcgggggcagggccgagtagccggggccggccgggggggccgtggggggagagcccgtccagtggcccctccagccctgagagcagtgaggatgagggcccaggccgcagctccagccccctccgcctggtgcccttctccagccccaggccccccggagagccgccgggtggggagcccctgatggaggactgcgagaagagcagcgacacttgcaaccccctgtcaggcgccttctcaggagtgtccaacattttcagcttctggggggacagtcggggccgccagtaccaggagctccctcgatgccccgcccccacccccagcctcctcaacatccccctctccagcccgggtcggcggccccggggcgacgtggagagcaggctggatgccctccagcgccagctcaacaggctggagacccggctgagtgcagacatggccactgtcctgcagctgctacagaggcagatgacgctggtcccgcccgcctacagtgctgtgaccaccccggggcctggccccacttccacatccccgctgttgcccgtcagccccctccccaccctcaccttggactcgctttctcaggtttcccagttcatggcgtgtgaggagctgcccccgggggccccagagcttccccaagaaggccccacacgacgcctctccctaccgggccagctgggggccctcacctcccagcccctgcacagacacggctcggacccgggcagttagtggggctgcccagtgtggacacgtggctcacccagggatcaaggcgctgctgggccgctccccttggaggccctgctcaggaggccctgaccgtggaaggggagaggaactcgaaagcacagctcctcccccagcccttgggaccatcttctcctgcagtcccctgggccccagtgagaggggcaggggcagggccggcagtaggtggggcctgtggtccccccactgccctgagggcattagctggtctaactgcccggaggcacccggccctgggccttaggcacctcaaggacttttctgctatttactgctcttattgttaaggataataattaaggatcatatgaataattaatgaagatgctgatgactatgaataataaataattatcctgaggaga

SEQ ID NO: 572 - DNA, 3884 bp, Homo sapiens
  source 1..3884: mol_type = genomic DNA
  misc_feature 1..3884: note = cDNA of KCNH2 gene SNP c.2606C>T (p.Pro869Leu)
atgccggtgcggaggggccacgtcgcgccgcagaacaccttcctggacaccatcatccgcaagtttgagggccagagccgtaagttcatcatcgccaacgctcgggtggagaactgcgccgtcatctactgcaacgacggcttctgcgagctgtgcggctactcgcgggccgaggtgatgcagcgaccctgcacctgcgacttcctgcacgggccgcgcacgcagcgccgcgctgccgcgcagatcgcgcaggcactgctgggcgccgaggagcgcaaagtggaaatcgccttctaccggaaagatgggagctgcttcctatgtctggtggatgtggtgcccgtgaagaacgaggatggggctgtcatcatgttcatcctcaatttcgaggtggtgatggagaaggacatggtggggtccccggctcatgacaccaaccaccggggcccccccaccagctggctggccccaggccgcgccaagaccttccgcctgaagctgcccgcgctgctggcgctgacggcccgggagtcgtcggtgcggtcgggcggcgcgggcggcgcgggcgccccgggggccgtggtggtggacgtggacctgacgcccgcggcacccagcagcgagtcgctggccctggacgaagtgacagccatggacaaccacgtggcagggctcgggcccgcggaggagcggcgtgcgctggtgggtcccggctctccgccccgcagcgcgcccggccagctcccatcgccccgggcgcacagcctcaaccccgacgcctcgggctccagctgcagcctggcccggacgcgctcccgagaaagctgcgccagcgtgcgccgcgcctcgtcggccgacgacatcgaggccatgcgcgccggggtgctgcccccgccaccgcgccacgccagcaccggggccatgcacccactgcgcagcggcttgctcaactccacctcggactccgacctcgtgcgctaccgcaccattagcaagattccccaaatcaccctcaactttgtggacctcaagggcgaccccttcttggcttcgcccaccagtgaccgtgagatcatagcacctaagataaaggagcgaacccacaatgtcactgagaaggtcacccaggtcctgtccctgggcgccgacgtgctgcctgagtacaagctgcaggcaccgcgcatccaccgctggaccatcctgcattacagccccttcaaggccgtgtgggactggctcatcctgctgctggtcatctacacggctgtcttcacaccctactcggctgccttcctgctgaaggagacggaagaaggcccgcctgctaccgagtgtggctacgcctgccagccgctggctgtggtggacctcatcgtggacatcatgttcattgtggacatcctcatcaacttccgcaccacctacgtcaatgccaacgaggaggtggtcagccaccccggccgcatcgccgtccactacttcaagggctggttcctcatcgacatggtggccgccatccccttcgacctgctcatcttcggctctggctctgaggagctgatcgggctgctgaagactgcgcggctgctgcggctggtgcgcgtggcgcggaagctggatcgctactcagagtacggcgcggccgtgctgttcttgctcatgtgcacctttgcgctcatcgcgcactggctagcctgcatctggtacgccatcggcaacatggagcagccacacatggactcacgcatcggctggctgcacaacctgggcgaccagataggcaaaccctacaacagcagcggcctgggcggcccctccatcaaggacaagtatgtgacggcgctctacttcaccttcagcagcctcaccagtgtgggcttcggcaacgtctctcccaacaccaactcagagaagatcttctccatctgcgtcatgctcattggctccctcatgtatgctagcatcttcggcaacgtgtcggccatcatccagcggctgtactcgggcacagcccgctaccacacacagatgctgcgggtgcgggagttcatccgcttccaccagatccccaatcccctgcgccagcgcctcgaggagtacttccagcacgcctggtcctacaccaacggcatcgacatgaacgcggtgctgaagggcttccctgagtgcctgcaggctgacatctgcctgcacctgaaccgctcactgctgcagcactgcaaacccttccgaggggccaccaagggctgccttcgggccctggccatgaagttcaagaccacacatgcaccgccaggggacacactggtgcatgctggggacctgctcaccgccctgtacttcatctcccggggctccatcgagatcctgcggggcgacgtcgtcgtggccatcctggggaagaatgacatctttggggagcctctgaacctgtatgcaaggcctggcaagtcgaacggggatgtgcgggccctcacctactgtgacctacacaagatccatcgggacgacctgctggaggtgctggacatgtaccctgagttctccgaccacttctggtccagcctggagatcaccttcaacctgcgagataccaacatgatcctgggctcccccggcagtacggagttagagggtggcttcagtcggcaacgcaagcgcaagttgtccttccgcaggcgcacggacaaggacacggagcagccaggggaggtgtcggccttggggccgggccgggcgggggcagggccgagtagccggggccggccgggggggccgtggggggagagcccgtccagtggcccctccagccctgagagcagtgaggatgagggcccaggccgcagctccagccccctccgcctggtgcccttctccagccccaggccccccggagagccgccgggtggggagcccctgatggaggactgcgagaagagcagcgacacttgcaaccccctgtcaggcgccttctcaggagtgtccaacattttcagcttctggggggacagtcggggccgccagtaccaggagctccctcgatgccccgcccccacccccagcctcctcaacatccccctctccagcccgggtcggcggccccggggcgacgtggagagcaggctggatgccctccagcgccagctcaacaggctggagacccggctgagtgcagacatggccactgtcctgcagctgctacagaggcagatgacgctggtcccgcccgcctacagtgctgtgaccaccccggggcctggccccacttccacatccccgctgttgcccgtcagccccctccccaccctcaccttggactcgctttctcaggtttcccagttcatggcgtgtgaggagctgcccccgggggccccagagcttccccaagaaggccccacacgacgcctctccctaccgggccagctgggggccctcacctcccagcccctgcacagacacggctcggacccgggcagttagtggggctgcccagtgtggacacgtggctcacccagggatcaaggcgctgctgggccgctccccttggaggccctgctcaggaggccctgaccgtggaaggggagaggaactcgaaagcacagctcctcccccagcccttgggaccatcttctcctgcagtcccctgggccccagtgagaggggcaggggcagggccggcagtaggtggggcctgtggtccccccactgccctgagggcattagctggtctaactgcccggaggcacccggccctgggccttaggcacctcaaggacttttctgctatttactgctcttattgttaaggataataattaaggatcatatgaataattaatgaagatgctgatgactatgaataataaataattatcctgaggaga

SEQ ID NO: 573 - DNA, 3884 bp, Homo sapiens
  source 1..3884: mol_type = genomic DNA
  misc_feature 1..3884: note = cDNA of KCNH2 gene SNP c.260T>C (p.Leu87Pro)
atgccggtgcggaggggccacgtcgcgccgcagaacaccttcctggacaccatcatccgcaagtttgagggccagagccgtaagttcatcatcgccaacgctcgggtggagaactgcgccgtcatctactgcaacgacggcttctgcgagctgtgcggctactcgcgggccgaggtgatgcagcgaccctgcacctgcgacttcctgcacgggccgcgcacgcagcgccgcgctgccgcgcagatcgcgcaggcactgccgggcgccgaggagcgcaaagtggaaatcgccttctaccggaaagatgggagctgcttcctatgtctggtggatgtggtgcccgtgaagaacgaggatggggctgtcatcatgttcatcctcaatttcgaggtggtgatggagaaggacatggtggggtccccggctcatgacaccaaccaccggggcccccccaccagctggctggccccaggccgcgccaagaccttccgcctgaagctgcccgcgctgctggcgctgacggcccgggagtcgtcggtgcggtcgggcggcgcgggcggcgcgggcgccccgggggccgtggtggtggacgtggacctgacgcccgcggcacccagcagcgagtcgctggccctggacgaagtgacagccatggacaaccacgtggcagggctcgggcccgcggaggagcggcgtgcgctggtgggtcccggctctccgccccgcagcgcgcccggccagctcccatcgccccgggcgcacagcctcaaccccgacgcctcgggctccagctgcagcctggcccggacgcgctcccgagaaagctgcgccagcgtgcgccgcgcctcgtcggccgacgacatcgaggccatgcgcgccggggtgctgcccccgccaccgcgccacgccagcaccggggccatgcacccactgcgcagcggcttgctcaactccacctcggactccgacctcgtgcgctaccgcaccattagcaagattccccaaatcaccctcaactttgtggacctcaagggcgaccccttcttggcttcgcccaccagtgaccgtgagatcatagcacctaagataaaggagcgaacccacaatgtcactgagaaggtcacccaggtcctgtccctgggcgccgacgtgctgcctgagtacaagctgcaggcaccgcgcatccaccgctggaccatcctgcattacagccccttcaaggccgtgtgggactggctcatcctgctgctggtcatctacacggctgtcttcacaccctactcggctgccttcctgctgaaggagacggaagaaggcccgcctgctaccgagtgtggctacgcctgccagccgctggctgtggtggacctcatcgtggacatcatgttcattgtggacatcctcatcaacttccgcaccacctacgtcaatgccaacgaggaggtggtcagccaccccggccgcatcgccgtccactacttcaagggctggttcctcatcgacatggtggccgccatccccttcgacctgctcatcttcggctctggctctgaggagctgatcgggctgctgaagactgcgcggctgctgcggctggtgcgcgtggcgcggaagctggatcgctactcagagtacggcgcggccgtgctgttcttgctcatgtgcacctttgcgctcatcgcgcactggctagcctgcatctggtacgccatcggcaacatggagcagccacacatggactcacgcatcggctggctgcacaacctgggcgaccagataggcaaaccctacaacagcagcggcctgggcggcccctccatcaaggacaagtatgtgacggcgctctacttcaccttcagcagcctcaccagtgtgggcttcggcaacgtctctcccaacaccaactcagagaagatcttctccatctgcgtcatgctcattggctccctcatgtatgctagcatcttcggcaacgtgtcggccatcatccagcggctgtactcgggcacagcccgctaccacacacagatgctgcgggtgcgggagttcatccgcttccaccagatccccaatcccctgcgccagcgcctcgaggagtacttccagcacgcctggtcctacaccaacggcatcgacatgaacgcggtgctgaagggcttccctgagtgcctgcaggctgacatctgcctgcacctgaaccgctcactgctgcagcactgcaaacccttccgaggggccaccaagggctgccttcgggccctggccatgaagttcaagaccacacatgcaccgccaggggacacactggtgcatgctggggacctgctcaccgccctgtacttcatctcccggggctccatcgagatcctgcggggcgacgtcgtcgtggccatcctggggaagaatgacatctttggggagcctctgaacctgtatgcaaggcctggcaagtcgaacggggatgtgcgggccctcacctactgtgacctacacaagatccatcgggacgacctgctggaggtgctggacatgtaccctgagttctccgaccacttctggtccagcctggagatcaccttcaacctgcgagataccaacatgatcccgggctcccccggcagtacggagttagagggtggcttcagtcggcaacgcaagcgcaagttgtccttccgcaggcgcacggacaaggacacggagcagccaggggaggtgtcggccttggggccgggccgggcgggggcagggccgagtagccggggccggccgggggggccgtggggggagagcccgtccagtggcccctccagccctgagagcagtgaggatgagggcccaggccgcagctccagccccctccgcctggtgcccttctccagccccaggccccccggagagccgccgggtggggagcccctgatggaggactgcgagaagagcagcgacacttgcaaccccctgtcaggcgccttctcaggagtgtccaacattttcagcttctggggggacagtcggggccgccagtaccaggagctccctcgatgccccgcccccacccccagcctcctcaacatccccctctccagcccgggtcggcggccccggggcgacgtggagagcaggctggatgccctccagcgccagctcaacaggctggagacccggctgagtgcagacatggccactgtcctgcagctgctacagaggcagatgacgctggtcccgcccgcctacagtgctgtgaccaccccggggcctggccccacttccacatccccgctgttgcccgtcagccccctccccaccctcaccttggactcgctttctcaggtttcccagttcatggcgtgtgaggagctgcccccgggggccccagagcttccccaagaaggccccacacgacgcctctccctaccgggccagctgggggccctcacctcccagcccctgcacagacacggctcggacccgggcagttagtggggctgcccagtgtggacacgtggctcacccagggatcaaggcgctgctgggccgctccccttggaggccctgctcaggaggccctgaccgtggaaggggagaggaactcgaaagcacagctcctcccccagcccttgggaccatcttctcctgcagtcccctgggccccagtgagaggggcaggggcagggccggcagtaggtggggcctgtggtccccccactgccctgagggcattagctggtctaactgcccggaggcacccggccctgggccttaggcacctcaaggacttttctgctatttactgctcttattgttaaggataataattaaggatcatatgaataattaatgaagatgctgatgactatgaataataaataattatcctgaggaga

SEQ ID NO: 574 - DNA, 3884 bp, Homo sapiens
  source 1..3884: mol_type = genomic DNA
  misc_feature 1..3884: note = cDNA of KCNH2 gene SNP c.2612C>G (p.Ser871Cys)
atgccggtgcggaggggccacgtcgcgccgcagaacaccttcctggacaccatcatccgcaagtttgagggccagagccgtaagttcatcatcgccaacgctcgggtggagaactgcgccgtcatctactgcaacgacggcttctgcgagctgtgcggctactcgcgggccgaggtgatgcagcgaccctgcacctgcgacttcctgcacgggccgcgcacgcagcgccgcgctgccgcgcagatcgcgcaggcactgctgggcgccgaggagcgcaaagtggaaatcgccttctaccggaaagatgggagctgcttcctatgtctggtggatgtggtgcccgtgaagaacgaggatggggctgtcatcatgttcatcctcaatttcgaggtggtgatggagaaggacatggtggggtccccggctcatgacaccaaccaccggggcccccccaccagctggctggccccaggccgcgccaagaccttccgcctgaagctgcccgcgctgctggcgctgacggcccgggagtcgtcggtgcggtcgggcggcgcgggcggcgcgggcgccccgggggccgtggtggtggacgtggacctgacgcccgcggcacccagcagcgagtcgctggccctggacgaagtgacagccatggacaaccacgtggcagggctcgggcccgcggaggagcggcgtgcgctggtgggtcccggctctccgccccgcagcgcgcccggccagctcccatcgccccgggcgcacagcctcaaccccgacgcctcgggctccagctgcagcctggcccggacgcgctcccgagaaagctgcgccagcgtgcgccgcgcctcgtcggccgacgacatcgaggccatgcgcgccggggtgctgcccccgccaccgcgccacgccagcaccggggccatgcacccactgcgcagcggcttgctcaactccacctcggactccgacctcgtgcgctaccgcaccattagcaagattccccaaatcaccctcaactttgtggacctcaagggcgaccccttcttggcttcgcccaccagtgaccgtgagatcatagcacctaagataaaggagcgaacccacaatgtcactgagaaggtcacccaggtcctgtccctgggcgccgacgtgctgcctgagtacaagctgcaggcaccgcgcatccaccgctggaccatcctgcattacagccccttcaaggccgtgtgggactggctcatcctgctgctggtcatctacacggctgtcttcacaccctactcggctgccttcctgctgaaggagacggaagaaggcccgcctgctaccgagtgtggctacgcctgccagccgctggctgtggtggacctcatcgtggacatcatgttcattgtggacatcctcatcaacttccgcaccacctacgtcaatgccaacgaggaggtggtcagccaccccggccgcatcgccgtccactacttcaagggctggttcctcatcgacatggtggccgccatccccttcgacctgctcatcttcggctctggctctgaggagctgatcgggctgctgaagactgcgcggctgctgcggctggtgcgcgtggcgcggaagctggatcgctactcagagtacggcgcggccgtgctgttcttgctcatgtgcacctttgcgctcatcgcgcactggctagcctgcatctggtacgccatcggcaacatggagcagccacacatggactcacgcatcggctggctgcacaacctgggcgaccagataggcaaaccctacaacagcagcggcctgggcggcccctccatcaaggacaagtatgtgacggcgctctacttcaccttcagcagcctcaccagtgtgggcttcggcaacgtctctcccaacaccaactcagagaagatcttctccatctgcgtcatgctcattggctccctcatgtatgctagcatcttcggcaacgtgtcggccatcatccagcggctgtactcgggcacagcccgctaccacacacagatgctgcgggtgcgggagttcatccgcttccaccagatccccaatcccctgcgccagcgcctcgaggagtacttccagcacgcctggtcctacaccaacggcatcgacatgaacgcggtgctgaagggcttccctgagtgcctgcaggctgacatctgcctgcacctgaaccgctcactgctgcagcactgcaaacccttccgaggggccaccaagggctgccttcgggccctggccatgaagttcaagaccacacatgcaccgccaggggacacactggtgcatgctggggacctgctcaccgccctgtacttcatctcccggggctccatcgagatcctgcggggcgacgtcgtcgtggccatcctggggaagaatgacatctttggggagcctctgaacctgtatgcaaggcctggcaagtcgaacggggatgtgcgggccctcacctactgtgacctacacaagatccatcgggacgacctgctggaggtgctggacatgtaccctgagttctccgaccacttctggtccagcctggagatcaccttcaacctgcgagataccaacatgatcccgggctgccccggcagtacggagttagagggtggcttcagtcggcaacgcaagcgcaagttgtccttccgcaggcgcacggacaaggacacggagcagccaggggaggtgtcggccttggggccgggccgggcgggggcagggccgagtagccggggccggccgggggggccgtggggggagagcccgtccagtggcccctccagccctgagagcagtgaggatgagggcccaggccgcagctccagccccctccgcctggtgcccttctccagccccaggccccccggagagccgccgggtggggagcccctgatggaggactgcgagaagagcagcgacacttgcaaccccctgtcaggcgccttctcaggagtgtccaacattttcagcttctggggggacagtcggggccgccagtaccaggagctccctcgatgccccgcccccacccccagcctcctcaacatccccctctccagcccgggtcggcggccccggggcgacgtggagagcaggctggatgccctccagcgccagctcaacaggctggagacccggctgagtgcagacatggccactgtcctgcagctgctacagaggcagatgacgctggtcccgcccgcctacagtgctgtgaccaccccggggcctggccccacttccacatccccgctgttgcccgtcagccccctccccaccctcaccttggactcgctttctcaggtttcccagttcatggcgtgtgaggagctgcccccgggggccccagagcttccccaagaaggccccacacgacgcctctccctaccgggccagctgggggccctcacctcccagcccctgcacagacacggctcggacccgggcagttagtggggctgcccagtgtggacacgtggctcacccagggatcaaggcgctgctgggccgctccccttggaggccctgctcaggaggccctgaccgtggaaggggagaggaactcgaaagcacagctcctcccccagcccttgggaccatcttctcctgcagtcccctgggccccagtgagaggggcaggggcagggccggcagtaggtggggcctgtggtccccccactgccctgagggcattagctggtctaactgcccggaggcacccggccctgggccttaggcacctcaaggacttttctgctatttactgctcttattgttaaggataataattaaggatcatatgaataattaatgaagatgctgatgactatgaataataaataattatcctgaggaga

SEQ ID NO: 575 - DNA, 3884 bp, Homo sapiens
  source 1..3884: mol_type = genomic DNA
  misc_feature 1..3884: note = cDNA of KCNH2 gene SNP c.2612C>T (p.Ser871Phe)
atgccggtgcggaggggccacgtcgcgccgcagaacaccttcctggacaccatcatccgcaagtttgagggccagagccgtaagttcatcatcgccaacgctcgggtggagaactgcgccgtcatctactgcaacgacggcttctgcgagctgtgcggctactcgcgggccgaggtgatgcagcgaccctgcacctgcgacttcctgcacgggccgcgcacgcagcgccgcgctgccgcgcagatcgcgcaggcactgctgggcgccgaggagcgcaaagtggaaatcgccttctaccggaaagatgggagctgcttcctatgtctggtggatgtggtgcccgtgaagaacgaggatggggctgtcatcatgttcatcctcaatttcgaggtggtgatggagaaggacatggtggggtccccggctcatgacaccaaccaccggggcccccccaccagctggctggccccaggccgcgccaagaccttccgcctgaagctgcccgcgctgctggcgctgacggcccgggagtcgtcggtgcggtcgggcggcgcgggcggcgcgggcgccccgggggccgtggtggtggacgtggacctgacgcccgcggcacccagcagcgagtcgctggccctggacgaagtgacagccatggacaaccacgtggcagggctcgggcccgcggaggagcggcgtgcgctggtgggtcccggctctccgccccgcagcgcgcccggccagctcccatcgccccgggcgcacagcctcaaccccgacgcctcgggctccagctgcagcctggcccggacgcgctcccgagaaagctgcgccagcgtgcgccgcgcctcgtcggccgacgacatcgaggccatgcgcgccggggtgctgcccccgccaccgcgccacgccagcaccggggccatgcacccactgcgcagcggcttgctcaactccacctcggactccgacctcgtgcgctaccgcaccattagcaagattccccaaatcaccctcaactttgtggacctcaagggcgaccccttcttggcttcgcccaccagtgaccgtgagatcatagcacctaagataaaggagcgaacccacaatgtcactgagaaggtcacccaggtcctgtccctgggcgccgacgtgctgcctgagtacaagctgcaggcaccgcgcatccaccgctggaccatcctgcattacagccccttcaaggccgtgtgggactggctcatcctgctgctggtcatctacacggctgtcttcacaccctactcggctgccttcctgctgaaggagacggaagaaggcccgcctgctaccgagtgtggctacgcctgccagccgctggctgtggtggacctcatcgtggacatcatgttcattgtggacatcctcatcaacttccgcaccacctacgtcaatgccaacgaggaggtggtcagccaccccggccgcatcgccgtccactacttcaagggctggttcctcatcgacatggtggccgccatccccttcgacctgctcatcttcggctctggctctgaggagctgatcgggctgctgaagactgcgcggctgctgcggctggtgcgcgtggcgcggaagctggatcgctactcagagtacggcgcggccgtgctgttcttgctcatgtgcacctttgcgctcatcgcgcactggctagcctgcatctggtacgccatcggcaacatggagcagccacacatggactcacgcatcggctggctgcacaacctgggcgaccagataggcaaaccctacaacagcagcggcctgggcggcccctccatcaaggacaagtatgtgacggcgctctacttcaccttcagcagcctcaccagtgtgggcttcggcaacgtctctcccaacaccaactcagagaagatcttctccatctgcgtcatgctcattggctccctcatgtatgctagcatcttcggcaacgtgtcggccatcatccagcggctgtactcgggcacagcccgctaccacacacagatgctgcgggtgcgggagttcatccgcttccaccagatccccaatcccctgcgccagcgcctcgaggagtacttccagcacgcctggtcctacaccaacggcatcgacatgaacgcggtgctgaagggcttccctgagtgcctgcaggctgacatctgcctgcacctgaaccgctcactgctgcagcactgcaaacccttccgaggggccaccaagggctgccttcgggccctggccatgaagttcaagaccacacatgcaccgccaggggacacactggtgcatgctggggacctgctcaccgccctgtacttcatctcccggggctccatcgagatcctgcggggcgacgtcgtcgtggccatcctggggaagaatgacatctttggggagcctctgaacctgtatgcaaggcctggcaagtcgaacggggatgtgcgggccctcacctactgtgacctacacaagatccatcgggacgacctgctggaggtgctggacatgtaccctgagttctccgaccacttctggtccagcctggagatcaccttcaacctgcgagataccaacatgatcccgggcttccccggcagtacggagttagagggtggcttcagtcggcaacgcaagcgcaagttgtccttccgcaggcgcacggacaaggacacggagcagccaggggaggtgtcggccttggggccgggccgggcgggggcagggccgagtagccggggccggccgggggggccgtggggggagagcccgtccagtggcccctccagccctgagagcagtgaggatgagggcccaggccgcagctccagccccctccgcctggtgcccttctccagccccaggccccccggagagccgccgggtggggagcccctgatggaggactgcgagaagagcagcgacacttgcaaccccctgtcaggcgccttctcaggagtgtccaacattttcagcttctggggggacagtcggggccgccagtaccaggagctccctcgatgccccgcccccacccccagcctcctcaacatccccctctccagcccgggtcggcggccccggggcgacgtggagagcaggctggatgccctccagcgccagctcaacaggctggagacccggctgagtgcagacatggccactgtcctgcagctgctacagaggcagatgacgctggtcccgcccgcctacagtgctgtgaccaccccggggcctggccccacttccacatccccgctgttgcccgtcagccccctccccaccctcaccttggactcgctttctcaggtttcccagttcatggcgtgtgaggagctgcccccgggggccccagagcttccccaagaaggccccacacgacgcctctccctaccgggccagctgggggccctcacctcccagcccctgcacagacacggctcggacccgggcagttagtggggctgcccagtgtggacacgtggctcacccagggatcaaggcgctgctgggccgctccccttggaggccctgctcaggaggccctgaccgtggaaggggagaggaactcgaaagcacagctcctcccccagcccttgggaccatcttctcctgcagtcccctgggccccagtgagaggggcaggggcagggccggcagtaggtggggcctgtggtccccccactgccctgagggcattagctggtctaactgcccggaggcacccggccctgggccttaggcacctcaaggacttttctgctatttactgctcttattgttaaggataataattaaggatcatatgaataattaatgaagatgctgatgactatgaataataaataattatcctgaggaga

SEQ ID NO: 576 - DNA, 3884 bp, Homo sapiens
  source 1..3884: mol_type = genomic DNA
  misc_feature 1..3884: note = cDNA of KCNH2 gene SNP c.2617G>A (p.Gly873Ser)
atgccggtgcggaggggccacgtcgcgccgcagaacaccttcctggacaccatcatccgcaagtttgagggccagagccgtaagttcatcatcgccaacgctcgggtggagaactgcgccgtcatctactgcaacgacggcttctgcgagctgtgcggctactcgcgggccgaggtgatgcagcgaccctgcacctgcgacttcctgcacgggccgcgcacgcagcgccgcgctgccgcgcagatcgcgcaggcactgctgggcgccgaggagcgcaaagtggaaatcgccttctaccggaaagatgggagctgcttcctatgtctggtggatgtggtgcccgtgaagaacgaggatggggctgtcatcatgttcatcctcaatttcgaggtggtgatggagaaggacatggtggggtccccggctcatgacaccaaccaccggggcccccccaccagctggctggccccaggccgcgccaagaccttccgcctgaagctgcccgcgctgctggcgctgacggcccgggagtcgtcggtgcggtcgggcggcgcgggcggcgcgggcgccccgggggccgtggtggtggacgtggacctgacgcccgcggcacccagcagcgagtcgctggccctggacgaagtgacagccatggacaaccacgtggcagggctcgggcccgcggaggagcggcgtgcgctggtgggtcccggctctccgccccgcagcgcgcccggccagctcccatcgccccgggcgcacagcctcaaccccgacgcctcgggctccagctgcagcctggcccggacgcgctcccgagaaagctgcgccagcgtgcgccgcgcctcgtcggccgacgacatcgaggccatgcgcgccggggtgctgcccccgccaccgcgccacgccagcaccggggccatgcacccactgcgcagcggcttgctcaactccacctcggactccgacctcgtgcgctaccgcaccattagcaagattccccaaatcaccctcaactttgtggacctcaagggcgaccccttcttggcttcgcccaccagtgaccgtgagatcatagcacctaagataaaggagcgaacccacaatgtcactgagaaggtcacccaggtcctgtccctgggcgccgacgtgctgcctgagtacaagctgcaggcaccgcgcatccaccgctggaccatcctgcattacagccccttcaaggccgtgtgggactggctcatcctgctgctggtcatctacacggctgtcttcacaccctactcggctgccttcctgctgaaggagacggaagaaggcccgcctgctaccgagtgtggctacgcctgccagccgctggctgtggtggacctcatcgtggacatcatgttcattgtggacatcctcatcaacttccgcaccacctacgtcaatgccaacgaggaggtggtcagccaccccggccgcatcgccgtccactacttcaagggctggttcctcatcgacatggtggccgccatccccttcgacctgctcatcttcggctctggctctgaggagctgatcgggctgctgaagactgcgcggctgctgcggctggtgcgcgtggcgcggaagctggatcgctactcagagtacggcgcggccgtgctgttcttgctcatgtgcacctttgcgctcatcgcgcactggctagcctgcatctggtacgccatcggcaacatggagcagccacacatggactcacgcatcggctggctgcacaacctgggcgaccagataggcaaaccctacaacagcagcggcctgggcggcccctccatcaaggacaagtatgtgacggcgctctacttcaccttcagcagcctcaccagtgtgggcttcggcaacgtctctcccaacaccaactcagagaagatcttctccatctgcgtcatgctcattggctccctcatgtatgctagcatcttcggcaacgtgtcggccatcatccagcggctgtactcgggcacagcccgctaccacacacagatgctgcgggtgcgggagttcatccgcttccaccagatccccaatcccctgcgccagcgcctcgaggagtacttccagcacgcctggtcctacaccaacggcatcgacatgaacgcggtgctgaagggcttccctgagtgcctgcaggctgacatctgcctgcacctgaaccgctcactgctgcagcactgcaaacccttccgaggggccaccaagggctgccttcgggccctggccatgaagttcaagaccacacatgcaccgccaggggacacactggtgcatgctggggacctgctcaccgccctgtacttcatctcccggggctccatcgagatcctgcggggcgacgtcgtcgtggccatcctggggaagaatgacatctttggggagcctctgaacctgtatgcaaggcctggcaagtcgaacggggatgtgcgggccctcacctactgtgacctacacaagatccatcgggacgacctgctggaggtgctggacatgtaccctgagttctccgaccacttctggtccagcctggagatcaccttcaacctgcgagataccaacatgatcccgggctcccccagcagtacggagttagagggtggcttcagtcggcaacgcaagcgcaagttgtccttccgcaggcgcacggacaaggacacggagcagccaggggaggtgtcggccttggggccgggccgggcgggggcagggccgagtagccggggccggccgggggggccgtggggggagagcccgtccagtggcccctccagccctgagagcagtgaggatgagggcccaggccgcagctccagccccctccgcctggtgcccttctccagccccaggccccccggagagccgccgggtggggagcccctgatggaggactgcgagaagagcagcgacacttgcaaccccctgtcaggcgccttctcaggagtgtccaacattttcagcttctggggggacagtcggggccgccagtaccaggagctccctcgatgccccgcccccacccccagcctcctcaacatccccctctccagcccgggtcggcggccccggggcgacgtggagagcaggctggatgccctccagcgccagctcaacaggctggagacccggctgagtgcagacatggccactgtcctgcagctgctacagaggcagatgacgctggtcccgcccgcctacagtgctgtgaccaccccggggcctggccccacttccacatccccgctgttgcccgtcagccccctccccaccctcaccttggactcgctttctcaggtttcccagttcatggcgtgtgaggagctgcccccgggggccccagagcttccccaagaaggccccacacgacgcctctccctaccgggccagctgggggccctcacctcccagcccctgcacagacacggctcggacccgggcagttagtggggctgcccagtgtggacacgtggctcacccagggatcaaggcgctgctgggccgctccccttggaggccctgctcaggaggccctgaccgtggaaggggagaggaactcgaaagcacagctcctcccccagcccttgggaccatcttctcctgcagtcccctgggccccagtgagaggggcaggggcagggccggcagtaggtggggcctgtggtccccccactgccctgagggcattagctggtctaactgcccggaggcacccggccctgggccttaggcacctcaaggacttttctgctatttactgctcttattgttaaggataataattaaggatcatatgaataattaatgaagatgctgatgactatgaataataaataattatcctgaggaga

SEQ ID NO: 577 - DNA, 3884 bp, Homo sapiens
  source 1..3884: mol_type = genomic DNA
  misc_feature 1..3884: note = cDNA of KCNH2 gene SNP c.2624C>G (p.Thr875Arg)
atgccggtgcggaggggccacgtcgcgccgcagaacaccttcctggacaccatcatccgcaagtttgagggccagagccgtaagttcatcatcgccaacgctcgggtggagaactgcgccgtcatctactgcaacgacggcttctgcgagctgtgcggctactcgcgggccgaggtgatgcagcgaccctgcacctgcgacttcctgcacgggccgcgcacgcagcgccgcgctgccgcgcagatcgcgcaggcactgctgggcgccgaggagcgcaaagtggaaatcgccttctaccggaaagatgggagctgcttcctatgtctggtggatgtggtgcccgtgaagaacgaggatggggctgtcatcatgttcatcctcaatttcgaggtggtgatggagaaggacatggtggggtccccggctcatgacaccaaccaccggggcccccccaccagctggctggccccaggccgcgccaagaccttccgcctgaagctgcccgcgctgctggcgctgacggcccgggagtcgtcggtgcggtcgggcggcgcgggcggcgcgggcgccccgggggccgtggtggtggacgtggacctgacgcccgcggcacccagcagcgagtcgctggccctggacgaagtgacagccatggacaaccacgtggcagggctcgggcccgcggaggagcggcgtgcgctggtgggtcccggctctccgccccgcagcgcgcccggccagctcccatcgccccgggcgcacagcctcaaccccgacgcctcgggctccagctgcagcctggcccggacgcgctcccgagaaagctgcgccagcgtgcgccgcgcctcgtcggccgacgacatcgaggccatgcgcgccggggtgctgcccccgccaccgcgccacgccagcaccggggccatgcacccactgcgcagcggcttgctcaactccacctcggactccgacctcgtgcgctaccgcaccattagcaagattccccaaatcaccctcaactttgtggacctcaagggcgaccccttcttggcttcgcccaccagtgaccgtgagatcatagcacctaagataaaggagcgaacccacaatgtcactgagaaggtcacccaggtcctgtccctgggcgccgacgtgctgcctgagtacaagctgcaggcaccgcgcatccaccgctggaccatcctgcattacagccccttcaaggccgtgtgggactggctcatcctgctgctggtcatctacacggctgtcttcacaccctactcggctgccttcctgctgaaggagacggaagaaggcccgcctgctaccgagtgtggctacgcctgccagccgctggctgtggtggacctcatcgtggacatcatgttcattgtggacatcctcatcaacttccgcaccacctacgtcaatgccaacgaggaggtggtcagccaccccggccgcatcgccgtccactacttcaagggctggttcctcatcgacatggtggccgccatccccttcgacctgctcatcttcggctctggctctgaggagctgatcgggctgctgaagactgcgcggctgctgcggctggtgcgcgtggcgcggaagctggatcgctactcagagtacggcgcggccgtgctgttcttgctcatgtgcacctttgcgctcatcgcgcactggctagcctgcatctggtacgccatcggcaacatggagcagccacacatggactcacgcatcggctggctgcacaacctgggcgaccagataggcaaaccctacaacagcagcggcctgggcggcccctccatcaaggacaagtatgtgacggcgctctacttcaccttcagcagcctcaccagtgtgggcttcggcaacgtctctcccaacaccaactcagagaagatcttctccatctgcgtcatgctcattggctccctcatgtatgctagcatcttcggcaacgtgtcggccatcatccagcggctgtactcgggcacagcccgctaccacacacagatgctgcgggtgcgggagttcatccgcttccaccagatccccaatcccctgcgccagcgcctcgaggagtacttccagcacgcctggtcctacaccaacggcatcgacatgaacgcggtgctgaagggcttccctgagtgcctgcaggctgacatctgcctgcacctgaaccgctcactgctgcagcactgcaaacccttccgaggggccaccaagggctgccttcgggccctggccatgaagttcaagaccacacatgcaccgccaggggacacactggtgcatgctggggacctgctcaccgccctgtacttcatctcccggggctccatcgagatcctgcggggcgacgtcgtcgtggccatcctggggaagaatgacatctttggggagcctctgaacctgtatgcaaggcctggcaagtcgaacggggatgtgcgggccctcacctactgtgacctacacaagatccatcgggacgacctgctggaggtgctggacatgtaccctgagttctccgaccacttctggtccagcctggagatcaccttcaacctgcgagataccaacatgatcccgggctcccccggcagtagggagttagagggtggcttcagtcggcaacgcaagcgcaagttgtccttccgcaggcgcacggacaaggacacggagcagccaggggaggtgtcggccttggggccgggccgggcgggggcagggccgagtagccggggccggccgggggggccgtggggggagagcccgtccagtggcccctccagccctgagagcagtgaggatgagggcccaggccgcagctccagccccctccgcctggtgcccttctccagccccaggccccccggagagccgccgggtggggagcccctgatggaggactgcgagaagagcagcgacacttgcaaccccctgtcaggcgccttctcaggagtgtccaacattttcagcttctggggggacagtcggggccgccagtaccaggagctccctcgatgccccgcccccacccccagcctcctcaacatccccctctccagcccgggtcggcggccccggggcgacgtggagagcaggctggatgccctccagcgccagctcaacaggctggagacccggctgagtgcagacatggccactgtcctgcagctgctacagaggcagatgacgctggtcccgcccgcctacagtgctgtgaccaccccggggcctggccccacttccacatccccgctgttgcccgtcagccccctccccaccctcaccttggactcgctttctcaggtttcccagttcatggcgtgtgaggagctgcccccgggggccccagagcttccccaagaaggccccacacgacgcctctccctaccgggccagctgggggccctcacctcccagcccctgcacagacacggctcggacccgggcagttagtggggctgcccagtgtggacacgtggctcacccagggatcaaggcgctgctgggccgctccccttggaggccctgctcaggaggccctgaccgtggaaggggagaggaactcgaaagcacagctcctcccccagcccttgggaccatcttctcctgcagtcccctgggccccagtgagaggggcaggggcagggccggcagtaggtggggcctgtggtccccccactgccctgagggcattagctggtctaactgcccggaggcacccggccctgggccttaggcacctcaaggacttttctgctatttactgctcttattgttaaggataataattaaggatcatatgaataattaatgaagatgctgatgactatgaataataaataattatcctgaggaga

SEQ ID NO: 578 - DNA, 3884 bp, Homo sapiens
  source 1..3884: mol_type = genomic DNA
  misc_feature 1..3884: note = cDNA of KCNH2 gene SNP c.2624C>T (p.Thr875Met)
atgccggtgcggaggggccacgtcgcgccgcagaacaccttcctggacaccatcatccgcaagtttgagggccagagccgtaagttcatcatcgccaacgctcgggtggagaactgcgccgtcatctactgcaacgacggcttctgcgagctgtgcggctactcgcgggccgaggtgatgcagcgaccctgcacctgcgacttcctgcacgggccgcgcacgcagcgccgcgctgccgcgcagatcgcgcaggcactgctgggcgccgaggagcgcaaagtggaaatcgccttctaccggaaagatgggagctgcttcctatgtctggtggatgtggtgcccgtgaagaacgaggatggggctgtcatcatgttcatcctcaatttcgaggtggtgatggagaaggacatggtggggtccccggctcatgacaccaaccaccggggcccccccaccagctggctggccccaggccgcgccaagaccttccgcctgaagctgcccgcgctgctggcgctgacggcccgggagtcgtcggtgcggtcgggcggcgcgggcggcgcgggcgccccgggggccgtggtggtggacgtggacctgacgcccgcggcacccagcagcgagtcgctggccctggacgaagtgacagccatggacaaccacgtggcagggctcgggcccgcggaggagcggcgtgcgctggtgggtcccggctctccgccccgcagcgcgcccggccagctcccatcgccccgggcgcacagcctcaaccccgacgcctcgggctccagctgcagcctggcccggacgcgctcccgagaaagctgcgccagcgtgcgccgcgcctcgtcggccgacgacatcgaggccatgcgcgccggggtgctgcccccgccaccgcgccacgccagcaccggggccatgcacccactgcgcagcggcttgctcaactccacctcggactccgacctcgtgcgctaccgcaccattagcaagattccccaaatcaccctcaactttgtggacctcaagggcgaccccttcttggcttcgcccaccagtgaccgtgagatcatagcacctaagataaaggagcgaacccacaatgtcactgagaaggtcacccaggtcctgtccctgggcgccgacgtgctgcctgagtacaagctgcaggcaccgcgcatccaccgctggaccatcctgcattacagccccttcaaggccgtgtgggactggctcatcctgctgctggtcatctacacggctgtcttcacaccctactcggctgccttcctgctgaaggagacggaagaaggcccgcctgctaccgagtgtggctacgcctgccagccgctggctgtggtggacctcatcgtggacatcatgttcattgtggacatcctcatcaacttccgcaccacctacgtcaatgccaacgaggaggtggtcagccaccccggccgcatcgccgtccactacttcaagggctggttcctcatcgacatggtggccgccatccccttcgacctgctcatcttcggctctggctctgaggagctgatcgggctgctgaagactgcgcggctgctgcggctggtgcgcgtggcgcggaagctggatcgctactcagagtacggcgcggccgtgctgttcttgctcatgtgcacctttgcgctcatcgcgcactggctagcctgcatctggtacgccatcggcaacatggagcagccacacatggactcacgcatcggctggctgcacaacctgggcgaccagataggcaaaccctacaacagcagcggcctgggcggcccctccatcaaggacaagtatgtgacggcgctctacttcaccttcagcagcctcaccagtgtgggcttcggcaacgtctctcccaacaccaactcagagaagatcttctccatctgcgtcatgctcattggctccctcatgtatgctagcatcttcggcaacgtgtcggccatcatccagcggctgtactcgggcacagcccgctaccacacacagatgctgcgggtgcgggagttcatccgcttccaccagatccccaatcccctgcgccagcgcctcgaggagtacttccagcacgcctggtcctacaccaacggcatcgacatgaacgcggtgctgaagggcttccctgagtgcctgcaggctgacatctgcctgcacctgaaccgctcactgctgcagcactgcaaacccttccgaggggccaccaagggctgccttcgggccctggccatgaagttcaagaccacacatgcaccgccaggggacacactggtgcatgctggggacctgctcaccgccctgtacttcatctcccggggctccatcgagatcctgcggggcgacgtcgtcgtggccatcctggggaagaatgacatctttggggagcctctgaacctgtatgcaaggcctggcaagtcgaacggggatgtgcgggccctcacctactgtgacctacacaagatccatcgggacgacctgctggaggtgctggacatgtaccctgagttctccgaccacttctggtccagcctggagatcaccttcaacctgcgagataccaacatgatcccgggctcccccggcagtatggagttagagggtggcttcagtcggcaacgcaagcgcaagttgtccttccgcaggcgcacggacaaggacacggagcagccaggggaggtgtcggccttggggccgggccgggcgggggcagggccgagtagccggggccggccgggggggccgtggggggagagcccgtccagtggcccctccagccctgagagcagtgaggatgagggcccaggccgcagctccagccccctccgcctggtgcccttctccagccccaggccccccggagagccgccgggtggggagcccctgatggaggactgcgagaagagcagcgacacttgcaaccccctgtcaggcgccttctcaggagtgtccaacattttcagcttctggggggacagtcggggccgccagtaccaggagctccctcgatgccccgcccccacccccagcctcctcaacatccccctctccagcccgggtcggcggccccggggcgacgtggagagcaggctggatgccctccagcgccagctcaacaggctggagacccggctgagtgcagacatggccactgtcctgcagctgctacagaggcagatgacgctggtcccgcccgcctacagtgctgtgaccaccccggggcctggccccacttccacatccccgctgttgcccgtcagccccctccccaccctcaccttggactcgctttctcaggtttcccagttcatggcgtgtgaggagctgcccccgggggccccagagcttccccaagaaggccccacacgacgcctctccctaccgggccagctgggggccctcacctcccagcccctgcacagacacggctcggacccgggcagttagtggggctgcccagtgtggacacgtggctcacccagggatcaaggcgctgctgggccgctccccttggaggccctgctcaggaggccctgaccgtggaaggggagaggaactcgaaagcacagctcctcccccagcccttgggaccatcttctcctgcagtcccctgggccccagtgagaggggcaggggcagggccggcagtaggtggggcctgtggtccccccactgccctgagggcattagctggtctaactgcccggaggcacccggccctgggccttaggcacctcaaggacttttctgctatttactgctcttattgttaaggataataattaaggatcatatgaataattaatgaagatgctgatgactatgaataataaataattatcctgaggaga

SEQ ID NO: 579 - DNA, 3884 bp, Homo sapiens
  source 1..3884: mol_type = genomic DNA
  misc_feature 1..3884: note = cDNA of KCNH2 gene SNP c.2626G>A (p.Glu876Lys)
atgccggtgcggaggggccacgtcgcgccgcagaacaccttcctggacaccatcatccgcaagtttgagggccagagccgtaagttcatcatcgccaacgctcgggtggagaactgcgccgtcatctactgcaacgacggcttctgcgagctgtgcggctactcgcgggccgaggtgatgcagcgaccctgcacctgcgacttcctgcacgggccgcgcacgcagcgccgcgctgccgcgcagatcgcgcaggcactgctgggcgccgaggagcgcaaagtggaaatcgccttctaccggaaagatgggagctgcttcctatgtctggtggatgtggtgcccgtgaagaacgaggatggggctgtcatcatgttcatcctcaatttcgaggtggtgatggagaaggacatggtggggtccccggctcatgacaccaaccaccggggcccccccaccagctggctggccccaggccgcgccaagaccttccgcctgaagctgcccgcgctgctggcgctgacggcccgggagtcgtcggtgcggtcgggcggcgcgggcggcgcgggcgccccgggggccgtggtggtggacgtggacctgacgcccgcggcacccagcagcgagtcgctggccctggacgaagtgacagccatggacaaccacgtggcagggctcgggcccgcggaggagcggcgtgcgctggtgggtcccggctctccgccccgcagcgcgcccggccagctcccatcgccccgggcgcacagcctcaaccccgacgcctcgggctccagctgcagcctggcccggacgcgctcccgagaaagctgcgccagcgtgcgccgcgcctcgtcggccgacgacatcgaggccatgcgcgccggggtgctgcccccgccaccgcgccacgccagcaccggggccatgcacccactgcgcagcggcttgctcaactccacctcggactccgacctcgtgcgctaccgcaccattagcaagattccccaaatcaccctcaactttgtggacctcaagggcgaccccttcttggcttcgcccaccagtgaccgtgagatcatagcacctaagataaaggagcgaacccacaatgtcactgagaaggtcacccaggtcctgtccctgggcgccgacgtgctgcctgagtacaagctgcaggcaccgcgcatccaccgctggaccatcctgcattacagccccttcaaggccgtgtgggactggctcatcctgctgctggtcatctacacggctgtcttcacaccctactcggctgccttcctgctgaaggagacggaagaaggcccgcctgctaccgagtgtggctacgcctgccagccgctggctgtggtggacctcatcgtggacatcatgttcattgtggacatcctcatcaacttccgcaccacctacgtcaatgccaacgaggaggtggtcagccaccccggccgcatcgccgtccactacttcaagggctggttcctcatcgacatggtggccgccatccccttcgacctgctcatcttcggctctggctctgaggagctgatcgggctgctgaagactgcgcggctgctgcggctggtgcgcgtggcgcggaagctggatcgctactcagagtacggcgcggccgtgctgttcttgctcatgtgcacctttgcgctcatcgcgcactggctagcctgcatctggtacgccatcggcaacatggagcagccacacatggactcacgcatcggctggctgcacaacctgggcgaccagataggcaaaccctacaacagcagcggcctgggcggcccctccatcaaggacaagtatgtgacggcgctctacttcaccttcagcagcctcaccagtgtgggcttcggcaacgtctctcccaacaccaactcagagaagatcttctccatctgcgtcatgctcattggctccctcatgtatgctagcatcttcggcaacgtgtcggccatcatccagcggctgtactcgggcacagcccgctaccacacacagatgctgcgggtgcgggagttcatccgcttccaccagatccccaatcccctgcgccagcgcctcgaggagtacttccagcacgcctggtcctacaccaacggcatcgacatgaacgcggtgctgaagggcttccctgagtgcctgcaggctgacatctgcctgcacctgaaccgctcactgctgcagcactgcaaacccttccgaggggccaccaagggctgccttcgggccctggccatgaagttcaagaccacacatgcaccgccaggggacacactggtgcatgctggggacctgctcaccgccctgtacttcatctcccggggctccatcgagatcctgcggggcgacgtcgtcgtggccatcctggggaagaatgacatctttggggagcctctgaacctgtatgcaaggcctggcaagtcgaacggggatgtgcgggccctcacctactgtgacctacacaagatccatcgggacgacctgctggaggtgctggacatgtaccctgagttctccgaccacttctggtccagcctggagatcaccttcaacctgcgagataccaacatgatcccgggctcccccggcagtacgaagttagagggtggcttcagtcggcaacgcaagcgcaagttgtccttccgcaggcgcacggacaaggacacggagcagccaggggaggtgtcggccttggggccgggccgggcgggggcagggccgagtagccggggccggccgggggggccgtggggggagagcccgtccagtggcccctccagccctgagagcagtgaggatgagggcccaggccgcagctccagccccctccgcctggtgcccttctccagccccaggccccccggagagccgccgggtggggagcccctgatggaggactgcgagaagagcagcgacacttgcaaccccctgtcaggcgccttctcaggagtgtccaacattttcagcttctggggggacagtcggggccgccagtaccaggagctccctcgatgccccgcccccacccccagcctcctcaacatccccctctccagcccgggtcggcggccccggggcgacgtggagagcaggctggatgccctccagcgccagctcaacaggctggagacccggctgagtgcagacatggccactgtcctgcagctgctacagaggcagatgacgctggtcccgcccgcctacagtgctgtgaccaccccggggcctggccccacttccacatccccgctgttgcccgtcagccccctccccaccctcaccttggactcgctttctcaggtttcccagttcatggcgtgtgaggagctgcccccgggggccccagagcttccccaagaaggccccacacgacgcctctccctaccgggccagctgggggccctcacctcccagcccctgcacagacacggctcggacccgggcagttagtggggctgcccagtgtggacacgtggctcacccagggatcaaggcgctgctgggccgctccccttggaggccctgctcaggaggccctgaccgtggaaggggagaggaactcgaaagcacagctcctcccccagcccttgggaccatcttctcctgcagtcccctgggccccagtgagaggggcaggggcagggccggcagtaggtggggcctgtggtccccccactgccctgagggcattagctggtctaactgcccggaggcacccggccctgggccttaggcacctcaaggacttttctgctatttactgctcttattgttaaggataataattaaggatcatatgaataattaatgaagatgctgatgactatgaataataaataattatcctgaggaga

SEQ ID NO: 580 - DNA, 3884 bp, Homo sapiens
  source 1..3884: mol_type = genomic DNA
  misc_feature 1..3884: note = cDNA of KCNH2 gene SNP c.2626G>T (p.Glu876Ter)
atgccggtgcggaggggccacgtcgcgccgcagaacaccttcctggacaccatcatccgcaagtttgagggccagagccgtaagttcatcatcgccaacgctcgggtggagaactgcgccgtcatctactgcaacgacggcttctgcgagctgtgcggctactcgcgggccgaggtgatgcagcgaccctgcacctgcgacttcctgcacgggccgcgcacgcagcgccgcgctgccgcgcagatcgcgcaggcactgctgggcgccgaggagcgcaaagtggaaatcgccttctaccggaaagatgggagctgcttcctatgtctggtggatgtggtgcccgtgaagaacgaggatggggctgtcatcatgttcatcctcaatttcgaggtggtgatggagaaggacatggtggggtccccggctcatgacaccaaccaccggggcccccccaccagctggctggccccaggccgcgccaagaccttccgcctgaagctgcccgcgctgctggcgctgacggcccgggagtcgtcggtgcggtcgggcggcgcgggcggcgcgggcgccccgggggccgtggtggtggacgtggacctgacgcccgcggcacccagcagcgagtcgctggccctggacgaagtgacagccatggacaaccacgtggcagggctcgggcccgcggaggagcggcgtgcgctggtgggtcccggctctccgccccgcagcgcgcccggccagctcccatcgccccgggcgcacagcctcaaccccgacgcctcgggctccagctgcagcctggcccggacgcgctcccgagaaagctgcgccagcgtgcgccgcgcctcgtcggccgacgacatcgaggccatgcgcgccggggtgctgcccccgccaccgcgccacgccagcaccggggccatgcacccactgcgcagcggcttgctcaactccacctcggactccgacctcgtgcgctaccgcaccattagcaagattccccaaatcaccctcaactttgtggacctcaagggcgaccccttcttggcttcgcccaccagtgaccgtgagatcatagcacctaagataaaggagcgaacccacaatgtcactgagaaggtcacccaggtcctgtccctgggcgccgacgtgctgcctgagtacaagctgcaggcaccgcgcatccaccgctggaccatcctgcattacagccccttcaaggccgtgtgggactggctcatcctgctgctggtcatctacacggctgtcttcacaccctactcggctgccttcctgctgaaggagacggaagaaggcccgcctgctaccgagtgtggctacgcctgccagccgctggctgtggtggacctcatcgtggacatcatgttcattgtggacatcctcatcaacttccgcaccacctacgtcaatgccaacgaggaggtggtcagccaccccggccgcatcgccgtccactacttcaagggctggttcctcatcgacatggtggccgccatccccttcgacctgctcatcttcggctctggctctgaggagctgatcgggctgctgaagactgcgcggctgctgcggctggtgcgcgtggcgcggaagctggatcgctactcagagtacggcgcggccgtgctgttcttgctcatgtgcacctttgcgctcatcgcgcactggctagcctgcatctggtacgccatcggcaacatggagcagccacacatggactcacgcatcggctggctgcacaacctgggcgaccagataggcaaaccctacaacagcagcggcctgggcggcccctccatcaaggacaagtatgtgacggcgctctacttcaccttcagcagcctcaccagtgtgggcttcggcaacgtctctcccaacaccaactcagagaagatcttctccatctgcgtcatgctcattggctccctcatgtatgctagcatcttcggcaacgtgtcggccatcatccagcggctgtactcgggcacagcccgctaccacacacagatgctgcgggtgcgggagttcatccgcttccaccagatccccaatcccctgcgccagcgcctcgaggagtacttccagcacgcctggtcctacaccaacggcatcgacatgaacgcggtgctgaagggcttccctgagtgcctgcaggctgacatctgcctgcacctgaaccgctcactgctgcagcactgcaaacccttccgaggggccaccaagggctgccttcgggccctggccatgaagttcaagaccacacatgcaccgccaggggacacactggtgcatgctggggacctgctcaccgccctgtacttcatctcccggggctccatcgagatcctgcggggcgacgtcgtcgtggccatcctggggaagaatgacatctttggggagcctctgaacctgtatgcaaggcctggcaagtcgaacggggatgtgcgggccctcacctactgtgacctacacaagatccatcgggacgacctgctggaggtgctggacatgtaccctgagttctccgaccacttctggtccagcctggagatcaccttcaacctgcgagataccaacatgatcccgggctcccccggcagtacgtagttagagggtggcttcagtcggcaacgcaagcgcaagttgtccttccgcaggcgcacggacaaggacacggagcagccaggggaggtgtcggccttggggccgggccgggcgggggcagggccgagtagccggggccggccgggggggccgtggggggagagcccgtccagtggcccctccagccctgagagcagtgaggatgagggcccaggccgcagctccagccccctccgcctggtgcccttctccagccccaggccccccggagagccgccgggtggggagcccctgatggaggactgcgagaagagcagcgacacttgcaaccccctgtcaggcgccttctcaggagtgtccaacattttcagcttctggggggacagtcggggccgccagtaccaggagctccctcgatgccccgcccccacccccagcctcctcaacatccccctctccagcccgggtcggcggccccggggcgacgtggagagcaggctggatgccctccagcgccagctcaacaggctggagacccggctgagtgcagacatggccactgtcctgcagctgctacagaggcagatgacgctggtcccgcccgcctacagtgctgtgaccaccccggggcctggccccacttccacatccccgctgttgcccgtcagccccctccccaccctcaccttggactcgctttctcaggtttcccagttcatggcgtgtgaggagctgcccccgggggccccagagcttccccaagaaggccccacacgacgcctctccctaccgggccagctgggggccctcacctcccagcccctgcacagacacggctcggacccgggcagttagtggggctgcccagtgtggacacgtggctcacccagggatcaaggcgctgctgggccgctccccttggaggccctgctcaggaggccctgaccgtggaaggggagaggaactcgaaagcacagctcctcccccagcccttgggaccatcttctcctgcagtcccctgggccccagtgagaggggcaggggcagggccggcagtaggtggggcctgtggtccccccactgccctgagggcattagctggtctaactgcccggaggcacccggccctgggccttaggcacctcaaggacttttctgctatttactgctcttattgttaaggataataattaaggatcatatgaataattaatgaagatgctgatgactatgaataataaataattatcctgaggaga

SEQ ID NO: 581 - DNA, 3884 bp, Homo sapiens
  source 1..3884: mol_type = genomic DNA
  misc_feature 1..3884: note = cDNA of KCNH2 gene SNP c.2634G>T (p.Glu878Asp)
atgccggtgcggaggggccacgtcgcgccgcagaacaccttcctggacaccatcatccgcaagtttgagggccagagccgtaagttcatcatcgccaacgctcgggtggagaactgcgccgtcatctactgcaacgacggcttctgcgagctgtgcggctactcgcgggccgaggtgatgcagcgaccctgcacctgcgacttcctgcacgggccgcgcacgcagcgccgcgctgccgcgcagatcgcgcaggcactgctgggcgccgaggagcgcaaagtggaaatcgccttctaccggaaagatgggagctgcttcctatgtctggtggatgtggtgcccgtgaagaacgaggatggggctgtcatcatgttcatcctcaatttcgaggtggtgatggagaaggacatggtggggtccccggctcatgacaccaaccaccggggcccccccaccagctggctggccccaggccgcgccaagaccttccgcctgaagctgcccgcgctgctggcgctgacggcccgggagtcgtcggtgcggtcgggcggcgcgggcggcgcgggcgccccgggggccgtggtggtggacgtggacctgacgcccgcggcacccagcagcgagtcgctggccctggacgaagtgacagccatggacaaccacgtggcagggctcgggcccgcggaggagcggcgtgcgctggtgggtcccggctctccgccccgcagcgcgcccggccagctcccatcgccccgggcgcacagcctcaaccccgacgcctcgggctccagctgcagcctggcccggacgcgctcccgagaaagctgcgccagcgtgcgccgcgcctcgtcggccgacgacatcgaggccatgcgcgccggggtgctgcccccgccaccgcgccacgccagcaccggggccatgcacccactgcgcagcggcttgctcaactccacctcggactccgacctcgtgcgctaccgcaccattagcaagattccccaaatcaccctcaactttgtggacctcaagggcgaccccttcttggcttcgcccaccagtgaccgtgagatcatagcacctaagataaaggagcgaacccacaatgtcactgagaaggtcacccaggtcctgtccctgggcgccgacgtgctgcctgagtacaagctgcaggcaccgcgcatccaccgctggaccatcctgcattacagccccttcaaggccgtgtgggactggctcatcctgctgctggtcatctacacggctgtcttcacaccctactcggctgccttcctgctgaaggagacggaagaaggcccgcctgctaccgagtgtggctacgcctgccagccgctggctgtggtggacctcatcgtggacatcatgttcattgtggacatcctcatcaacttccgcaccacctacgtcaatgccaacgaggaggtggtcagccaccccggccgcatcgccgtccactacttcaagggctggttcctcatcgacatggtggccgccatccccttcgacctgctcatcttcggctctggctctgaggagctgatcgggctgctgaagactgcgcggctgctgcggctggtgcgcgtggcgcggaagctggatcgctactcagagtacggcgcggccgtgctgttcttgctcatgtgcacctttgcgctcatcgcgcactggctagcctgcatctggtacgccatcggcaacatggagcagccacacatggactcacgcatcggctggctgcacaacctgggcgaccagataggcaaaccctacaacagcagcggcctgggcggcccctccatcaaggacaagtatgtgacggcgctctacttcaccttcagcagcctcaccagtgtgggcttcggcaacgtctctcccaacaccaactcagagaagatcttctccatctgcgtcatgctcattggctccctcatgtatgctagcatcttcggcaacgtgtcggccatcatccagcggctgtactcgggcacagcccgctaccacacacagatgctgcgggtgcgggagttcatccgcttccaccagatccccaatcccctgcgccagcgcctcgaggagtacttccagcacgcctggtcctacaccaacggcatcgacatgaacgcggtgctgaagggcttccctgagtgcctgcaggctgacatctgcctgcacctgaaccgctcactgctgcagcactgcaaacccttccgaggggccaccaagggctgccttcgggccctggccatgaagttcaagaccacacatgcaccgccaggggacacactggtgcatgctggggacctgctcaccgccctgtacttcatctcccggggctccatcgagatcctgcggggcgacgtcgtcgtggccatcctggggaagaatgacatctttggggagcctctgaacctgtatgcaaggcctggcaagtcgaacggggatgtgcgggccctcacctactgtgacctacacaagatccatcgggacgacctgctggaggtgctggacatgtaccctgagttctccgaccacttctggtccagcctggagatcaccttcaacctgcgagataccaacatgatcccgggctcccccggcagtacggagttagatggtggcttcagtcggcaacgcaagcgcaagttgtccttccgcaggcgcacggacaaggacacggagcagccaggggaggtgtcggccttggggccgggccgggcgggggcagggccgagtagccggggccggccgggggggccgtggggggagagcccgtccagtggcccctccagccctgagagcagtgaggatgagggcccaggccgcagctccagccccctccgcctggtgcccttctccagccccaggccccccggagagccgccgggtggggagcccctgatggaggactgcgagaagagcagcgacacttgcaaccccctgtcaggcgccttctcaggagtgtccaacattttcagcttctggggggacagtcggggccgccagtaccaggagctccctcgatgccccgcccccacccccagcctcctcaacatccccctctccagcccgggtcggcggccccggggcgacgtggagagcaggctggatgccctccagcgccagctcaacaggctggagacccggctgagtgcagacatggccactgtcctgcagctgctacagaggcagatgacgctggtcccgcccgcctacagtgctgtgaccaccccggggcctggccccacttccacatccccgctgttgcccgtcagccccctccccaccctcaccttggactcgctttctcaggtttcccagttcatggcgtgtgaggagctgcccccgggggccccagagcttccccaagaaggccccacacgacgcctctccctaccgggccagctgggggccctcacctcccagcccctgcacagacacggctcggacccgggcagttagtggggctgcccagtgtggacacgtggctcacccagggatcaaggcgctgctgggccgctccccttggaggccctgctcaggaggccctgaccgtggaaggggagaggaactcgaaagcacagctcctcccccagcccttgggaccatcttctcctgcagtcccctgggccccagtgagaggggcaggggcagggccggcagtaggtggggcctgtggtccccccactgccctgagggcattagctggtctaactgcccggaggcacccggccctgggccttaggcacctcaaggacttttctgctatttactgctcttattgttaaggataataattaaggatcatatgaataattaatgaagatgctgatgactatgaataataaataattatcctgaggaga

SEQ ID NO: 582 - DNA, 3884 bp, Homo sapiens
  source 1..3884: mol_type = genomic DNA
  misc_feature 1..3884: note = cDNA of KCNH2 gene SNP c.2635G>A (p.Gly879Ser)
atgccggtgcggaggggccacgtcgcgccgcagaacaccttcctggacaccatcatccgcaagtttgagggccagagccgtaagttcatcatcgccaacgctcgggtggagaactgcgccgtcatctactgcaacgacggcttctgcgagctgtgcggctactcgcgggccgaggtgatgcagcgaccctgcacctgcgacttcctgcacgggccgcgcacgcagcgccgcgctgccgcgcagatcgcgcaggcactgctgggcgccgaggagcgcaaagtggaaatcgccttctaccggaaagatgggagctgcttcctatgtctggtggatgtggtgcccgtgaagaacgaggatggggctgtcatcatgttcatcctcaatttcgaggtggtgatggagaaggacatggtggggtccccggctcatgacaccaaccaccggggcccccccaccagctggctggccccaggccgcgccaagaccttccgcctgaagctgcccgcgctgctggcgctgacggcccgggagtcgtcggtgcggtcgggcggcgcgggcggcgcgggcgccccgggggccgtggtggtggacgtggacctgacgcccgcggcacccagcagcgagtcgctggccctggacgaagtgacagccatggacaaccacgtggcagggctcgggcccgcggaggagcggcgtgcgctggtgggtcccggctctccgccccgcagcgcgcccggccagctcccatcgccccgggcgcacagcctcaaccccgacgcctcgggctccagctgcagcctggcccggacgcgctcccgagaaagctgcgccagcgtgcgccgcgcctcgtcggccgacgacatcgaggccatgcgcgccggggtgctgcccccgccaccgcgccacgccagcaccggggccatgcacccactgcgcagcggcttgctcaactccacctcggactccgacctcgtgcgctaccgcaccattagcaagattccccaaatcaccctcaactttgtggacctcaagggcgaccccttcttggcttcgcccaccagtgaccgtgagatcatagcacctaagataaaggagcgaacccacaatgtcactgagaaggtcacccaggtcctgtccctgggcgccgacgtgctgcctgagtacaagctgcaggcaccgcgcatccaccgctggaccatcctgcattacagccccttcaaggccgtgtgggactggctcatcctgctgctggtcatctacacggctgtcttcacaccctactcggctgccttcctgctgaaggagacggaagaaggcccgcctgctaccgagtgtggctacgcctgccagccgctggctgtggtggacctcatcgtggacatcatgttcattgtggacatcctcatcaacttccgcaccacctacgtcaatgccaacgaggaggtggtcagccaccccggccgcatcgccgtccactacttcaagggctggttcctcatcgacatggtggccgccatccccttcgacctgctcatcttcggctctggctctgaggagctgatcgggctgctgaagactgcgcggctgctgcggctggtgcgcgtggcgcggaagctggatcgctactcagagtacggcgcggccgtgctgttcttgctcatgtgcacctttgcgctcatcgcgcactggctagcctgcatctggtacgccatcggcaacatggagcagccacacatggactcacgcatcggctggctgcacaacctgggcgaccagataggcaaaccctacaacagcagcggcctgggcggcccctccatcaaggacaagtatgtgacggcgctctacttcaccttcagcagcctcaccagtgtgggcttcggcaacgtctctcccaacaccaactcagagaagatcttctccatctgcgtcatgctcattggctccctcatgtatgctagcatcttcggcaacgtgtcggccatcatccagcggctgtactcgggcacagcccgctaccacacacagatgctgcgggtgcgggagttcatccgcttccaccagatccccaatcccctgcgccagcgcctcgaggagtacttccagcacgcctggtcctacaccaacggcatcgacatgaacgcggtgctgaagggcttccctgagtgcctgcaggctgacatctgcctgcacctgaaccgctcactgctgcagcactgcaaacccttccgaggggccaccaagggctgccttcgggccctggccatgaagttcaagaccacacatgcaccgccaggggacacactggtgcatgctggggacctgctcaccgccctgtacttcatctcccggggctccatcgagatcctgcggggcgacgtcgtcgtggccatcctggggaagaatgacatctttggggagcctctgaacctgtatgcaaggcctggcaagtcgaacggggatgtgcgggccctcacctactgtgacctacacaagatccatcgggacgacctgctggaggtgctggacatgtaccctgagttctccgaccacttctggtccagcctggagatcaccttcaacctgcgagataccaacatgatcccgggctcccccggcagtacggagttagagagtggcttcagtcggcaacgcaagcgcaagttgtccttccgcaggcgcacggacaaggacacggagcagccaggggaggtgtcggccttggggccgggccgggcgggggcagggccgagtagccggggccggccgggggggccgtggggggagagcccgtccagtggcccctccagccctgagagcagtgaggatgagggcccaggccgcagctccagccccctccgcctggtgcccttctccagccccaggccccccggagagccgccgggtggggagcccctgatggaggactgcgagaagagcagcgacacttgcaaccccctgtcaggcgccttctcaggagtgtccaacattttcagcttctggggggacagtcggggccgccagtaccaggagctccctcgatgccccgcccccacccccagcctcctcaacatccccctctccagcccgggtcggcggccccggggcgacgtggagagcaggctggatgccctccagcgccagctcaacaggctggagacccggctgagtgcagacatggccactgtcctgcagctgctacagaggcagatgacgctggtcccgcccgcctacagtgctgtgaccaccccggggcctggccccacttccacatccccgctgttgcccgtcagccccctccccaccctcaccttggactcgctttctcaggtttcccagttcatggcgtgtgaggagctgcccccgggggccccagagcttccccaagaaggccccacacgacgcctctccctaccgggccagctgggggccctcacctcccagcccctgcacagacacggctcggacccgggcagttagtggggctgcccagtgtggacacgtggctcacccagggatcaaggcgctgctgggccgctccccttggaggccctgctcaggaggccctgaccgtggaaggggagaggaactcgaaagcacagctcctcccccagcccttgggaccatcttctcctgcagtcccctgggccccagtgagaggggcaggggcagggccggcagtaggtggggcctgtggtccccccactgccctgagggcattagctggtctaactgcccggaggcacccggccctgggccttaggcacctcaaggacttttctgctatttactgctcttattgttaaggataataattaaggatcatatgaataattaatgaagatgctgatgactatgaataataaataattatcctgaggaga

SEQ ID NO: 583 - DNA, 3884 bp, Homo sapiens
  source 1..3884: mol_type = genomic DNA
  misc_feature 1..3884: note = cDNA of KCNH2 gene SNP c.2635G>C (p.Gly879Arg)
atgccggtgcggaggggccacgtcgcgccgcagaacaccttcctggacaccatcatccgcaagtttgagggccagagccgtaagttcatcatcgccaacgctcgggtggagaactgcgccgtcatctactgcaacgacggcttctgcgagctgtgcggctactcgcgggccgaggtgatgcagcgaccctgcacctgcgacttcctgcacgggccgcgcacgcagcgccgcgctgccgcgcagatcgcgcaggcactgctgggcgccgaggagcgcaaagtggaaatcgccttctaccggaaagatgggagctgcttcctatgtctggtggatgtggtgcccgtgaagaacgaggatggggctgtcatcatgttcatcctcaatttcgaggtggtgatggagaaggacatggtggggtccccggctcatgacaccaaccaccggggcccccccaccagctggctggccccaggccgcgccaagaccttccgcctgaagctgcccgcgctgctggcgctgacggcccgggagtcgtcggtgcggtcgggcggcgcgggcggcgcgggcgccccgggggccgtggtggtggacgtggacctgacgcccgcggcacccagcagcgagtcgctggccctggacgaagtgacagccatggacaaccacgtggcagggctcgggcccgcggaggagcggcgtgcgctggtgggtcccggctctccgccccgcagcgcgcccggccagctcccatcgccccgggcgcacagcctcaaccccgacgcctcgggctccagctgcagcctggcccggacgcgctcccgagaaagctgcgccagcgtgcgccgcgcctcgtcggccgacgacatcgaggccatgcgcgccggggtgctgcccccgccaccgcgccacgccagcaccggggccatgcacccactgcgcagcggcttgctcaactccacctcggactccgacctcgtgcgctaccgcaccattagcaagattccccaaatcaccctcaactttgtggacctcaagggcgaccccttcttggcttcgcccaccagtgaccgtgagatcatagcacctaagataaaggagcgaacccacaatgtcactgagaaggtcacccaggtcctgtccctgggcgccgacgtgctgcctgagtacaagctgcaggcaccgcgcatccaccgctggaccatcctgcattacagccccttcaaggccgtgtgggactggctcatcctgctgctggtcatctacacggctgtcttcacaccctactcggctgccttcctgctgaaggagacggaagaaggcccgcctgctaccgagtgtggctacgcctgccagccgctggctgtggtggacctcatcgtggacatcatgttcattgtggacatcctcatcaacttccgcaccacctacgtcaatgccaacgaggaggtggtcagccaccccggccgcatcgccgtccactacttcaagggctggttcctcatcgacatggtggccgccatccccttcgacctgctcatcttcggctctggctctgaggagctgatcgggctgctgaagactgcgcggctgctgcggctggtgcgcgtggcgcggaagctggatcgctactcagagtacggcgcggccgtgctgttcttgctcatgtgcacctttgcgctcatcgcgcactggctagcctgcatctggtacgccatcggcaacatggagcagccacacatggactcacgcatcggctggctgcacaacctgggcgaccagataggcaaaccctacaacagcagcggcctgggcggcccctccatcaaggacaagtatgtgacggcgctctacttcaccttcagcagcctcaccagtgtgggcttcggcaacgtctctcccaacaccaactcagagaagatcttctccatctgcgtcatgctcattggctccctcatgtatgctagcatcttcggcaacgtgtcggccatcatccagcggctgtactcgggcacagcccgctaccacacacagatgctgcgggtgcgggagttcatccgcttccaccagatccccaatcccctgcgccagcgcctcgaggagtacttccagcacgcctggtcctacaccaacggcatcgacatgaacgcggtgctgaagggcttccctgagtgcctgcaggctgacatctgcctgcacctgaaccgctcactgctgcagcactgcaaacccttccgaggggccaccaagggctgccttcgggccctggccatgaagttcaagaccacacatgcaccgccaggggacacactggtgcatgctggggacctgctcaccgccctgtacttcatctcccggggctccatcgagatcctgcggggcgacgtcgtcgtggccatcctggggaagaatgacatctttggggagcctctgaacctgtatgcaaggcctggcaagtcgaacggggatgtgcgggccctcacctactgtgacctacacaagatccatcgggacgacctgctggaggtgctggacatgtaccctgagttctccgaccacttctggtccagcctggagatcaccttcaacctgcgagataccaacatgatcccgggctcccccggcagtacggagttagagcgtggcttcagtcggcaacgcaagcgcaagttgtccttccgcaggcgcacggacaaggacacggagcagccaggggaggtgtcggccttggggccgggccgggcgggggcagggccgagtagccggggccggccgggggggccgtggggggagagcccgtccagtggcccctccagccctgagagcagtgaggatgagggcccaggccgcagctccagccccctccgcctggtgcccttctccagccccaggccccccggagagccgccgggtggggagcccctgatggaggactgcgagaagagcagcgacacttgcaaccccctgtcaggcgccttctcaggagtgtccaacattttcagcttctggggggacagtcggggccgccagtaccaggagctccctcgatgccccgcccccacccccagcctcctcaacatccccctctccagcccgggtcggcggccccggggcgacgtggagagcaggctggatgccctccagcgccagctcaacaggctggagacccggctgagtgcagacatggccactgtcctgcagctgctacagaggcagatgacgctggtcccgcccgcctacagtgctgtgaccaccccggggcctggccccacttccacatccccgctgttgcccgtcagccccctccccaccctcaccttggactcgctttctcaggtttcccagttcatggcgtgtgaggagctgcccccgggggccccagagcttccccaagaaggccccacacgacgcctctccctaccgggccagctgggggccctcacctcccagcccctgcacagacacggctcggacccgggcagttagtggggctgcccagtgtggacacgtggctcacccagggatcaaggcgctgctgggccgctccccttggaggccctgctcaggaggccctgaccgtggaaggggagaggaactcgaaagcacagctcctcccccagcccttgggaccatcttctcctgcagtcccctgggccccagtgagaggggcaggggcagggccggcagtaggtggggcctgtggtccccccactgccctgagggcattagctggtctaactgcccggaggcacccggccctgggccttaggcacctcaaggacttttctgctatttactgctcttattgttaaggataataattaaggatcatatgaataattaatgaagatgctgatgactatgaataataaataattatcctgaggaga

SEQ ID NO: 584 - DNA, 3884 bp, Homo sapiens
  source 1..3884: mol_type = genomic DNA
  misc_feature 1..3884: note = cDNA of KCNH2 gene SNP c.2641T>A (p.Phe881Ile)
atgccggtgcggaggggccacgtcgcgccgcagaacaccttcctggacaccatcatccgcaagtttgagggccagagccgtaagttcatcatcgccaacgctcgggtggagaactgcgccgtcatctactgcaacgacggcttctgcgagctgtgcggctactcgcgggccgaggtgatgcagcgaccctgcacctgcgacttcctgcacgggccgcgcacgcagcgccgcgctgccgcgcagatcgcgcaggcactgctgggcgccgaggagcgcaaagtggaaatcgccttctaccggaaagatgggagctgcttcctatgtctggtggatgtggtgcccgtgaagaacgaggatggggctgtcatcatgttcatcctcaatttcgaggtggtgatggagaaggacatggtggggtccccggctcatgacaccaaccaccggggcccccccaccagctggctggccccaggccgcgccaagaccttccgcctgaagctgcccgcgctgctggcgctgacggcccgggagtcgtcggtgcggtcgggcggcgcgggcggcgcgggcgccccgggggccgtggtggtggacgtggacctgacgcccgcggcacccagcagcgagtcgctggccctggacgaagtgacagccatggacaaccacgtggcagggctcgggcccgcggaggagcggcgtgcgctggtgggtcccggctctccgccccgcagcgcgcccggccagctcccatcgccccgggcgcacagcctcaaccccgacgcctcgggctccagctgcagcctggcccggacgcgctcccgagaaagctgcgccagcgtgcgccgcgcctcgtcggccgacgacatcgaggccatgcgcgccggggtgctgcccccgccaccgcgccacgccagcaccggggccatgcacccactgcgcagcggcttgctcaactccacctcggactccgacctcgtgcgctaccgcaccattagcaagattccccaaatcaccctcaactttgtggacctcaagggcgaccccttcttggcttcgcccaccagtgaccgtgagatcatagcacctaagataaaggagcgaacccacaatgtcactgagaaggtcacccaggtcctgtccctgggcgccgacgtgctgcctgagtacaagctgcaggcaccgcgcatccaccgctggaccatcctgcattacagccccttcaaggccgtgtgggactggctcatcctgctgctggtcatctacacggctgtcttcacaccctactcggctgccttcctgctgaaggagacggaagaaggcccgcctgctaccgagtgtggctacgcctgccagccgctggctgtggtggacctcatcgtggacatcatgttcattgtggacatcctcatcaacttccgcaccacctacgtcaatgccaacgaggaggtggtcagccaccccggccgcatcgccgtccactacttcaagggctggttcctcatcgacatggtggccgccatccccttcgacctgctcatcttcggctctggctctgaggagctgatcgggctgctgaagactgcgcggctgctgcggctggtgcgcgtggcgcggaagctggatcgctactcagagtacggcgcggccgtgctgttcttgctcatgtgcacctttgcgctcatcgcgcactggctagcctgcatctggtacgccatcggcaacatggagcagccacacatggactcacgcatcggctggctgcacaacctgggcgaccagataggcaaaccctacaacagcagcggcctgggcggcccctccatcaaggacaagtatgtgacggcgctctacttcaccttcagcagcctcaccagtgtgggcttcggcaacgtctctcccaacaccaactcagagaagatcttctccatctgcgtcatgctcattggctccctcatgtatgctagcatcttcggcaacgtgtcggccatcatccagcggctgtactcgggcacagcccgctaccacacacagatgctgcgggtgcgggagttcatccgcttccaccagatccccaatcccctgcgccagcgcctcgaggagtacttccagcacgcctggtcctacaccaacggcatcgacatgaacgcggtgctgaagggcttccctgagtgcctgcaggctgacatctgcctgcacctgaaccgctcactgctgcagcactgcaaacccttccgaggggccaccaagggctgccttcgggccctggccatgaagttcaagaccacacatgcaccgccaggggacacactggtgcatgctggggacctgctcaccgccctgtacttcatctcccggggctccatcgagatcctgcggggcgacgtcgtcgtggccatcctggggaagaatgacatctttggggagcctctgaacctgtatgcaaggcctggcaagtcgaacggggatgtgcgggccctcacctactgtgacctacacaagatccatcgggacgacctgctggaggtgctggacatgtaccctgagttctccgaccacttctggtccagcctggagatcaccttcaacctgcgagataccaacatgatcccgggctcccccggcagtacggagttagagggtggcatcagtcggcaacgcaagcgcaagttgtccttccgcaggcgcacggacaaggacacggagcagccaggggaggtgtcggccttggggccgggccgggcgggggcagggccgagtagccggggccggccgggggggccgtggggggagagcccgtccagtggcccctccagccctgagagcagtgaggatgagggcccaggccgcagctccagccccctccgcctggtgcccttctccagccccaggccccccggagagccgccgggtggggagcccctgatggaggactgcgagaagagcagcgacacttgcaaccccctgtcaggcgccttctcaggagtgtccaacattttcagcttctggggggacagtcggggccgccagtaccaggagctccctcgatgccccgcccccacccccagcctcctcaacatccccctctccagcccgggtcggcggccccggggcgacgtggagagcaggctggatgccctccagcgccagctcaacaggctggagacccggctgagtgcagacatggccactgtcctgcagctgctacagaggcagatgacgctggtcccgcccgcctacagtgctgtgaccaccccggggcctggccccacttccacatccccgctgttgcccgtcagccccctccccaccctcaccttggactcgctttctcaggtttcccagttcatggcgtgtgaggagctgcccccgggggccccagagcttccccaagaaggccccacacgacgcctctccctaccgggccagctgggggccctcacctcccagcccctgcacagacacggctcggacccgggcagttagtggggctgcccagtgtggacacgtggctcacccagggatcaaggcgctgctgggccgctccccttggaggccctgctcaggaggccctgaccgtggaaggggagaggaactcgaaagcacagctcctcccccagcccttgggaccatcttctcctgcagtcccctgggccccagtgagaggggcaggggcagggccggcagtaggtggggcctgtggtccccccactgccctgagggcattagctggtctaactgcccggaggcacccggccctgggccttaggcacctcaaggacttttctgctatttactgctcttattgttaaggataataattaaggatcatatgaataattaatgaagatgctgatgactatgaataataaataattatcctgaggaga

SEQ ID NO: 585 - DNA, 3884 bp, Homo sapiens
  source 1..3884: mol_type = genomic DNA
  misc_feature 1..3884: note = cDNA of KCNH2 gene SNP c.2647C>T (p.Arg883Trp)
atgccggtgcggaggggccacgtcgcgccgcagaacaccttcctggacaccatcatccgcaagtttgagggccagagccgtaagttcatcatcgccaacgctcgggtggagaactgcgccgtcatctactgcaacgacggcttctgcgagctgtgcggctactcgcgggccgaggtgatgcagcgaccctgcacctgcgacttcctgcacgggccgcgcacgcagcgccgcgctgccgcgcagatcgcgcaggcactgctgggcgccgaggagcgcaaagtggaaatcgccttctaccggaaagatgggagctgcttcctatgtctggtggatgtggtgcccgtgaagaacgaggatggggctgtcatcatgttcatcctcaatttcgaggtggtgatggagaaggacatggtggggtccccggctcatgacaccaaccaccggggcccccccaccagctggctggccccaggccgcgccaagaccttccgcctgaagctgcccgcgctgctggcgctgacggcccgggagtcgtcggtgcggtcgggcggcgcgggcggcgcgggcgccccgggggccgtggtggtggacgtggacctgacgcccgcggcacccagcagcgagtcgctggccctggacgaagtgacagccatggacaaccacgtggcagggctcgggcccgcggaggagcggcgtgcgctggtgggtcccggctctccgccccgcagcgcgcccggccagctcccatcgccccgggcgcacagcctcaaccccgacgcctcgggctccagctgcagcctggcccggacgcgctcccgagaaagctgcgccagcgtgcgccgcgcctcgtcggccgacgacatcgaggccatgcgcgccggggtgctgcccccgccaccgcgccacgccagcaccggggccatgcacccactgcgcagcggcttgctcaactccacctcggactccgacctcgtgcgctaccgcaccattagcaagattccccaaatcaccctcaactttgtggacctcaagggcgaccccttcttggcttcgcccaccagtgaccgtgagatcatagcacctaagataaaggagcgaacccacaatgtcactgagaaggtcacccaggtcctgtccctgggcgccgacgtgctgcctgagtacaagctgcaggcaccgcgcatccaccgctggaccatcctgcattacagccccttcaaggccgtgtgggactggctcatcctgctgctggtcatctacacggctgtcttcacaccctactcggctgccttcctgctgaaggagacggaagaaggcccgcctgctaccgagtgtggctacgcctgccagccgctggctgtggtggacctcatcgtggacatcatgttcattgtggacatcctcatcaacttccgcaccacctacgtcaatgccaacgaggaggtggtcagccaccccggccgcatcgccgtccactacttcaagggctggttcctcatcgacatggtggccgccatccccttcgacctgctcatcttcggctctggctctgaggagctgatcgggctgctgaagactgcgcggctgctgcggctggtgcgcgtggcgcggaagctggatcgctactcagagtacggcgcggccgtgctgttcttgctcatgtgcacctttgcgctcatcgcgcactggctagcctgcatctggtacgccatcggcaacatggagcagccacacatggactcacgcatcggctggctgcacaacctgggcgaccagataggcaaaccctacaacagcagcggcctgggcggcccctccatcaaggacaagtatgtgacggcgctctacttcaccttcagcagcctcaccagtgtgggcttcggcaacgtctctcccaacaccaactcagagaagatcttctccatctgcgtcatgctcattggctccctcatgtatgctagcatcttcggcaacgtgtcggccatcatccagcggctgtactcgggcacagcccgctaccacacacagatgctgcgggtgcgggagttcatccgcttccaccagatccccaatcccctgcgccagcgcctcgaggagtacttccagcacgcctggtcctacaccaacggcatcgacatgaacgcggtgctgaagggcttccctgagtgcctgcaggctgacatctgcctgcacctgaaccgctcactgctgcagcactgcaaacccttccgaggggccaccaagggctgccttcgggccctggccatgaagttcaagaccacacatgcaccgccaggggacacactggtgcatgctggggacctgctcaccgccctgtacttcatctcccggggctccatcgagatcctgcggggcgacgtcgtcgtggccatcctggggaagaatgacatctttggggagcctctgaacctgtatgcaaggcctggcaagtcgaacggggatgtgcgggccctcacctactgtgacctacacaagatccatcgggacgacctgctggaggtgctggacatgtaccctgagttctccgaccacttctggtccagcctggagatcaccttcaacctgcgagataccaacatgatcccgggctcccccggcagtacggagttagagggtggcttcagttggcaacgcaagcgcaagttgtccttccgcaggcgcacggacaaggacacggagcagccaggggaggtgtcggccttggggccgggccgggcgggggcagggccgagtagccggggccggccgggggggccgtggggggagagcccgtccagtggcccctccagccctgagagcagtgaggatgagggcccaggccgcagctccagccccctccgcctggtgcccttctccagccccaggccccccggagagccgccgggtggggagcccctgatggaggactgcgagaagagcagcgacacttgcaaccccctgtcaggcgccttctcaggagtgtccaacattttcagcttctggggggacagtcggggccgccagtaccaggagctccctcgatgccccgcccccacccccagcctcctcaacatccccctctccagcccgggtcggcggccccggggcgacgtggagagcaggctggatgccctccagcgccagctcaacaggctggagacccggctgagtgcagacatggccactgtcctgcagctgctacagaggcagatgacgctggtcccgcccgcctacagtgctgtgaccaccccggggcctggccccacttccacatccccgctgttgcccgtcagccccctccccaccctcaccttggactcgctttctcaggtttcccagttcatggcgtgtgaggagctgcccccgggggccccagagcttccccaagaaggccccacacgacgcctctccctaccgggccagctgggggccctcacctcccagcccctgcacagacacggctcggacccgggcagttagtggggctgcccagtgtggacacgtggctcacccagggatcaaggcgctgctgggccgctccccttggaggccctgctcaggaggccctgaccgtggaaggggagaggaactcgaaagcacagctcctcccccagcccttgggaccatcttctcctgcagtcccctgggccccagtgagaggggcaggggcagggccggcagtaggtggggcctgtggtccccccactgccctgagggcattagctggtctaactgcccggaggcacccggccctgggccttaggcacctcaaggacttttctgctatttactgctcttattgttaaggataataattaaggatcatatgaataattaatgaagatgctgatgactatgaataataaataattatcctgaggaga

SEQ ID NO: 586 - DNA, 3884 bp, Homo sapiens
  source 1..3884: mol_type = genomic DNA
  misc_feature 1..3884: note = cDNA of KCNH2 gene SNP c.2648G>A (p.Arg883Gln)
atgccggtgcggaggggccacgtcgcgccgcagaacaccttcctggacaccatcatccgcaagtttgagggccagagccgtaagttcatcatcgccaacgctcgggtggagaactgcgccgtcatctactgcaacgacggcttctgcgagctgtgcggctactcgcgggccgaggtgatgcagcgaccctgcacctgcgacttcctgcacgggccgcgcacgcagcgccgcgctgccgcgcagatcgcgcaggcactgctgggcgccgaggagcgcaaagtggaaatcgccttctaccggaaagatgggagctgcttcctatgtctggtggatgtggtgcccgtgaagaacgaggatggggctgtcatcatgttcatcctcaatttcgaggtggtgatggagaaggacatggtggggtccccggctcatgacaccaaccaccggggcccccccaccagctggctggccccaggccgcgccaagaccttccgcctgaagctgcccgcgctgctggcgctgacggcccgggagtcgtcggtgcggtcgggcggcgcgggcggcgcgggcgccccgggggccgtggtggtggacgtggacctgacgcccgcggcacccagcagcgagtcgctggccctggacgaagtgacagccatggacaaccacgtggcagggctcgggcccgcggaggagcggcgtgcgctggtgggtcccggctctccgccccgcagcgcgcccggccagctcccatcgccccgggcgcacagcctcaaccccgacgcctcgggctccagctgcagcctggcccggacgcgctcccgagaaagctgcgccagcgtgcgccgcgcctcgtcggccgacgacatcgaggccatgcgcgccggggtgctgcccccgccaccgcgccacgccagcaccggggccatgcacccactgcgcagcggcttgctcaactccacctcggactccgacctcgtgcgctaccgcaccattagcaagattccccaaatcaccctcaactttgtggacctcaagggcgaccccttcttggcttcgcccaccagtgaccgtgagatcatagcacctaagataaaggagcgaacccacaatgtcactgagaaggtcacccaggtcctgtccctgggcgccgacgtgctgcctgagtacaagctgcaggcaccgcgcatccaccgctggaccatcctgcattacagccccttcaaggccgtgtgggactggctcatcctgctgctggtcatctacacggctgtcttcacaccctactcggctgccttcctgctgaaggagacggaagaaggcccgcctgctaccgagtgtggctacgcctgccagccgctggctgtggtggacctcatcgtggacatcatgttcattgtggacatcctcatcaacttccgcaccacctacgtcaatgccaacgaggaggtggtcagccaccccggccgcatcgccgtccactacttcaagggctggttcctcatcgacatggtggccgccatccccttcgacctgctcatcttcggctctggctctgaggagctgatcgggctgctgaagactgcgcggctgctgcggctggtgcgcgtggcgcggaagctggatcgctactcagagtacggcgcggccgtgctgttcttgctcatgtgcacctttgcgctcatcgcgcactggctagcctgcatctggtacgccatcggcaacatggagcagccacacatggactcacgcatcggctggctgcacaacctgggcgaccagataggcaaaccctacaacagcagcggcctgggcggcccctccatcaaggacaagtatgtgacggcgctctacttcaccttcagcagcctcaccagtgtgggcttcggcaacgtctctcccaacaccaactcagagaagatcttctccatctgcgtcatgctcattggctccctcatgtatgctagcatcttcggcaacgtgtcggccatcatccagcggctgtactcgggcacagcccgctaccacacacagatgctgcgggtgcgggagttcatccgcttccaccagatccccaatcccctgcgccagcgcctcgaggagtacttccagcacgcctggtcctacaccaacggcatcgacatgaacgcggtgctgaagggcttccctgagtgcctgcaggctgacatctgcctgcacctgaaccgctcactgctgcagcactgcaaacccttccgaggggccaccaagggctgccttcgggccctggccatgaagttcaagaccacacatgcaccgccaggggacacactggtgcatgctggggacctgctcaccgccctgtacttcatctcccggggctccatcgagatcctgcggggcgacgtcgtcgtggccatcctggggaagaatgacatctttggggagcctctgaacctgtatgcaaggcctggcaagtcgaacggggatgtgcgggccctcacctactgtgacctacacaagatccatcgggacgacctgctggaggtgctggacatgtaccctgagttctccgaccacttctggtccagcctggagatcaccttcaacctgcgagataccaacatgatcccgggctcccccggcagtacggagttagagggtggcttcagtcagcaacgcaagcgcaagttgtccttccgcaggcgcacggacaaggacacggagcagccaggggaggtgtcggccttggggccgggccgggcgggggcagggccgagtagccggggccggccgggggggccgtggggggagagcccgtccagtggcccctccagccctgagagcagtgaggatgagggcccaggccgcagctccagccccctccgcctggtgcccttctccagccccaggccccccggagagccgccgggtggggagcccctgatggaggactgcgagaagagcagcgacacttgcaaccccctgtcaggcgccttctcaggagtgtccaacattttcagcttctggggggacagtcggggccgccagtaccaggagctccctcgatgccccgcccccacccccagcctcctcaacatccccctctccagcccgggtcggcggccccggggcgacgtggagagcaggctggatgccctccagcgccagctcaacaggctggagacccggctgagtgcagacatggccactgtcctgcagctgctacagaggcagatgacgctggtcccgcccgcctacagtgctgtgaccaccccggggcctggccccacttccacatccccgctgttgcccgtcagccccctccccaccctcaccttggactcgctttctcaggtttcccagttcatggcgtgtgaggagctgcccccgggggccccagagcttccccaagaaggccccacacgacgcctctccctaccgggccagctgggggccctcacctcccagcccctgcacagacacggctcggacccgggcagttagtggggctgcccagtgtggacacgtggctcacccagggatcaaggcgctgctgggccgctccccttggaggccctgctcaggaggccctgaccgtggaaggggagaggaactcgaaagcacagctcctcccccagcccttgggaccatcttctcctgcagtcccctgggccccagtgagaggggcaggggcagggccggcagtaggtggggcctgtggtccccccactgccctgagggcattagctggtctaactgcccggaggcacccggccctgggccttaggcacctcaaggacttttctgctatttactgctcttattgttaaggataataattaaggatcatatgaataattaatgaagatgctgatgactatgaataataaataattatcctgaggaga

SEQ ID NO: 587 - DNA, 3884 bp, Homo sapiens
  source 1..3884: mol_type = genomic DNA
  misc_feature 1..3884: note = cDNA of KCNH2 gene SNP c.2651A>G (p.Gln884Arg)
atgccggtgcggaggggccacgtcgcgccgcagaacaccttcctggacaccatcatccgcaagtttgagggccagagccgtaagttcatcatcgccaacgctcgggtggagaactgcgccgtcatctactgcaacgacggcttctgcgagctgtgcggctactcgcgggccgaggtgatgcagcgaccctgcacctgcgacttcctgcacgggccgcgcacgcagcgccgcgctgccgcgcagatcgcgcaggcactgctgggcgccgaggagcgcaaagtggaaatcgccttctaccggaaagatgggagctgcttcctatgtctggtggatgtggtgcccgtgaagaacgaggatggggctgtcatcatgttcatcctcaatttcgaggtggtgatggagaaggacatggtggggtccccggctcatgacaccaaccaccggggcccccccaccagctggctggccccaggccgcgccaagaccttccgcctgaagctgcccgcgctgctggcgctgacggcccgggagtcgtcggtgcggtcgggcggcgcgggcggcgcgggcgccccgggggccgtggtggtggacgtggacctgacgcccgcggcacccagcagcgagtcgctggccctggacgaagtgacagccatggacaaccacgtggcagggctcgggcccgcggaggagcggcgtgcgctggtgggtcccggctctccgccccgcagcgcgcccggccagctcccatcgccccgggcgcacagcctcaaccccgacgcctcgggctccagctgcagcctggcccggacgcgctcccgagaaagctgcgccagcgtgcgccgcgcctcgtcggccgacgacatcgaggccatgcgcgccggggtgctgcccccgccaccgcgccacgccagcaccggggccatgcacccactgcgcagcggcttgctcaactccacctcggactccgacctcgtgcgctaccgcaccattagcaagattccccaaatcaccctcaactttgtggacctcaagggcgaccccttcttggcttcgcccaccagtgaccgtgagatcatagcacctaagataaaggagcgaacccacaatgtcactgagaaggtcacccaggtcctgtccctgggcgccgacgtgctgcctgagtacaagctgcaggcaccgcgcatccaccgctggaccatcctgcattacagccccttcaaggccgtgtgggactggctcatcctgctgctggtcatctacacggctgtcttcacaccctactcggctgccttcctgctgaaggagacggaagaaggcccgcctgctaccgagtgtggctacgcctgccagccgctggctgtggtggacctcatcgtggacatcatgttcattgtggacatcctcatcaacttccgcaccacctacgtcaatgccaacgaggaggtggtcagccaccccggccgcatcgccgtccactacttcaagggctggttcctcatcgacatggtggccgccatccccttcgacctgctcatcttcggctctggctctgaggagctgatcgggctgctgaagactgcgcggctgctgcggctggtgcgcgtggcgcggaagctggatcgctactcagagtacggcgcggccgtgctgttcttgctcatgtgcacctttgcgctcatcgcgcactggctagcctgcatctggtacgccatcggcaacatggagcagccacacatggactcacgcatcggctggctgcacaacctgggcgaccagataggcaaaccctacaacagcagcggcctgggcggcccctccatcaaggacaagtatgtgacggcgctctacttcaccttcagcagcctcaccagtgtgggcttcggcaacgtctctcccaacaccaactcagagaagatcttctccatctgcgtcatgctcattggctccctcatgtatgctagcatcttcggcaacgtgtcggccatcatccagcggctgtactcgggcacagcccgctaccacacacagatgctgcgggtgcgggagttcatccgcttccaccagatccccaatcccctgcgccagcgcctcgaggagtacttccagcacgcctggtcctacaccaacggcatcgacatgaacgcggtgctgaagggcttccctgagtgcctgcaggctgacatctgcctgcacctgaaccgctcactgctgcagcactgcaaacccttccgaggggccaccaagggctgccttcgggccctggccatgaagttcaagaccacacatgcaccgccaggggacacactggtgcatgctggggacctgctcaccgccctgtacttcatctcccggggctccatcgagatcctgcggggcgacgtcgtcgtggccatcctggggaagaatgacatctttggggagcctctgaacctgtatgcaaggcctggcaagtcgaacggggatgtgcgggccctcacctactgtgacctacacaagatccatcgggacgacctgctggaggtgctggacatgtaccctgagttctccgaccacttctggtccagcctggagatcaccttcaacctgcgagataccaacatgatcccgggctcccccggcagtacggagttagagggtggcttcagtcggcgacgcaagcgcaagttgtccttccgcaggcgcacggacaaggacacggagcagccaggggaggtgtcggccttggggccgggccgggcgggggcagggccgagtagccggggccggccgggggggccgtggggggagagcccgtccagtggcccctccagccctgagagcagtgaggatgagggcccaggccgcagctccagccccctccgcctggtgcccttctccagccccaggccccccggagagccgccgggtggggagcccctgatggaggactgcgagaagagcagcgacacttgcaaccccctgtcaggcgccttctcaggagtgtccaacattttcagcttctggggggacagtcggggccgccagtaccaggagctccctcgatgccccgcccccacccccagcctcctcaacatccccctctccagcccgggtcggcggccccggggcgacgtggagagcaggctggatgccctccagcgccagctcaacaggctggagacccggctgagtgcagacatggccactgtcctgcagctgctacagaggcagatgacgctggtcccgcccgcctacagtgctgtgaccaccccggggcctggccccacttccacatccccgctgttgcccgtcagccccctccccaccctcaccttggactcgctttctcaggtttcccagttcatggcgtgtgaggagctgcccccgggggccccagagcttccccaagaaggccccacacgacgcctctccctaccgggccagctgggggccctcacctcccagcccctgcacagacacggctcggacccgggcagttagtggggctgcccagtgtggacacgtggctcacccagggatcaaggcgctgctgggccgctccccttggaggccctgctcaggaggccctgaccgtggaaggggagaggaactcgaaagcacagctcctcccccagcccttgggaccatcttctcctgcagtcccctgggccccagtgagaggggcaggggcagggccggcagtaggtggggcctgtggtccccccactgccctgagggcattagctggtctaactgcccggaggcacccggccctgggccttaggcacctcaaggacttttctgctatttactgctcttattgttaaggataataattaaggatcatatgaataattaatgaagatgctgatgactatgaataataaataattatcctgaggaga

SEQ ID NO: 588 - DNA, 3884 bp, Homo sapiens
  source 1..3884: mol_type = genomic DNA
  misc_feature 1..3884: note = cDNA of KCNH2 gene SNP c.2653C>T (p.Arg885Cys)
atgccggtgcggaggggccacgtcgcgccgcagaacaccttcctggacaccatcatccgcaagtttgagggccagagccgtaagttcatcatcgccaacgctcgggtggagaactgcgccgtcatctactgcaacgacggcttctgcgagctgtgcggctactcgcgggccgaggtgatgcagcgaccctgcacctgcgacttcctgcacgggccgcgcacgcagcgccgcgctgccgcgcagatcgcgcaggcactgctgggcgccgaggagcgcaaagtggaaatcgccttctaccggaaagatgggagctgcttcctatgtctggtggatgtggtgcccgtgaagaacgaggatggggctgtcatcatgttcatcctcaatttcgaggtggtgatggagaaggacatggtggggtccccggctcatgacaccaaccaccggggcccccccaccagctggctggccccaggccgcgccaagaccttccgcctgaagctgcccgcgctgctggcgctgacggcccgggagtcgtcggtgcggtcgggcggcgcgggcggcgcgggcgccccgggggccgtggtggtggacgtggacctgacgcccgcggcacccagcagcgagtcgctggccctggacgaagtgacagccatggacaaccacgtggcagggctcgggcccgcggaggagcggcgtgcgctggtgggtcccggctctccgccccgcagcgcgcccggccagctcccatcgccccgggcgcacagcctcaaccccgacgcctcgggctccagctgcagcctggcccggacgcgctcccgagaaagctgcgccagcgtgcgccgcgcctcgtcggccgacgacatcgaggccatgcgcgccggggtgctgcccccgccaccgcgccacgccagcaccggggccatgcacccactgcgcagcggcttgctcaactccacctcggactccgacctcgtgcgctaccgcaccattagcaagattccccaaatcaccctcaactttgtggacctcaagggcgaccccttcttggcttcgcccaccagtgaccgtgagatcatagcacctaagataaaggagcgaacccacaatgtcactgagaaggtcacccaggtcctgtccctgggcgccgacgtgctgcctgagtacaagctgcaggcaccgcgcatccaccgctggaccatcctgcattacagccccttcaaggccgtgtgggactggctcatcctgctgctggtcatctacacggctgtcttcacaccctactcggctgccttcctgctgaaggagacggaagaaggcccgcctgctaccgagtgtggctacgcctgccagccgctggctgtggtggacctcatcgtggacatcatgttcattgtggacatcctcatcaacttccgcaccacctacgtcaatgccaacgaggaggtggtcagccaccccggccgcatcgccgtccactacttcaagggctggttcctcatcgacatggtggccgccatccccttcgacctgctcatcttcggctctggctctgaggagctgatcgggctgctgaagactgcgcggctgctgcggctggtgcgcgtggcgcggaagctggatcgctactcagagtacggcgcggccgtgctgttcttgctcatgtgcacctttgcgctcatcgcgcactggctagcctgcatctggtacgccatcggcaacatggagcagccacacatggactcacgcatcggctggctgcacaacctgggcgaccagataggcaaaccctacaacagcagcggcctgggcggcccctccatcaaggacaagtatgtgacggcgctctacttcaccttcagcagcctcaccagtgtgggcttcggcaacgtctctcccaacaccaactcagagaagatcttctccatctgcgtcatgctcattggctccctcatgtatgctagcatcttcggcaacgtgtcggccatcatccagcggctgtactcgggcacagcccgctaccacacacagatgctgcgggtgcgggagttcatccgcttccaccagatccccaatcccctgcgccagcgcctcgaggagtacttccagcacgcctggtcctacaccaacggcatcgacatgaacgcggtgctgaagggcttccctgagtgcctgcaggctgacatctgcctgcacctgaaccgctcactgctgcagcactgcaaacccttccgaggggccaccaagggctgccttcgggccctggccatgaagttcaagaccacacatgcaccgccaggggacacactggtgcatgctggggacctgctcaccgccctgtacttcatctcccggggctccatcgagatcctgcggggcgacgtcgtcgtggccatcctggggaagaatgacatctttggggagcctctgaacctgtatgcaaggcctggcaagtcgaacggggatgtgcgggccctcacctactgtgacctacacaagatccatcgggacgacctgctggaggtgctggacatgtaccctgagttctccgaccacttctggtccagcctggagatcaccttcaacctgcgagataccaacatgatcccgggctcccccggcagtacggagttagagggtggcttcagtcggcaatgcaagcgcaagttgtccttccgcaggcgcacggacaaggacacggagcagccaggggaggtgtcggccttggggccgggccgggcgggggcagggccgagtagccggggccggccgggggggccgtggggggagagcccgtccagtggcccctccagccctgagagcagtgaggatgagggcccaggccgcagctccagccccctccgcctggtgcccttctccagccccaggccccccggagagccgccgggtggggagcccctgatggaggactgcgagaagagcagcgacacttgcaaccccctgtcaggcgccttctcaggagtgtccaacattttcagcttctggggggacagtcggggccgccagtaccaggagctccctcgatgccccgcccccacccccagcctcctcaacatccccctctccagcccgggtcggcggccccggggcgacgtggagagcaggctggatgccctccagcgccagctcaacaggctggagacccggctgagtgcagacatggccactgtcctgcagctgctacagaggcagatgacgctggtcccgcccgcctacagtgctgtgaccaccccggggcctggccccacttccacatccccgctgttgcccgtcagccccctccccaccctcaccttggactcgctttctcaggtttcccagttcatggcgtgtgaggagctgcccccgggggccccagagcttccccaagaaggccccacacgacgcctctccctaccgggccagctgggggccctcacctcccagcccctgcacagacacggctcggacccgggcagttagtggggctgcccagtgtggacacgtggctcacccagggatcaaggcgctgctgggccgctccccttggaggccctgctcaggaggccctgaccgtggaaggggagaggaactcgaaagcacagctcctcccccagcccttgggaccatcttctcctgcagtcccctgggccccagtgagaggggcaggggcagggccggcagtaggtggggcctgtggtccccccactgccctgagggcattagctggtctaactgcccggaggcacccggccctgggccttaggcacctcaaggacttttctgctatttactgctcttattgttaaggataataattaaggatcatatgaataattaatgaagatgctgatgactatgaataataaataattatcctgaggaga

SEQ ID NO: 589 - DNA, 3884 bp, Homo sapiens
  source 1..3884: mol_type = genomic DNA
  misc_feature 1..3884: note = cDNA of KCNH2 gene SNP c.2654G>A (p.Arg885His)
atgccggtgcggaggggccacgtcgcgccgcagaacaccttcctggacaccatcatccgcaagtttgagggccagagccgtaagttcatcatcgccaacgctcgggtggagaactgcgccgtcatctactgcaacgacggcttctgcgagctgtgcggctactcgcgggccgaggtgatgcagcgaccctgcacctgcgacttcctgcacgggccgcgcacgcagcgccgcgctgccgcgcagatcgcgcaggcactgctgggcgccgaggagcgcaaagtggaaatcgccttctaccggaaagatgggagctgcttcctatgtctggtggatgtggtgcccgtgaagaacgaggatggggctgtcatcatgttcatcctcaatttcgaggtggtgatggagaaggacatggtggggtccccggctcatgacaccaaccaccggggcccccccaccagctggctggccccaggccgcgccaagaccttccgcctgaagctgcccgcgctgctggcgctgacggcccgggagtcgtcggtgcggtcgggcggcgcgggcggcgcgggcgccccgggggccgtggtggtggacgtggacctgacgcccgcggcacccagcagcgagtcgctggccctggacgaagtgacagccatggacaaccacgtggcagggctcgggcccgcggaggagcggcgtgcgctggtgggtcccggctctccgccccgcagcgcgcccggccagctcccatcgccccgggcgcacagcctcaaccccgacgcctcgggctccagctgcagcctggcccggacgcgctcccgagaaagctgcgccagcgtgcgccgcgcctcgtcggccgacgacatcgaggccatgcgcgccggggtgctgcccccgccaccgcgccacgccagcaccggggccatgcacccactgcgcagcggcttgctcaactccacctcggactccgacctcgtgcgctaccgcaccattagcaagattccccaaatcaccctcaactttgtggacctcaagggcgaccccttcttggcttcgcccaccagtgaccgtgagatcatagcacctaagataaaggagcgaacccacaatgtcactgagaaggtcacccaggtcctgtccctgggcgccgacgtgctgcctgagtacaagctgcaggcaccgcgcatccaccgctggaccatcctgcattacagccccttcaaggccgtgtgggactggctcatcctgctgctggtcatctacacggctgtcttcacaccctactcggctgccttcctgctgaaggagacggaagaaggcccgcctgctaccgagtgtggctacgcctgccagccgctggctgtggtggacctcatcgtggacatcatgttcattgtggacatcctcatcaacttccgcaccacctacgtcaatgccaacgaggaggtggtcagccaccccggccgcatcgccgtccactacttcaagggctggttcctcatcgacatggtggccgccatccccttcgacctgctcatcttcggctctggctctgaggagctgatcgggctgctgaagactgcgcggctgctgcggctggtgcgcgtggcgcggaagctggatcgctactcagagtacggcgcggccgtgctgttcttgctcatgtgcacctttgcgctcatcgcgcactggctagcctgcatctggtacgccatcggcaacatggagcagccacacatggactcacgcatcggctggctgcacaacctgggcgaccagataggcaaaccctacaacagcagcggcctgggcggcccctccatcaaggacaagtatgtgacggcgctctacttcaccttcagcagcctcaccagtgtgggcttcggcaacgtctctcccaacaccaactcagagaagatcttctccatctgcgtcatgctcattggctccctcatgtatgctagcatcttcggcaacgtgtcggccatcatccagcggctgtactcgggcacagcccgctaccacacacagatgctgcgggtgcgggagttcatccgcttccaccagatccccaatcccctgcgccagcgcctcgaggagtacttccagcacgcctggtcctacaccaacggcatcgacatgaacgcggtgctgaagggcttccctgagtgcctgcaggctgacatctgcctgcacctgaaccgctcactgctgcagcactgcaaacccttccgaggggccaccaagggctgccttcgggccctggccatgaagttcaagaccacacatgcaccgccaggggacacactggtgcatgctggggacctgctcaccgccctgtacttcatctcccggggctccatcgagatcctgcggggcgacgtcgtcgtggccatcctggggaagaatgacatctttggggagcctctgaacctgtatgcaaggcctggcaagtcgaacggggatgtgcgggccctcacctactgtgacctacacaagatccatcgggacgacctgctggaggtgctggacatgtaccctgagttctccgaccacttctggtccagcctggagatcaccttcaacctgcgagataccaacatgatcccgggctcccccggcagtacggagttagagggtggcttcagtcggcaacacaagcgcaagttgtccttccgcaggcgcacggacaaggacacggagcagccaggggaggtgtcggccttggggccgggccgggcgggggcagggccgagtagccggggccggccgggggggccgtggggggagagcccgtccagtggcccctccagccctgagagcagtgaggatgagggcccaggccgcagctccagccccctccgcctggtgcccttctccagccccaggccccccggagagccgccgggtggggagcccctgatggaggactgcgagaagagcagcgacacttgcaaccccctgtcaggcgccttctcaggagtgtccaacattttcagcttctggggggacagtcggggccgccagtaccaggagctccctcgatgccccgcccccacccccagcctcctcaacatccccctctccagcccgggtcggcggccccggggcgacgtggagagcaggctggatgccctccagcgccagctcaacaggctggagacccggctgagtgcagacatggccactgtcctgcagctgctacagaggcagatgacgctggtcccgcccgcctacagtgctgtgaccaccccggggcctggccccacttccacatccccgctgttgcccgtcagccccctccccaccctcaccttggactcgctttctcaggtttcccagttcatggcgtgtgaggagctgcccccgggggccccagagcttccccaagaaggccccacacgacgcctctccctaccgggccagctgggggccctcacctcccagcccctgcacagacacggctcggacccgggcagttagtggggctgcccagtgtggacacgtggctcacccagggatcaaggcgctgctgggccgctccccttggaggccctgctcaggaggccctgaccgtggaaggggagaggaactcgaaagcacagctcctcccccagcccttgggaccatcttctcctgcagtcccctgggccccagtgagaggggcaggggcagggccggcagtaggtggggcctgtggtccccccactgccctgagggcattagctggtctaactgcccggaggcacccggccctgggccttaggcacctcaaggacttttctgctatttactgctcttattgttaaggataataattaaggatcatatgaataattaatgaagatgctgatgactatgaataataaataattatcctgaggaga

SEQ ID NO: 590 - DNA, 3884 bp, Homo sapiens
  source 1..3884: mol_type = genomic DNA
  misc_feature 1..3884: note = cDNA of KCNH2 gene SNP c.2659C>G (p.Arg887Gly)
atgccggtgcggaggggccacgtcgcgccgcagaacaccttcctggacaccatcatccgcaagtttgagggccagagccgtaagttcatcatcgccaacgctcgggtggagaactgcgccgtcatctactgcaacgacggcttctgcgagctgtgcggctactcgcgggccgaggtgatgcagcgaccctgcacctgcgacttcctgcacgggccgcgcacgcagcgccgcgctgccgcgcagatcgcgcaggcactgctgggcgccgaggagcgcaaagtggaaatcgccttctaccggaaagatgggagctgcttcctatgtctggtggatgtggtgcccgtgaagaacgaggatggggctgtcatcatgttcatcctcaatttcgaggtggtgatggagaaggacatggtggggtccccggctcatgacaccaaccaccggggcccccccaccagctggctggccccaggccgcgccaagaccttccgcctgaagctgcccgcgctgctggcgctgacggcccgggagtcgtcggtgcggtcgggcggcgcgggcggcgcgggcgccccgggggccgtggtggtggacgtggacctgacgcccgcggcacccagcagcgagtcgctggccctggacgaagtgacagccatggacaaccacgtggcagggctcgggcccgcggaggagcggcgtgcgctggtgggtcccggctctccgccccgcagcgcgcccggccagctcccatcgccccgggcgcacagcctcaaccccgacgcctcgggctccagctgcagcctggcccggacgcgctcccgagaaagctgcgccagcgtgcgccgcgcctcgtcggccgacgacatcgaggccatgcgcgccggggtgctgcccccgccaccgcgccacgccagcaccggggccatgcacccactgcgcagcggcttgctcaactccacctcggactccgacctcgtgcgctaccgcaccattagcaagattccccaaatcaccctcaactttgtggacctcaagggcgaccccttcttggcttcgcccaccagtgaccgtgagatcatagcacctaagataaaggagcgaacccacaatgtcactgagaaggtcacccaggtcctgtccctgggcgccgacgtgctgcctgagtacaagctgcaggcaccgcgcatccaccgctggaccatcctgcattacagccccttcaaggccgtgtgggactggctcatcctgctgctggtcatctacacggctgtcttcacaccctactcggctgccttcctgctgaaggagacggaagaaggcccgcctgctaccgagtgtggctacgcctgccagccgctggctgtggtggacctcatcgtggacatcatgttcattgtggacatcctcatcaacttccgcaccacctacgtcaatgccaacgaggaggtggtcagccaccccggccgcatcgccgtccactacttcaagggctggttcctcatcgacatggtggccgccatccccttcgacctgctcatcttcggctctggctctgaggagctgatcgggctgctgaagactgcgcggctgctgcggctggtgcgcgtggcgcggaagctggatcgctactcagagtacggcgcggccgtgctgttcttgctcatgtgcacctttgcgctcatcgcgcactggctagcctgcatctggtacgccatcggcaacatggagcagccacacatggactcacgcatcggctggctgcacaacctgggcgaccagataggcaaaccctacaacagcagcggcctgggcggcccctccatcaaggacaagtatgtgacggcgctctacttcaccttcagcagcctcaccagtgtgggcttcggcaacgtctctcccaacaccaactcagagaagatcttctccatctgcgtcatgctcattggctccctcatgtatgctagcatcttcggcaacgtgtcggccatcatccagcggctgtactcgggcacagcccgctaccacacacagatgctgcgggtgcgggagttcatccgcttccaccagatccccaatcccctgcgccagcgcctcgaggagtacttccagcacgcctggtcctacaccaacggcatcgacatgaacgcggtgctgaagggcttccctgagtgcctgcaggctgacatctgcctgcacctgaaccgctcactgctgcagcactgcaaacccttccgaggggccaccaagggctgccttcgggccctggccatgaagttcaagaccacacatgcaccgccaggggacacactggtgcatgctggggacctgctcaccgccctgtacttcatctcccggggctccatcgagatcctgcggggcgacgtcgtcgtggccatcctggggaagaatgacatctttggggagcctctgaacctgtatgcaaggcctggcaagtcgaacggggatgtgcgggccctcacctactgtgacctacacaagatccatcgggacgacctgctggaggtgctggacatgtaccctgagttctccgaccacttctggtccagcctggagatcaccttcaacctgcgagataccaacatgatcccgggctcccccggcagtacggagttagagggtggcttcagtcggcaacgcaagggcaagttgtccttccgcaggcgcacggacaaggacacggagcagccaggggaggtgtcggccttggggccgggccgggcgggggcagggccgagtagccggggccggccgggggggccgtggggggagagcccgtccagtggcccctccagccctgagagcagtgaggatgagggcccaggccgcagctccagccccctccgcctggtgcccttctccagccccaggccccccggagagccgccgggtggggagcccctgatggaggactgcgagaagagcagcgacacttgcaaccccctgtcaggcgccttctcaggagtgtccaacattttcagcttctggggggacagtcggggccgccagtaccaggagctccctcgatgccccgcccccacccccagcctcctcaacatccccctctccagcccgggtcggcggccccggggcgacgtggagagcaggctggatgccctccagcgccagctcaacaggctggagacccggctgagtgcagacatggccactgtcctgcagctgctacagaggcagatgacgctggtcccgcccgcctacagtgctgtgaccaccccggggcctggccccacttccacatccccgctgttgcccgtcagccccctccccaccctcaccttggactcgctttctcaggtttcccagttcatggcgtgtgaggagctgcccccgggggccccagagcttccccaagaaggccccacacgacgcctctccctaccgggccagctgggggccctcacctcccagcccctgcacagacacggctcggacccgggcagttagtggggctgcccagtgtggacacgtggctcacccagggatcaaggcgctgctgggccgctccccttggaggccctgctcaggaggccctgaccgtggaaggggagaggaactcgaaagcacagctcctcccccagcccttgggaccatcttctcctgcagtcccctgggccccagtgagaggggcaggggcagggccggcagtaggtggggcctgtggtccccccactgccctgagggcattagctggtctaactgcccggaggcacccggccctgggccttaggcacctcaaggacttttctgctatttactgctcttattgttaaggataataattaaggatcatatgaataattaatgaagatgctgatgactatgaataataaataattatcctgaggaga

SEQ ID NO: 591 - DNA, 3884 bp, Homo sapiens
  source 1..3884: mol_type = genomic DNA
  misc_feature 1..3884: note = cDNA of KCNH2 gene SNP c.2659C>T (p.Arg887Cys)
atgccggtgcggaggggccacgtcgcgccgcagaacaccttcctggacaccatcatccgcaagtttgagggccagagccgtaagttcatcatcgccaacgctcgggtggagaactgcgccgtcatctactgcaacgacggcttctgcgagctgtgcggctactcgcgggccgaggtgatgcagcgaccctgcacctgcgacttcctgcacgggccgcgcacgcagcgccgcgctgccgcgcagatcgcgcaggcactgctgggcgccgaggagcgcaaagtggaaatcgccttctaccggaaagatgggagctgcttcctatgtctggtggatgtggtgcccgtgaagaacgaggatggggctgtcatcatgttcatcctcaatttcgaggtggtgatggagaaggacatggtggggtccccggctcatgacaccaaccaccggggcccccccaccagctggctggccccaggccgcgccaagaccttccgcctgaagctgcccgcgctgctggcgctgacggcccgggagtcgtcggtgcggtcgggcggcgcgggcggcgcgggcgccccgggggccgtggtggtggacgtggacctgacgcccgcggcacccagcagcgagtcgctggccctggacgaagtgacagccatggacaaccacgtggcagggctcgggcccgcggaggagcggcgtgcgctggtgggtcccggctctccgccccgcagcgcgcccggccagctcccatcgccccgggcgcacagcctcaaccccgacgcctcgggctccagctgcagcctggcccggacgcgctcccgagaaagctgcgccagcgtgcgccgcgcctcgtcggccgacgacatcgaggccatgcgcgccggggtgctgcccccgccaccgcgccacgccagcaccggggccatgcacccactgcgcagcggcttgctcaactccacctcggactccgacctcgtgcgctaccgcaccattagcaagattccccaaatcaccctcaactttgtggacctcaagggcgaccccttcttggcttcgcccaccagtgaccgtgagatcatagcacctaagataaaggagcgaacccacaatgtcactgagaaggtcacccaggtcctgtccctgggcgccgacgtgctgcctgagtacaagctgcaggcaccgcgcatccaccgctggaccatcctgcattacagccccttcaaggccgtgtgggactggctcatcctgctgctggtcatctacacggctgtcttcacaccctactcggctgccttcctgctgaaggagacggaagaaggcccgcctgctaccgagtgtggctacgcctgccagccgctggctgtggtggacctcatcgtggacatcatgttcattgtggacatcctcatcaacttccgcaccacctacgtcaatgccaacgaggaggtggtcagccaccccggccgcatcgccgtccactacttcaagggctggttcctcatcgacatggtggccgccatccccttcgacctgctcatcttcggctctggctctgaggagctgatcgggctgctgaagactgcgcggctgctgcggctggtgcgcgtggcgcggaagctggatcgctactcagagtacggcgcggccgtgctgttcttgctcatgtgcacctttgcgctcatcgcgcactggctagcctgcatctggtacgccatcggcaacatggagcagccacacatggactcacgcatcggctggctgcacaacctgggcgaccagataggcaaaccctacaacagcagcggcctgggcggcccctccatcaaggacaagtatgtgacggcgctctacttcaccttcagcagcctcaccagtgtgggcttcggcaacgtctctcccaacaccaactcagagaagatcttctccatctgcgtcatgctcattggctccctcatgtatgctagcatcttcggcaacgtgtcggccatcatccagcggctgtactcgggcacagcccgctaccacacacagatgctgcgggtgcgggagttcatccgcttccaccagatccccaatcccctgcgccagcgcctcgaggagtacttccagcacgcctggtcctacaccaacggcatcgacatgaacgcggtgctgaagggcttccctgagtgcctgcaggctgacatctgcctgcacctgaaccgctcactgctgcagcactgcaaacccttccgaggggccaccaagggctgccttcgggccctggccatgaagttcaagaccacacatgcaccgccaggggacacactggtgcatgctggggacctgctcaccgccctgtacttcatctcccggggctccatcgagatcctgcggggcgacgtcgtcgtggccatcctggggaagaatgacatctttggggagcctctgaacctgtatgcaaggcctggcaagtcgaacggggatgtgcgggccctcacctactgtgacctacacaagatccatcgggacgacctgctggaggtgctggacatgtaccctgagttctccgaccacttctggtccagcctggagatcaccttcaacctgcgagataccaacatgatcccgggctcccccggcagtacggagttagagggtggcttcagtcggcaacgcaagtgcaagttgtccttccgcaggcgcacggacaaggacacggagcagccaggggaggtgtcggccttggggccgggccgggcgggggcagggccgagtagccggggccggccgggggggccgtggggggagagcccgtccagtggcccctccagccctgagagcagtgaggatgagggcccaggccgcagctccagccccctccgcctggtgcccttctccagccccaggccccccggagagccgccgggtggggagcccctgatggaggactgcgagaagagcagcgacacttgcaaccccctgtcaggcgccttctcaggagtgtccaacattttcagcttctggggggacagtcggggccgccagtaccaggagctccctcgatgccccgcccccacccccagcctcctcaacatccccctctccagcccgggtcggcggccccggggcgacgtggagagcaggctggatgccctccagcgccagctcaacaggctggagacccggctgagtgcagacatggccactgtcctgcagctgctacagaggcagatgacgctggtcccgcccgcctacagtgctgtgaccaccccggggcctggccccacttccacatccccgctgttgcccgtcagccccctccccaccctcaccttggactcgctttctcaggtttcccagttcatggcgtgtgaggagctgcccccgggggccccagagcttccccaagaaggccccacacgacgcctctccctaccgggccagctgggggccctcacctcccagcccctgcacagacacggctcggacccgggcagttagtggggctgcccagtgtggacacgtggctcacccagggatcaaggcgctgctgggccgctccccttggaggccctgctcaggaggccctgaccgtggaaggggagaggaactcgaaagcacagctcctcccccagcccttgggaccatcttctcctgcagtcccctgggccccagtgagaggggcaggggcagggccggcagtaggtggggcctgtggtccccccactgccctgagggcattagctggtctaactgcccggaggcacccggccctgggccttaggcacctcaaggacttttctgctatttactgctcttattgttaaggataataattaaggatcatatgaataattaatgaagatgctgatgactatgaataataaataattatcctgaggaga

SEQ ID NO: 592 - DNA, 3884 bp, Homo sapiens
  source 1..3884: mol_type = genomic DNA
  misc_feature 1..3884: note = cDNA of KCNH2 gene SNP c.2660G>A (p.Arg887His)
atgccggtgcggaggggccacgtcgcgccgcagaacaccttcctggacaccatcatccgcaagtttgagggccagagccgtaagttcatcatcgccaacgctcgggtggagaactgcgccgtcatctactgcaacgacggcttctgcgagctgtgcggctactcgcgggccgaggtgatgcagcgaccctgcacctgcgacttcctgcacgggccgcgcacgcagcgccgcgctgccgcgcagatcgcgcaggcactgctgggcgccgaggagcgcaaagtggaaatcgccttctaccggaaagatgggagctgcttcctatgtctggtggatgtggtgcccgtgaagaacgaggatggggctgtcatcatgttcatcctcaatttcgaggtggtgatggagaaggacatggtggggtccccggctcatgacaccaaccaccggggcccccccaccagctggctggccccaggccgcgccaagaccttccgcctgaagctgcccgcgctgctggcgctgacggcccgggagtcgtcggtgcggtcgggcggcgcgggcggcgcgggcgccccgggggccgtggtggtggacgtggacctgacgcccgcggcacccagcagcgagtcgctggccctggacgaagtgacagccatggacaaccacgtggcagggctcgggcccgcggaggagcggcgtgcgctggtgggtcccggctctccgccccgcagcgcgcccggccagctcccatcgccccgggcgcacagcctcaaccccgacgcctcgggctccagctgcagcctggcccggacgcgctcccgagaaagctgcgccagcgtgcgccgcgcctcgtcggccgacgacatcgaggccatgcgcgccggggtgctgcccccgccaccgcgccacgccagcaccggggccatgcacccactgcgcagcggcttgctcaactccacctcggactccgacctcgtgcgctaccgcaccattagcaagattccccaaatcaccctcaactttgtggacctcaagggcgaccccttcttggcttcgcccaccagtgaccgtgagatcatagcacctaagataaaggagcgaacccacaatgtcactgagaaggtcacccaggtcctgtccctgggcgccgacgtgctgcctgagtacaagctgcaggcaccgcgcatccaccgctggaccatcctgcattacagccccttcaaggccgtgtgggactggctcatcctgctgctggtcatctacacggctgtcttcacaccctactcggctgccttcctgctgaaggagacggaagaaggcccgcctgctaccgagtgtggctacgcctgccagccgctggctgtggtggacctcatcgtggacatcatgttcattgtggacatcctcatcaacttccgcaccacctacgtcaatgccaacgaggaggtggtcagccaccccggccgcatcgccgtccactacttcaagggctggttcctcatcgacatggtggccgccatccccttcgacctgctcatcttcggctctggctctgaggagctgatcgggctgctgaagactgcgcggctgctgcggctggtgcgcgtggcgcggaagctggatcgctactcagagtacggcgcggccgtgctgttcttgctcatgtgcacctttgcgctcatcgcgcactggctagcctgcatctggtacgccatcggcaacatggagcagccacacatggactcacgcatcggctggctgcacaacctgggcgaccagataggcaaaccctacaacagcagcggcctgggcggcccctccatcaaggacaagtatgtgacggcgctctacttcaccttcagcagcctcaccagtgtgggcttcggcaacgtctctcccaacaccaactcagagaagatcttctccatctgcgtcatgctcattggctccctcatgtatgctagcatcttcggcaacgtgtcggccatcatccagcggctgtactcgggcacagcccgctaccacacacagatgctgcgggtgcgggagttcatccgcttccaccagatccccaatcccctgcgccagcgcctcgaggagtacttccagcacgcctggtcctacaccaacggcatcgacatgaacgcggtgctgaagggcttccctgagtgcctgcaggctgacatctgcctgcacctgaaccgctcactgctgcagcactgcaaacccttccgaggggccaccaagggctgccttcgggccctggccatgaagttcaagaccacacatgcaccgccaggggacacactggtgcatgctggggacctgctcaccgccctgtacttcatctcccggggctccatcgagatcctgcggggcgacgtcgtcgtggccatcctggggaagaatgacatctttggggagcctctgaacctgtatgcaaggcctggcaagtcgaacggggatgtgcgggccctcacctactgtgacctacacaagatccatcgggacgacctgctggaggtgctggacatgtaccctgagttctccgaccacttctggtccagcctggagatcaccttcaacctgcgagataccaacatgatcccgggctcccccggcagtacggagttagagggtggcttcagtcggcaacgcaagcacaagttgtccttccgcaggcgcacggacaaggacacggagcagccaggggaggtgtcggccttggggccgggccgggcgggggcagggccgagtagccggggccggccgggggggccgtggggggagagcccgtccagtggcccctccagccctgagagcagtgaggatgagggcccaggccgcagctccagccccctccgcctggtgcccttctccagccccaggccccccggagagccgccgggtggggagcccctgatggaggactgcgagaagagcagcgacacttgcaaccccctgtcaggcgccttctcaggagtgtccaacattttcagcttctggggggacagtcggggccgccagtaccaggagctccctcgatgccccgcccccacccccagcctcctcaacatccccctctccagcccgggtcggcggccccggggcgacgtggagagcaggctggatgccctccagcgccagctcaacaggctggagacccggctgagtgcagacatggccactgtcctgcagctgctacagaggcagatgacgctggtcccgcccgcctacagtgctgtgaccaccccggggcctggccccacttccacatccccgctgttgcccgtcagccccctccccaccctcaccttggactcgctttctcaggtttcccagttcatggcgtgtgaggagctgcccccgggggccccagagcttccccaagaaggccccacacgacgcctctccctaccgggccagctgggggccctcacctcccagcccctgcacagacacggctcggacccgggcagttagtggggctgcccagtgtggacacgtggctcacccagggatcaaggcgctgctgggccgctccccttggaggccctgctcaggaggccctgaccgtggaaggggagaggaactcgaaagcacagctcctcccccagcccttgggaccatcttctcctgcagtcccctgggccccagtgagaggggcaggggcagggccggcagtaggtggggcctgtggtccccccactgccctgagggcattagctggtctaactgcccggaggcacccggccctgggccttaggcacctcaaggacttttctgctatttactgctcttattgttaaggataataattaaggatcatatgaataattaatgaagatgctgatgactatgaataataaataattatcctgaggaga

SEQ ID NO: 593 - DNA, 3884 bp, Homo sapiens
  source 1..3884: mol_type = genomic DNA
  misc_feature 1..3884: note = cDNA of KCNH2 gene SNP c.2660G>T (p.Arg887Leu)
atgccggtgcggaggggccacgtcgcgccgcagaacaccttcctggacaccatcatccgcaagtttgagggccagagccgtaagttcatcatcgccaacgctcgggtggagaactgcgccgtcatctactgcaacgacggcttctgcgagctgtgcggctactcgcgggccgaggtgatgcagcgaccctgcacctgcgacttcctgcacgggccgcgcacgcagcgccgcgctgccgcgcagatcgcgcaggcactgctgggcgccgaggagcgcaaagtggaaatcgccttctaccggaaagatgggagctgcttcctatgtctggtggatgtggtgcccgtgaagaacgaggatggggctgtcatcatgttcatcctcaatttcgaggtggtgatggagaaggacatggtggggtccccggctcatgacaccaaccaccggggcccccccaccagctggctggccccaggccgcgccaagaccttccgcctgaagctgcccgcgctgctggcgctgacggcccgggagtcgtcggtgcggtcgggcggcgcgggcggcgcgggcgccccgggggccgtggtggtggacgtggacctgacgcccgcggcacccagcagcgagtcgctggccctggacgaagtgacagccatggacaaccacgtggcagggctcgggcccgcggaggagcggcgtgcgctggtgggtcccggctctccgccccgcagcgcgcccggccagctcccatcgccccgggcgcacagcctcaaccccgacgcctcgggctccagctgcagcctggcccggacgcgctcccgagaaagctgcgccagcgtgcgccgcgcctcgtcggccgacgacatcgaggccatgcgcgccggggtgctgcccccgccaccgcgccacgccagcaccggggccatgcacccactgcgcagcggcttgctcaactccacctcggactccgacctcgtgcgctaccgcaccattagcaagattccccaaatcaccctcaactttgtggacctcaagggcgaccccttcttggcttcgcccaccagtgaccgtgagatcatagcacctaagataaaggagcgaacccacaatgtcactgagaaggtcacccaggtcctgtccctgggcgccgacgtgctgcctgagtacaagctgcaggcaccgcgcatccaccgctggaccatcctgcattacagccccttcaaggccgtgtgggactggctcatcctgctgctggtcatctacacggctgtcttcacaccctactcggctgccttcctgctgaaggagacggaagaaggcccgcctgctaccgagtgtggctacgcctgccagccgctggctgtggtggacctcatcgtggacatcatgttcattgtggacatcctcatcaacttccgcaccacctacgtcaatgccaacgaggaggtggtcagccaccccggccgcatcgccgtccactacttcaagggctggttcctcatcgacatggtggccgccatccccttcgacctgctcatcttcggctctggctctgaggagctgatcgggctgctgaagactgcgcggctgctgcggctggtgcgcgtggcgcggaagctggatcgctactcagagtacggcgcggccgtgctgttcttgctcatgtgcacctttgcgctcatcgcgcactggctagcctgcatctggtacgccatcggcaacatggagcagccacacatggactcacgcatcggctggctgcacaacctgggcgaccagataggcaaaccctacaacagcagcggcctgggcggcccctccatcaaggacaagtatgtgacggcgctctacttcaccttcagcagcctcaccagtgtgggcttcggcaacgtctctcccaacaccaactcagagaagatcttctccatctgcgtcatgctcattggctccctcatgtatgctagcatcttcggcaacgtgtcggccatcatccagcggctgtactcgggcacagcccgctaccacacacagatgctgcgggtgcgggagttcatccgcttccaccagatccccaatcccctgcgccagcgcctcgaggagtacttccagcacgcctggtcctacaccaacggcatcgacatgaacgcggtgctgaagggcttccctgagtgcctgcaggctgacatctgcctgcacctgaaccgctcactgctgcagcactgcaaacccttccgaggggccaccaagggctgccttcgggccctggccatgaagttcaagaccacacatgcaccgccaggggacacactggtgcatgctggggacctgctcaccgccctgtacttcatctcccggggctccatcgagatcctgcggggcgacgtcgtcgtggccatcctggggaagaatgacatctttggggagcctctgaacctgtatgcaaggcctggcaagtcgaacggggatgtgcgggccctcacctactgtgacctacacaagatccatcgggacgacctgctggaggtgctggacatgtaccctgagttctccgaccacttctggtccagcctggagatcaccttcaacctgcgagataccaacatgatcccgggctcccccggcagtacggagttagagggtggcttcagtcggcaacgcaagctcaagttgtccttccgcaggcgcacggacaaggacacggagcagccaggggaggtgtcggccttggggccgggccgggcgggggcagggccgagtagccggggccggccgggggggccgtggggggagagcccgtccagtggcccctccagccctgagagcagtgaggatgagggcccaggccgcagctccagccccctccgcctggtgcccttctccagccccaggccccccggagagccgccgggtggggagcccctgatggaggactgcgagaagagcagcgacacttgcaaccccctgtcaggcgccttctcaggagtgtccaacattttcagcttctggggggacagtcggggccgccagtaccaggagctccctcgatgccccgcccccacccccagcctcctcaacatccccctctccagcccgggtcggcggccccggggcgacgtggagagcaggctggatgccctccagcgccagctcaacaggctggagacccggctgagtgcagacatggccactgtcctgcagctgctacagaggcagatgacgctggtcccgcccgcctacagtgctgtgaccaccccggggcctggccccacttccacatccccgctgttgcccgtcagccccctccccaccctcaccttggactcgctttctcaggtttcccagttcatggcgtgtgaggagctgcccccgggggccccagagcttccccaagaaggccccacacgacgcctctccctaccgggccagctgggggccctcacctcccagcccctgcacagacacggctcggacccgggcagttagtggggctgcccagtgtggacacgtggctcacccagggatcaaggcgctgctgggccgctccccttggaggccctgctcaggaggccctgaccgtggaaggggagaggaactcgaaagcacagctcctcccccagcccttgggaccatcttctcctgcagtcccctgggccccagtgagaggggcaggggcagggccggcagtaggtggggcctgtggtccccccactgccctgagggcattagctggtctaactgcccggaggcacccggccctgggccttaggcacctcaaggacttttctgctatttactgctcttattgttaaggataataattaaggatcatatgaataattaatgaagatgctgatgactatgaataataaataattatcctgaggaga

SEQ ID NO: 594 - DNA, 3884 bp, Homo sapiens
  source 1..3884: mol_type = genomic DNA
  misc_feature 1..3884: note = cDNA of KCNH2 gene SNP c.2665T>G (p.Leu889Val)
atgccggtgcggaggggccacgtcgcgccgcagaacaccttcctggacaccatcatccgcaagtttgagggccagagccgtaagttcatcatcgccaacgctcgggtggagaactgcgccgtcatctactgcaacgacggcttctgcgagctgtgcggctactcgcgggccgaggtgatgcagcgaccctgcacctgcgacttcctgcacgggccgcgcacgcagcgccgcgctgccgcgcagatcgcgcaggcactgctgggcgccgaggagcgcaaagtggaaatcgccttctaccggaaagatgggagctgcttcctatgtctggtggatgtggtgcccgtgaagaacgaggatggggctgtcatcatgttcatcctcaatttcgaggtggtgatggagaaggacatggtggggtccccggctcatgacaccaaccaccggggcccccccaccagctggctggccccaggccgcgccaagaccttccgcctgaagctgcccgcgctgctggcgctgacggcccgggagtcgtcggtgcggtcgggcggcgcgggcggcgcgggcgccccgggggccgtggtggtggacgtggacctgacgcccgcggcacccagcagcgagtcgctggccctggacgaagtgacagccatggacaaccacgtggcagggctcgggcccgcggaggagcggcgtgcgctggtgggtcccggctctccgccccgcagcgcgcccggccagctcccatcgccccgggcgcacagcctcaaccccgacgcctcgggctccagctgcagcctggcccggacgcgctcccgagaaagctgcgccagcgtgcgccgcgcctcgtcggccgacgacatcgaggccatgcgcgccggggtgctgcccccgccaccgcgccacgccagcaccggggccatgcacccactgcgcagcggcttgctcaactccacctcggactccgacctcgtgcgctaccgcaccattagcaagattccccaaatcaccctcaactttgtggacctcaagggcgaccccttcttggcttcgcccaccagtgaccgtgagatcatagcacctaagataaaggagcgaacccacaatgtcactgagaaggtcacccaggtcctgtccctgggcgccgacgtgctgcctgagtacaagctgcaggcaccgcgcatccaccgctggaccatcctgcattacagccccttcaaggccgtgtgggactggctcatcctgctgctggtcatctacacggctgtcttcacaccctactcggctgccttcctgctgaaggagacggaagaaggcccgcctgctaccgagtgtggctacgcctgccagccgctggctgtggtggacctcatcgtggacatcatgttcattgtggacatcctcatcaacttccgcaccacctacgtcaatgccaacgaggaggtggtcagccaccccggccgcatcgccgtccactacttcaagggctggttcctcatcgacatggtggccgccatccccttcgacctgctcatcttcggctctggctctgaggagctgatcgggctgctgaagactgcgcggctgctgcggctggtgcgcgtggcgcggaagctggatcgctactcagagtacggcgcggccgtgctgttcttgctcatgtgcacctttgcgctcatcgcgcactggctagcctgcatctggtacgccatcggcaacatggagcagccacacatggactcacgcatcggctggctgcacaacctgggcgaccagataggcaaaccctacaacagcagcggcctgggcggcccctccatcaaggacaagtatgtgacggcgctctacttcaccttcagcagcctcaccagtgtgggcttcggcaacgtctctcccaacaccaactcagagaagatcttctccatctgcgtcatgctcattggctccctcatgtatgctagcatcttcggcaacgtgtcggccatcatccagcggctgtactcgggcacagcccgctaccacacacagatgctgcgggtgcgggagttcatccgcttccaccagatccccaatcccctgcgccagcgcctcgaggagtacttccagcacgcctggtcctacaccaacggcatcgacatgaacgcggtgctgaagggcttccctgagtgcctgcaggctgacatctgcctgcacctgaaccgctcactgctgcagcactgcaaacccttccgaggggccaccaagggctgccttcgggccctggccatgaagttcaagaccacacatgcaccgccaggggacacactggtgcatgctggggacctgctcaccgccctgtacttcatctcccggggctccatcgagatcctgcggggcgacgtcgtcgtggccatcctggggaagaatgacatctttggggagcctctgaacctgtatgcaaggcctggcaagtcgaacggggatgtgcgggccctcacctactgtgacctacacaagatccatcgggacgacctgctggaggtgctggacatgtaccctgagttctccgaccacttctggtccagcctggagatcaccttcaacctgcgagataccaacatgatcccgggctcccccggcagtacggagttagagggtggcttcagtcggcaacgcaagcgcaaggtgtccttccgcaggcgcacggacaaggacacggagcagccaggggaggtgtcggccttggggccgggccgggcgggggcagggccgagtagccggggccggccgggggggccgtggggggagagcccgtccagtggcccctccagccctgagagcagtgaggatgagggcccaggccgcagctccagccccctccgcctggtgcccttctccagccccaggccccccggagagccgccgggtggggagcccctgatggaggactgcgagaagagcagcgacacttgcaaccccctgtcaggcgccttctcaggagtgtccaacattttcagcttctggggggacagtcggggccgccagtaccaggagctccctcgatgccccgcccccacccccagcctcctcaacatccccctctccagcccgggtcggcggccccggggcgacgtggagagcaggctggatgccctccagcgccagctcaacaggctggagacccggctgagtgcagacatggccactgtcctgcagctgctacagaggcagatgacgctggtcccgcccgcctacagtgctgtgaccaccccggggcctggccccacttccacatccccgctgttgcccgtcagccccctccccaccctcaccttggactcgctttctcaggtttcccagttcatggcgtgtgaggagctgcccccgggggccccagagcttccccaagaaggccccacacgacgcctctccctaccgggccagctgggggccctcacctcccagcccctgcacagacacggctcggacccgggcagttagtggggctgcccagtgtggacacgtggctcacccagggatcaaggcgctgctgggccgctccccttggaggccctgctcaggaggccctgaccgtggaaggggagaggaactcgaaagcacagctcctcccccagcccttgggaccatcttctcctgcagtcccctgggccccagtgagaggggcaggggcagggccggcagtaggtggggcctgtggtccccccactgccctgagggcattagctggtctaactgcccggaggcacccggccctgggccttaggcacctcaaggacttttctgctatttactgctcttattgttaaggataataattaaggatcatatgaataattaatgaagatgctgatgactatgaataataaataattatcctgaggaga

SEQ ID NO: 595 - DNA, 3884 bp, Homo sapiens
  source 1..3884: mol_type = genomic DNA
  misc_feature 1..3884: note = cDNA of KCNH2 gene SNP c.2668T>C (p.Ser890Pro)
atgccggtgcggaggggccacgtcgcgccgcagaacaccttcctggacaccatcatccgcaagtttgagggccagagccgtaagttcatcatcgccaacgctcgggtggagaactgcgccgtcatctactgcaacgacggcttctgcgagctgtgcggctactcgcgggccgaggtgatgcagcgaccctgcacctgcgacttcctgcacgggccgcgcacgcagcgccgcgctgccgcgcagatcgcgcaggcactgctgggcgccgaggagcgcaaagtggaaatcgccttctaccggaaagatgggagctgcttcctatgtctggtggatgtggtgcccgtgaagaacgaggatggggctgtcatcatgttcatcctcaatttcgaggtggtgatggagaaggacatggtggggtccccggctcatgacaccaaccaccggggcccccccaccagctggctggccccaggccgcgccaagaccttccgcctgaagctgcccgcgctgctggcgctgacggcccgggagtcgtcggtgcggtcgggcggcgcgggcggcgcgggcgccccgggggccgtggtggtggacgtggacctgacgcccgcggcacccagcagcgagtcgctggccctggacgaagtgacagccatggacaaccacgtggcagggctcgggcccgcggaggagcggcgtgcgctggtgggtcccggctctccgccccgcagcgcgcccggccagctcccatcgccccgggcgcacagcctcaaccccgacgcctcgggctccagctgcagcctggcccggacgcgctcccgagaaagctgcgccagcgtgcgccgcgcctcgtcggccgacgacatcgaggccatgcgcgccggggtgctgcccccgccaccgcgccacgccagcaccggggccatgcacccactgcgcagcggcttgctcaactccacctcggactccgacctcgtgcgctaccgcaccattagcaagattccccaaatcaccctcaactttgtggacctcaagggcgaccccttcttggcttcgcccaccagtgaccgtgagatcatagcacctaagataaaggagcgaacccacaatgtcactgagaaggtcacccaggtcctgtccctgggcgccgacgtgctgcctgagtacaagctgcaggcaccgcgcatccaccgctggaccatcctgcattacagccccttcaaggccgtgtgggactggctcatcctgctgctggtcatctacacggctgtcttcacaccctactcggctgccttcctgctgaaggagacggaagaaggcccgcctgctaccgagtgtggctacgcctgccagccgctggctgtggtggacctcatcgtggacatcatgttcattgtggacatcctcatcaacttccgcaccacctacgtcaatgccaacgaggaggtggtcagccaccccggccgcatcgccgtccactacttcaagggctggttcctcatcgacatggtggccgccatccccttcgacctgctcatcttcggctctggctctgaggagctgatcgggctgctgaagactgcgcggctgctgcggctggtgcgcgtggcgcggaagctggatcgctactcagagtacggcgcggccgtgctgttcttgctcatgtgcacctttgcgctcatcgcgcactggctagcctgcatctggtacgccatcggcaacatggagcagccacacatggactcacgcatcggctggctgcacaacctgggcgaccagataggcaaaccctacaacagcagcggcctgggcggcccctccatcaaggacaagtatgtgacggcgctctacttcaccttcagcagcctcaccagtgtgggcttcggcaacgtctctcccaacaccaactcagagaagatcttctccatctgcgtcatgctcattggctccctcatgtatgctagcatcttcggcaacgtgtcggccatcatccagcggctgtactcgggcacagcccgctaccacacacagatgctgcgggtgcgggagttcatccgcttccaccagatccccaatcccctgcgccagcgcctcgaggagtacttccagcacgcctggtcctacaccaacggcatcgacatgaacgcggtgctgaagggcttccctgagtgcctgcaggctgacatctgcctgcacctgaaccgctcactgctgcagcactgcaaacccttccgaggggccaccaagggctgccttcgggccctggccatgaagttcaagaccacacatgcaccgccaggggacacactggtgcatgctggggacctgctcaccgccctgtacttcatctcccggggctccatcgagatcctgcggggcgacgtcgtcgtggccatcctggggaagaatgacatctttggggagcctctgaacctgtatgcaaggcctggcaagtcgaacggggatgtgcgggccctcacctactgtgacctacacaagatccatcgggacgacctgctggaggtgctggacatgtaccctgagttctccgaccacttctggtccagcctggagatcaccttcaacctgcgagataccaacatgatcccgggctcccccggcagtacggagttagagggtggcttcagtcggcaacgcaagcgcaagttgcccttccgcaggcgcacggacaaggacacggagcagccaggggaggtgtcggccttggggccgggccgggcgggggcagggccgagtagccggggccggccgggggggccgtggggggagagcccgtccagtggcccctccagccctgagagcagtgaggatgagggcccaggccgcagctccagccccctccgcctggtgcccttctccagccccaggccccccggagagccgccgggtggggagcccctgatggaggactgcgagaagagcagcgacacttgcaaccccctgtcaggcgccttctcaggagtgtccaacattttcagcttctggggggacagtcggggccgccagtaccaggagctccctcgatgccccgcccccacccccagcctcctcaacatccccctctccagcccgggtcggcggccccggggcgacgtggagagcaggctggatgccctccagcgccagctcaacaggctggagacccggctgagtgcagacatggccactgtcctgcagctgctacagaggcagatgacgctggtcccgcccgcctacagtgctgtgaccaccccggggcctggccccacttccacatccccgctgttgcccgtcagccccctccccaccctcaccttggactcgctttctcaggtttcccagttcatggcgtgtgaggagctgcccccgggggccccagagcttccccaagaaggccccacacgacgcctctccctaccgggccagctgggggccctcacctcccagcccctgcacagacacggctcggacccgggcagttagtggggctgcccagtgtggacacgtggctcacccagggatcaaggcgctgctgggccgctccccttggaggccctgctcaggaggccctgaccgtggaaggggagaggaactcgaaagcacagctcctcccccagcccttgggaccatcttctcctgcagtcccctgggccccagtgagaggggcaggggcagggccggcagtaggtggggcctgtggtccccccactgccctgagggcattagctggtctaactgcccggaggcacccggccctgggccttaggcacctcaaggacttttctgctatttactgctcttattgttaaggataataattaaggatcatatgaataattaatgaagatgctgatgactatgaataataaataattatcctgaggaga

SEQ ID NO: 596 - DNA, 3884 bp, Homo sapiens
  source 1..3884: mol_type = genomic DNA
  misc_feature 1..3884: note = cDNA of KCNH2 gene SNP c.2674C>T (p.Arg892Cys)
atgccggtgcggaggggccacgtcgcgccgcagaacaccttcctggacaccatcatccgcaagtttgagggccagagccgtaagttcatcatcgccaacgctcgggtggagaactgcgccgtcatctactgcaacgacggcttctgcgagctgtgcggctactcgcgggccgaggtgatgcagcgaccctgcacctgcgacttcctgcacgggccgcgcacgcagcgccgcgctgccgcgcagatcgcgcaggcactgctgggcgccgaggagcgcaaagtggaaatcgccttctaccggaaagatgggagctgcttcctatgtctggtggatgtggtgcccgtgaagaacgaggatggggctgtcatcatgttcatcctcaatttcgaggtggtgatggagaaggacatggtggggtccccggctcatgacaccaaccaccggggcccccccaccagctggctggccccaggccgcgccaagaccttccgcctgaagctgcccgcgctgctggcgctgacggcccgggagtcgtcggtgcggtcgggcggcgcgggcggcgcgggcgccccgggggccgtggtggtggacgtggacctgacgcccgcggcacccagcagcgagtcgctggccctggacgaagtgacagccatggacaaccacgtggcagggctcgggcccgcggaggagcggcgtgcgctggtgggtcccggctctccgccccgcagcgcgcccggccagctcccatcgccccgggcgcacagcctcaaccccgacgcctcgggctccagctgcagcctggcccggacgcgctcccgagaaagctgcgccagcgtgcgccgcgcctcgtcggccgacgacatcgaggccatgcgcgccggggtgctgcccccgccaccgcgccacgccagcaccggggccatgcacccactgcgcagcggcttgctcaactccacctcggactccgacctcgtgcgctaccgcaccattagcaagattccccaaatcaccctcaactttgtggacctcaagggcgaccccttcttggcttcgcccaccagtgaccgtgagatcatagcacctaagataaaggagcgaacccacaatgtcactgagaaggtcacccaggtcctgtccctgggcgccgacgtgctgcctgagtacaagctgcaggcaccgcgcatccaccgctggaccatcctgcattacagccccttcaaggccgtgtgggactggctcatcctgctgctggtcatctacacggctgtcttcacaccctactcggctgccttcctgctgaaggagacggaagaaggcccgcctgctaccgagtgtggctacgcctgccagccgctggctgtggtggacctcatcgtggacatcatgttcattgtggacatcctcatcaacttccgcaccacctacgtcaatgccaacgaggaggtggtcagccaccccggccgcatcgccgtccactacttcaagggctggttcctcatcgacatggtggccgccatccccttcgacctgctcatcttcggctctggctctgaggagctgatcgggctgctgaagactgcgcggctgctgcggctggtgcgcgtggcgcggaagctggatcgctactcagagtacggcgcggccgtgctgttcttgctcatgtgcacctttgcgctcatcgcgcactggctagcctgcatctggtacgccatcggcaacatggagcagccacacatggactcacgcatcggctggctgcacaacctgggcgaccagataggcaaaccctacaacagcagcggcctgggcggcccctccatcaaggacaagtatgtgacggcgctctacttcaccttcagcagcctcaccagtgtgggcttcggcaacgtctctcccaacaccaactcagagaagatcttctccatctgcgtcatgctcattggctccctcatgtatgctagcatcttcggcaacgtgtcggccatcatccagcggctgtactcgggcacagcccgctaccacacacagatgctgcgggtgcgggagttcatccgcttccaccagatccccaatcccctgcgccagcgcctcgaggagtacttccagcacgcctggtcctacaccaacggcatcgacatgaacgcggtgctgaagggcttccctgagtgcctgcaggctgacatctgcctgcacctgaaccgctcactgctgcagcactgcaaacccttccgaggggccaccaagggctgccttcgggccctggccatgaagttcaagaccacacatgcaccgccaggggacacactggtgcatgctggggacctgctcaccgccctgtacttcatctcccggggctccatcgagatcctgcggggcgacgtcgtcgtggccatcctggggaagaatgacatctttggggagcctctgaacctgtatgcaaggcctggcaagtcgaacggggatgtgcgggccctcacctactgtgacctacacaagatccatcgggacgacctgctggaggtgctggacatgtaccctgagttctccgaccacttctggtccagcctggagatcaccttcaacctgcgagataccaacatgatcccgggctcccccggcagtacggagttagagggtggcttcagtcggcaacgcaagcgcaagttgtccttctgcaggcgcacggacaaggacacggagcagccaggggaggtgtcggccttggggccgggccgggcgggggcagggccgagtagccggggccggccgggggggccgtggggggagagcccgtccagtggcccctccagccctgagagcagtgaggatgagggcccaggccgcagctccagccccctccgcctggtgcccttctccagccccaggccccccggagagccgccgggtggggagcccctgatggaggactgcgagaagagcagcgacacttgcaaccccctgtcaggcgccttctcaggagtgtccaacattttcagcttctggggggacagtcggggccgccagtaccaggagctccctcgatgccccgcccccacccccagcctcctcaacatccccctctccagcccgggtcggcggccccggggcgacgtggagagcaggctggatgccctccagcgccagctcaacaggctggagacccggctgagtgcagacatggccactgtcctgcagctgctacagaggcagatgacgctggtcccgcccgcctacagtgctgtgaccaccccggggcctggccccacttccacatccccgctgttgcccgtcagccccctccccaccctcaccttggactcgctttctcaggtttcccagttcatggcgtgtgaggagctgcccccgggggccccagagcttccccaagaaggccccacacgacgcctctccctaccgggccagctgggggccctcacctcccagcccctgcacagacacggctcggacccgggcagttagtggggctgcccagtgtggacacgtggctcacccagggatcaaggcgctgctgggccgctccccttggaggccctgctcaggaggccctgaccgtggaaggggagaggaactcgaaagcacagctcctcccccagcccttgggaccatcttctcctgcagtcccctgggccccagtgagaggggcaggggcagggccggcagtaggtggggcctgtggtccccccactgccctgagggcattagctggtctaactgcccggaggcacccggccctgggccttaggcacctcaaggacttttctgctatttactgctcttattgttaaggataataattaaggatcatatgaataattaatgaagatgctgatgactatgaataataaataattatcctgaggaga

SEQ ID NO: 597 - DNA, 3884 bp, Homo sapiens
  source 1..3884: mol_type = genomic DNA
  misc_feature 1..3884: note = cDNA of KCNH2 gene SNP c.2675G>A (p.Arg892His)
atgccggtgcggaggggccacgtcgcgccgcagaacaccttcctggacaccatcatccgcaagtttgagggccagagccgtaagttcatcatcgccaacgctcgggtggagaactgcgccgtcatctactgcaacgacggcttctgcgagctgtgcggctactcgcgggccgaggtgatgcagcgaccctgcacctgcgacttcctgcacgggccgcgcacgcagcgccgcgctgccgcgcagatcgcgcaggcactgctgggcgccgaggagcgcaaagtggaaatcgccttctaccggaaagatgggagctgcttcctatgtctggtggatgtggtgcccgtgaagaacgaggatggggctgtcatcatgttcatcctcaatttcgaggtggtgatggagaaggacatggtggggtccccggctcatgacaccaaccaccggggcccccccaccagctggctggccccaggccgcgccaagaccttccgcctgaagctgcccgcgctgctggcgctgacggcccgggagtcgtcggtgcggtcgggcggcgcgggcggcgcgggcgccccgggggccgtggtggtggacgtggacctgacgcccgcggcacccagcagcgagtcgctggccctggacgaagtgacagccatggacaaccacgtggcagggctcgggcccgcggaggagcggcgtgcgctggtgggtcccggctctccgccccgcagcgcgcccggccagctcccatcgccccgggcgcacagcctcaaccccgacgcctcgggctccagctgcagcctggcccggacgcgctcccgagaaagctgcgccagcgtgcgccgcgcctcgtcggccgacgacatcgaggccatgcgcgccggggtgctgcccccgccaccgcgccacgccagcaccggggccatgcacccactgcgcagcggcttgctcaactccacctcggactccgacctcgtgcgctaccgcaccattagcaagattccccaaatcaccctcaactttgtggacctcaagggcgaccccttcttggcttcgcccaccagtgaccgtgagatcatagcacctaagataaaggagcgaacccacaatgtcactgagaaggtcacccaggtcctgtccctgggcgccgacgtgctgcctgagtacaagctgcaggcaccgcgcatccaccgctggaccatcctgcattacagccccttcaaggccgtgtgggactggctcatcctgctgctggtcatctacacggctgtcttcacaccctactcggctgccttcctgctgaaggagacggaagaaggcccgcctgctaccgagtgtggctacgcctgccagccgctggctgtggtggacctcatcgtggacatcatgttcattgtggacatcctcatcaacttccgcaccacctacgtcaatgccaacgaggaggtggtcagccaccccggccgcatcgccgtccactacttcaagggctggttcctcatcgacatggtggccgccatccccttcgacctgctcatcttcggctctggctctgaggagctgatcgggctgctgaagactgcgcggctgctgcggctggtgcgcgtggcgcggaagctggatcgctactcagagtacggcgcggccgtgctgttcttgctcatgtgcacctttgcgctcatcgcgcactggctagcctgcatctggtacgccatcggcaacatggagcagccacacatggactcacgcatcggctggctgcacaacctgggcgaccagataggcaaaccctacaacagcagcggcctgggcggcccctccatcaaggacaagtatgtgacggcgctctacttcaccttcagcagcctcaccagtgtgggcttcggcaacgtctctcccaacaccaactcagagaagatcttctccatctgcgtcatgctcattggctccctcatgtatgctagcatcttcggcaacgtgtcggccatcatccagcggctgtactcgggcacagcccgctaccacacacagatgctgcgggtgcgggagttcatccgcttccaccagatccccaatcccctgcgccagcgcctcgaggagtacttccagcacgcctggtcctacaccaacggcatcgacatgaacgcggtgctgaagggcttccctgagtgcctgcaggctgacatctgcctgcacctgaaccgctcactgctgcagcactgcaaacccttccgaggggccaccaagggctgccttcgggccctggccatgaagttcaagaccacacatgcaccgccaggggacacactggtgcatgctggggacctgctcaccgccctgtacttcatctcccggggctccatcgagatcctgcggggcgacgtcgtcgtggccatcctggggaagaatgacatctttggggagcctctgaacctgtatgcaaggcctggcaagtcgaacggggatgtgcgggccctcacctactgtgacctacacaagatccatcgggacgacctgctggaggtgctggacatgtaccctgagttctccgaccacttctggtccagcctggagatcaccttcaacctgcgagataccaacatgatcccgggctcccccggcagtacggagttagagggtggcttcagtcggcaacgcaagcgcaagttgtccttccacaggcgcacggacaaggacacggagcagccaggggaggtgtcggccttggggccgggccgggcgggggcagggccgagtagccggggccggccgggggggccgtggggggagagcccgtccagtggcccctccagccctgagagcagtgaggatgagggcccaggccgcagctccagccccctccgcctggtgcccttctccagccccaggccccccggagagccgccgggtggggagcccctgatggaggactgcgagaagagcagcgacacttgcaaccccctgtcaggcgccttctcaggagtgtccaacattttcagcttctggggggacagtcggggccgccagtaccaggagctccctcgatgccccgcccccacccccagcctcctcaacatccccctctccagcccgggtcggcggccccggggcgacgtggagagcaggctggatgccctccagcgccagctcaacaggctggagacccggctgagtgcagacatggccactgtcctgcagctgctacagaggcagatgacgctggtcccgcccgcctacagtgctgtgaccaccccggggcctggccccacttccacatccccgctgttgcccgtcagccccctccccaccctcaccttggactcgctttctcaggtttcccagttcatggcgtgtgaggagctgcccccgggggccccagagcttccccaagaaggccccacacgacgcctctccctaccgggccagctgggggccctcacctcccagcccctgcacagacacggctcggacccgggcagttagtggggctgcccagtgtggacacgtggctcacccagggatcaaggcgctgctgggccgctccccttggaggccctgctcaggaggccctgaccgtggaaggggagaggaactcgaaagcacagctcctcccccagcccttgggaccatcttctcctgcagtcccctgggccccagtgagaggggcaggggcagggccggcagtaggtggggcctgtggtccccccactgccctgagggcattagctggtctaactgcccggaggcacccggccctgggccttaggcacctcaaggacttttctgctatttactgctcttattgttaaggataataattaaggatcatatgaataattaatgaagatgctgatgactatgaataataaataattatcctgaggaga

SEQ ID NO: 598 - DNA, 3884 bp, Homo sapiens
  source 1..3884: mol_type = genomic DNA
  misc_feature 1..3884: note = cDNA of KCNH2 gene SNP c.2678G>A (p.Arg893Lys)
atgccggtgcggaggggccacgtcgcgccgcagaacaccttcctggacaccatcatccgcaagtttgagggccagagccgtaagttcatcatcgccaacgctcgggtggagaactgcgccgtcatctactgcaacgacggcttctgcgagctgtgcggctactcgcgggccgaggtgatgcagcgaccctgcacctgcgacttcctgcacgggccgcgcacgcagcgccgcgctgccgcgcagatcgcgcaggcactgctgggcgccgaggagcgcaaagtggaaatcgccttctaccggaaagatgggagctgcttcctatgtctggtggatgtggtgcccgtgaagaacgaggatggggctgtcatcatgttcatcctcaatttcgaggtggtgatggagaaggacatggtggggtccccggctcatgacaccaaccaccggggcccccccaccagctggctggccccaggccgcgccaagaccttccgcctgaagctgcccgcgctgctggcgctgacggcccgggagtcgtcggtgcggtcgggcggcgcgggcggcgcgggcgccccgggggccgtggtggtggacgtggacctgacgcccgcggcacccagcagcgagtcgctggccctggacgaagtgacagccatggacaaccacgtggcagggctcgggcccgcggaggagcggcgtgcgctggtgggtcccggctctccgccccgcagcgcgcccggccagctcccatcgccccgggcgcacagcctcaaccccgacgcctcgggctccagctgcagcctggcccggacgcgctcccgagaaagctgcgccagcgtgcgccgcgcctcgtcggccgacgacatcgaggccatgcgcgccggggtgctgcccccgccaccgcgccacgccagcaccggggccatgcacccactgcgcagcggcttgctcaactccacctcggactccgacctcgtgcgctaccgcaccattagcaagattccccaaatcaccctcaactttgtggacctcaagggcgaccccttcttggcttcgcccaccagtgaccgtgagatcatagcacctaagataaaggagcgaacccacaatgtcactgagaaggtcacccaggtcctgtccctgggcgccgacgtgctgcctgagtacaagctgcaggcaccgcgcatccaccgctggaccatcctgcattacagccccttcaaggccgtgtgggactggctcatcctgctgctggtcatctacacggctgtcttcacaccctactcggctgccttcctgctgaaggagacggaagaaggcccgcctgctaccgagtgtggctacgcctgccagccgctggctgtggtggacctcatcgtggacatcatgttcattgtggacatcctcatcaacttccgcaccacctacgtcaatgccaacgaggaggtggtcagccaccccggccgcatcgccgtccactacttcaagggctggttcctcatcgacatggtggccgccatccccttcgacctgctcatcttcggctctggctctgaggagctgatcgggctgctgaagactgcgcggctgctgcggctggtgcgcgtggcgcggaagctggatcgctactcagagtacggcgcggccgtgctgttcttgctcatgtgcacctttgcgctcatcgcgcactggctagcctgcatctggtacgccatcggcaacatggagcagccacacatggactcacgcatcggctggctgcacaacctgggcgaccagataggcaaaccctacaacagcagcggcctgggcggcccctccatcaaggacaagtatgtgacggcgctctacttcaccttcagcagcctcaccagtgtgggcttcggcaacgtctctcccaacaccaactcagagaagatcttctccatctgcgtcatgctcattggctccctcatgtatgctagcatcttcggcaacgtgtcggccatcatccagcggctgtactcgggcacagcccgctaccacacacagatgctgcgggtgcgggagttcatccgcttccaccagatccccaatcccctgcgccagcgcctcgaggagtacttccagcacgcctggtcctacaccaacggcatcgacatgaacgcggtgctgaagggcttccctgagtgcctgcaggctgacatctgcctgcacctgaaccgctcactgctgcagcactgcaaacccttccgaggggccaccaagggctgccttcgggccctggccatgaagttcaagaccacacatgcaccgccaggggacacactggtgcatgctggggacctgctcaccgccctgtacttcatctcccggggctccatcgagatcctgcggggcgacgtcgtcgtggccatcctggggaagaatgacatctttggggagcctctgaacctgtatgcaaggcctggcaagtcgaacggggatgtgcgggccctcacctactgtgacctacacaagatccatcgggacgacctgctggaggtgctggacatgtaccctgagttctccgaccacttctggtccagcctggagatcaccttcaacctgcgagataccaacatgatcccgggctcccccggcagtacggagttagagggtggcttcagtcggcaacgcaagcgcaagttgtccttccgcaagcgcacggacaaggacacggagcagccaggggaggtgtcggccttggggccgggccgggcgggggcagggccgagtagccggggccggccgggggggccgtggggggagagcccgtccagtggcccctccagccctgagagcagtgaggatgagggcccaggccgcagctccagccccctccgcctggtgcccttctccagccccaggccccccggagagccgccgggtggggagcccctgatggaggactgcgagaagagcagcgacacttgcaaccccctgtcaggcgccttctcaggagtgtccaacattttcagcttctggggggacagtcggggccgccagtaccaggagctccctcgatgccccgcccccacccccagcctcctcaacatccccctctccagcccgggtcggcggccccggggcgacgtggagagcaggctggatgccctccagcgccagctcaacaggctggagacccggctgagtgcagacatggccactgtcctgcagctgctacagaggcagatgacgctggtcccgcccgcctacagtgctgtgaccaccccggggcctggccccacttccacatccccgctgttgcccgtcagccccctccccaccctcaccttggactcgctttctcaggtttcccagttcatggcgtgtgaggagctgcccccgggggccccagagcttccccaagaaggccccacacgacgcctctccctaccgggccagctgggggccctcacctcccagcccctgcacagacacggctcggacccgggcagttagtggggctgcccagtgtggacacgtggctcacccagggatcaaggcgctgctgggccgctccccttggaggccctgctcaggaggccctgaccgtggaaggggagaggaactcgaaagcacagctcctcccccagcccttgggaccatcttctcctgcagtcccctgggccccagtgagaggggcaggggcagggccggcagtaggtggggcctgtggtccccccactgccctgagggcattagctggtctaactgcccggaggcacccggccctgggccttaggcacctcaaggacttttctgctatttactgctcttattgttaaggataataattaaggatcatatgaataattaatgaagatgctgatgactatgaataataaataattatcctgaggaga

SEQ ID NO: 599 - DNA, 3884 bp, Homo sapiens
  source 1..3884: mol_type = genomic DNA
  misc_feature 1..3884: note = cDNA of KCNH2 gene SNP c.2680C>T (p.Arg894Cys)
atgccggtgcggaggggccacgtcgcgccgcagaacaccttcctggacaccatcatccgcaagtttgagggccagagccgtaagttcatcatcgccaacgctcgggtggagaactgcgccgtcatctactgcaacgacggcttctgcgagctgtgcggctactcgcgggccgaggtgatgcagcgaccctgcacctgcgacttcctgcacgggccgcgcacgcagcgccgcgctgccgcgcagatcgcgcaggcactgctgggcgccgaggagcgcaaagtggaaatcgccttctaccggaaagatgggagctgcttcctatgtctggtggatgtggtgcccgtgaagaacgaggatggggctgtcatcatgttcatcctcaatttcgaggtggtgatggagaaggacatggtggggtccccggctcatgacaccaaccaccggggcccccccaccagctggctggccccaggccgcgccaagaccttccgcctgaagctgcccgcgctgctggcgctgacggcccgggagtcgtcggtgcggtcgggcggcgcgggcggcgcgggcgccccgggggccgtggtggtggacgtggacctgacgcccgcggcacccagcagcgagtcgctggccctggacgaagtgacagccatggacaaccacgtggcagggctcgggcccgcggaggagcggcgtgcgctggtgggtcccggctctccgccccgcagcgcgcccggccagctcccatcgccccgggcgcacagcctcaaccccgacgcctcgggctccagctgcagcctggcccggacgcgctcccgagaaagctgcgccagcgtgcgccgcgcctcgtcggccgacgacatcgaggccatgcgcgccggggtgctgcccccgccaccgcgccacgccagcaccggggccatgcacccactgcgcagcggcttgctcaactccacctcggactccgacctcgtgcgctaccgcaccattagcaagattccccaaatcaccctcaactttgtggacctcaagggcgaccccttcttggcttcgcccaccagtgaccgtgagatcatagcacctaagataaaggagcgaacccacaatgtcactgagaaggtcacccaggtcctgtccctgggcgccgacgtgctgcctgagtacaagctgcaggcaccgcgcatccaccgctggaccatcctgcattacagccccttcaaggccgtgtgggactggctcatcctgctgctggtcatctacacggctgtcttcacaccctactcggctgccttcctgctgaaggagacggaagaaggcccgcctgctaccgagtgtggctacgcctgccagccgctggctgtggtggacctcatcgtggacatcatgttcattgtggacatcctcatcaacttccgcaccacctacgtcaatgccaacgaggaggtggtcagccaccccggccgcatcgccgtccactacttcaagggctggttcctcatcgacatggtggccgccatccccttcgacctgctcatcttcggctctggctctgaggagctgatcgggctgctgaagactgcgcggctgctgcggctggtgcgcgtggcgcggaagctggatcgctactcagagtacggcgcggccgtgctgttcttgctcatgtgcacctttgcgctcatcgcgcactggctagcctgcatctggtacgccatcggcaacatggagcagccacacatggactcacgcatcggctggctgcacaacctgggcgaccagataggcaaaccctacaacagcagcggcctgggcggcccctccatcaaggacaagtatgtgacggcgctctacttcaccttcagcagcctcaccagtgtgggcttcggcaacgtctctcccaacaccaactcagagaagatcttctccatctgcgtcatgctcattggctccctcatgtatgctagcatcttcggcaacgtgtcggccatcatccagcggctgtactcgggcacagcccgctaccacacacagatgctgcgggtgcgggagttcatccgcttccaccagatccccaatcccctgcgccagcgcctcgaggagtacttccagcacgcctggtcctacaccaacggcatcgacatgaacgcggtgctgaagggcttccctgagtgcctgcaggctgacatctgcctgcacctgaaccgctcactgctgcagcactgcaaacccttccgaggggccaccaagggctgccttcgggccctggccatgaagttcaagaccacacatgcaccgccaggggacacactggtgcatgctggggacctgctcaccgccctgtacttcatctcccggggctccatcgagatcctgcggggcgacgtcgtcgtggccatcctggggaagaatgacatctttggggagcctctgaacctgtatgcaaggcctggcaagtcgaacggggatgtgcgggccctcacctactgtgacctacacaagatccatcgggacgacctgctggaggtgctggacatgtaccctgagttctccgaccacttctggtccagcctggagatcaccttcaacctgcgagataccaacatgatcccgggctcccccggcagtacggagttagagggtggcttcagtcggcaacgcaagcgcaagttgtccttccgcaggtgcacggacaaggacacggagcagccaggggaggtgtcggccttggggccgggccgggcgggggcagggccgagtagccggggccggccgggggggccgtggggggagagcccgtccagtggcccctccagccctgagagcagtgaggatgagggcccaggccgcagctccagccccctccgcctggtgcccttctccagccccaggccccccggagagccgccgggtggggagcccctgatggaggactgcgagaagagcagcgacacttgcaaccccctgtcaggcgccttctcaggagtgtccaacattttcagcttctggggggacagtcggggccgccagtaccaggagctccctcgatgccccgcccccacccccagcctcctcaacatccccctctccagcccgggtcggcggccccggggcgacgtggagagcaggctggatgccctccagcgccagctcaacaggctggagacccggctgagtgcagacatggccactgtcctgcagctgctacagaggcagatgacgctggtcccgcccgcctacagtgctgtgaccaccccggggcctggccccacttccacatccccgctgttgcccgtcagccccctccccaccctcaccttggactcgctttctcaggtttcccagttcatggcgtgtgaggagctgcccccgggggccccagagcttccccaagaaggccccacacgacgcctctccctaccgggccagctgggggccctcacctcccagcccctgcacagacacggctcggacccgggcagttagtggggctgcccagtgtggacacgtggctcacccagggatcaaggcgctgctgggccgctccccttggaggccctgctcaggaggccctgaccgtggaaggggagaggaactcgaaagcacagctcctcccccagcccttgggaccatcttctcctgcagtcccctgggccccagtgagaggggcaggggcagggccggcagtaggtggggcctgtggtccccccactgccctgagggcattagctggtctaactgcccggaggcacccggccctgggccttaggcacctcaaggacttttctgctatttactgctcttattgttaaggataataattaaggatcatatgaataattaatgaagatgctgatgactatgaataataaataattatcctgaggaga

SEQ ID NO: 600 - DNA, 3884 bp, Homo sapiens
  source 1..3884: mol_type = genomic DNA
  misc_feature 1..3884: note = cDNA of KCNH2 gene SNP c.2681G>A (p.Arg894His)
atgccggtgcggaggggccacgtcgcgccgcagaacaccttcctggacaccatcatccgcaagtttgagggccagagccgtaagttcatcatcgccaacgctcgggtggagaactgcgccgtcatctactgcaacgacggcttctgcgagctgtgcggctactcgcgggccgaggtgatgcagcgaccctgcacctgcgacttcctgcacgggccgcgcacgcagcgccgcgctgccgcgcagatcgcgcaggcactgctgggcgccgaggagcgcaaagtggaaatcgccttctaccggaaagatgggagctgcttcctatgtctggtggatgtggtgcccgtgaagaacgaggatggggctgtcatcatgttcatcctcaatttcgaggtggtgatggagaaggacatggtggggtccccggctcatgacaccaaccaccggggcccccccaccagctggctggccccaggccgcgccaagaccttccgcctgaagctgcccgcgctgctggcgctgacggcccgggagtcgtcggtgcggtcgggcggcgcgggcggcgcgggcgccccgggggccgtggtggtggacgtggacctgacgcccgcggcacccagcagcgagtcgctggccctggacgaagtgacagccatggacaaccacgtggcagggctcgggcccgcggaggagcggcgtgcgctggtgggtcccggctctccgccccgcagcgcgcccggccagctcccatcgccccgggcgcacagcctcaaccccgacgcctcgggctccagctgcagcctggcccggacgcgctcccgagaaagctgcgccagcgtgcgccgcgcctcgtcggccgacgacatcgaggccatgcgcgccggggtgctgcccccgccaccgcgccacgccagcaccggggccatgcacccactgcgcagcggcttgctcaactccacctcggactccgacctcgtgcgctaccgcaccattagcaagattccccaaatcaccctcaactttgtggacctcaagggcgaccccttcttggcttcgcccaccagtgaccgtgagatcatagcacctaagataaaggagcgaacccacaatgtcactgagaaggtcacccaggtcctgtccctgggcgccgacgtgctgcctgagtacaagctgcaggcaccgcgcatccaccgctggaccatcctgcattacagccccttcaaggccgtgtgggactggctcatcctgctgctggtcatctacacggctgtcttcacaccctactcggctgccttcctgctgaaggagacggaagaaggcccgcctgctaccgagtgtggctacgcctgccagccgctggctgtggtggacctcatcgtggacatcatgttcattgtggacatcctcatcaacttccgcaccacctacgtcaatgccaacgaggaggtggtcagccaccccggccgcatcgccgtccactacttcaagggctggttcctcatcgacatggtggccgccatccccttcgacctgctcatcttcggctctggctctgaggagctgatcgggctgctgaagactgcgcggctgctgcggctggtgcgcgtggcgcggaagctggatcgctactcagagtacggcgcggccgtgctgttcttgctcatgtgcacctttgcgctcatcgcgcactggctagcctgcatctggtacgccatcggcaacatggagcagccacacatggactcacgcatcggctggctgcacaacctgggcgaccagataggcaaaccctacaacagcagcggcctgggcggcccctccatcaaggacaagtatgtgacggcgctctacttcaccttcagcagcctcaccagtgtgggcttcggcaacgtctctcccaacaccaactcagagaagatcttctccatctgcgtcatgctcattggctccctcatgtatgctagcatcttcggcaacgtgtcggccatcatccagcggctgtactcgggcacagcccgctaccacacacagatgctgcgggtgcgggagttcatccgcttccaccagatccccaatcccctgcgccagcgcctcgaggagtacttccagcacgcctggtcctacaccaacggcatcgacatgaacgcggtgctgaagggcttccctgagtgcctgcaggctgacatctgcctgcacctgaaccgctcactgctgcagcactgcaaacccttccgaggggccaccaagggctgccttcgggccctggccatgaagttcaagaccacacatgcaccgccaggggacacactggtgcatgctggggacctgctcaccgccctgtacttcatctcccggggctccatcgagatcctgcggggcgacgtcgtcgtggccatcctggggaagaatgacatctttggggagcctctgaacctgtatgcaaggcctggcaagtcgaacggggatgtgcgggccctcacctactgtgacctacacaagatccatcgggacgacctgctggaggtgctggacatgtaccctgagttctccgaccacttctggtccagcctggagatcaccttcaacctgcgagataccaacatgatcccgggctcccccggcagtacggagttagagggtggcttcagtcggcaacgcaagcgcaagttgtccttccgcaggcacacggacaaggacacggagcagccaggggaggtgtcggccttggggccgggccgggcgggggcagggccgagtagccggggccggccgggggggccgtggggggagagcccgtccagtggcccctccagccctgagagcagtgaggatgagggcccaggccgcagctccagccccctccgcctggtgcccttctccagccccaggccccccggagagccgccgggtggggagcccctgatggaggactgcgagaagagcagcgacacttgcaaccccctgtcaggcgccttctcaggagtgtccaacattttcagcttctggggggacagtcggggccgccagtaccaggagctccctcgatgccccgcccccacccccagcctcctcaacatccccctctccagcccgggtcggcggccccggggcgacgtggagagcaggctggatgccctccagcgccagctcaacaggctggagacccggctgagtgcagacatggccactgtcctgcagctgctacagaggcagatgacgctggtcccgcccgcctacagtgctgtgaccaccccggggcctggccccacttccacatccccgctgttgcccgtcagccccctccccaccctcaccttggactcgctttctcaggtttcccagttcatggcgtgtgaggagctgcccccgggggccccagagcttccccaagaaggccccacacgacgcctctccctaccgggccagctgggggccctcacctcccagcccctgcacagacacggctcggacccgggcagttagtggggctgcccagtgtggacacgtggctcacccagggatcaaggcgctgctgggccgctccccttggaggccctgctcaggaggccctgaccgtggaaggggagaggaactcgaaagcacagctcctcccccagcccttgggaccatcttctcctgcagtcccctgggccccagtgagaggggcaggggcagggccggcagtaggtggggcctgtggtccccccactgccctgagggcattagctggtctaactgcccggaggcacccggccctgggccttaggcacctcaaggacttttctgctatttactgctcttattgttaaggataataattaaggatcatatgaataattaatgaagatgctgatgactatgaataataaataattatcctgaggaga

SEQ ID NO: 601 - DNA, 3884 bp, Homo sapiens
  source 1..3884: mol_type = genomic DNA
  misc_feature 1..3884: note = cDNA of KCNH2 gene SNP c.2681G>T (p.Arg894Leu)
atgccggtgcggaggggccacgtcgcgccgcagaacaccttcctggacaccatcatccgcaagtttgagggccagagccgtaagttcatcatcgccaacgctcgggtggagaactgcgccgtcatctactgcaacgacggcttctgcgagctgtgcggctactcgcgggccgaggtgatgcagcgaccctgcacctgcgacttcctgcacgggccgcgcacgcagcgccgcgctgccgcgcagatcgcgcaggcactgctgggcgccgaggagcgcaaagtggaaatcgccttctaccggaaagatgggagctgcttcctatgtctggtggatgtggtgcccgtgaagaacgaggatggggctgtcatcatgttcatcctcaatttcgaggtggtgatggagaaggacatggtggggtccccggctcatgacaccaaccaccggggcccccccaccagctggctggccccaggccgcgccaagaccttccgcctgaagctgcccgcgctgctggcgctgacggcccgggagtcgtcggtgcggtcgggcggcgcgggcggcgcgggcgccccgggggccgtggtggtggacgtggacctgacgcccgcggcacccagcagcgagtcgctggccctggacgaagtgacagccatggacaaccacgtggcagggctcgggcccgcggaggagcggcgtgcgctggtgggtcccggctctccgccccgcagcgcgcccggccagctcccatcgccccgggcgcacagcctcaaccccgacgcctcgggctccagctgcagcctggcccggacgcgctcccgagaaagctgcgccagcgtgcgccgcgcctcgtcggccgacgacatcgaggccatgcgcgccggggtgctgcccccgccaccgcgccacgccagcaccggggccatgcacccactgcgcagcggcttgctcaactccacctcggactccgacctcgtgcgctaccgcaccattagcaagattccccaaatcaccctcaactttgtggacctcaagggcgaccccttcttggcttcgcccaccagtgaccgtgagatcatagcacctaagataaaggagcgaacccacaatgtcactgagaaggtcacccaggtcctgtccctgggcgccgacgtgctgcctgagtacaagctgcaggcaccgcgcatccaccgctggaccatcctgcattacagccccttcaaggccgtgtgggactggctcatcctgctgctggtcatctacacggctgtcttcacaccctactcggctgccttcctgctgaaggagacggaagaaggcccgcctgctaccgagtgtggctacgcctgccagccgctggctgtggtggacctcatcgtggacatcatgttcattgtggacatcctcatcaacttccgcaccacctacgtcaatgccaacgaggaggtggtcagccaccccggccgcatcgccgtccactacttcaagggctggttcctcatcgacatggtggccgccatccccttcgacctgctcatcttcggctctggctctgaggagctgatcgggctgctgaagactgcgcggctgctgcggctggtgcgcgtggcgcggaagctggatcgctactcagagtacggcgcggccgtgctgttcttgctcatgtgcacctttgcgctcatcgcgcactggctagcctgcatctggtacgccatcggcaacatggagcagccacacatggactcacgcatcggctggctgcacaacctgggcgaccagataggcaaaccctacaacagcagcggcctgggcggcccctccatcaaggacaagtatgtgacggcgctctacttcaccttcagcagcctcaccagtgtgggcttcggcaacgtctctcccaacaccaactcagagaagatcttctccatctgcgtcatgctcattggctccctcatgtatgctagcatcttcggcaacgtgtcggccatcatccagcggctgtactcgggcacagcccgctaccacacacagatgctgcgggtgcgggagttcatccgcttccaccagatccccaatcccctgcgccagcgcctcgaggagtacttccagcacgcctggtcctacaccaacggcatcgacatgaacgcggtgctgaagggcttccctgagtgcctgcaggctgacatctgcctgcacctgaaccgctcactgctgcagcactgcaaacccttccgaggggccaccaagggctgccttcgggccctggccatgaagttcaagaccacacatgcaccgccaggggacacactggtgcatgctggggacctgctcaccgccctgtacttcatctcccggggctccatcgagatcctgcggggcgacgtcgtcgtggccatcctggggaagaatgacatctttggggagcctctgaacctgtatgcaaggcctggcaagtcgaacggggatgtgcgggccctcacctactgtgacctacacaagatccatcgggacgacctgctggaggtgctggacatgtaccctgagttctccgaccacttctggtccagcctggagatcaccttcaacctgcgagataccaacatgatcccgggctcccccggcagtacggagttagagggtggcttcagtcggcaacgcaagcgcaagttgtccttccgcaggctcacggacaaggacacggagcagccaggggaggtgtcggccttggggccgggccgggcgggggcagggccgagtagccggggccggccgggggggccgtggggggagagcccgtccagtggcccctccagccctgagagcagtgaggatgagggcccaggccgcagctccagccccctccgcctggtgcccttctccagccccaggccccccggagagccgccgggtggggagcccctgatggaggactgcgagaagagcagcgacacttgcaaccccctgtcaggcgccttctcaggagtgtccaacattttcagcttctggggggacagtcggggccgccagtaccaggagctccctcgatgccccgcccccacccccagcctcctcaacatccccctctccagcccgggtcggcggccccggggcgacgtggagagcaggctggatgccctccagcgccagctcaacaggctggagacccggctgagtgcagacatggccactgtcctgcagctgctacagaggcagatgacgctggtcccgcccgcctacagtgctgtgaccaccccggggcctggccccacttccacatccccgctgttgcccgtcagccccctccccaccctcaccttggactcgctttctcaggtttcccagttcatggcgtgtgaggagctgcccccgggggccccagagcttccccaagaaggccccacacgacgcctctccctaccgggccagctgggggccctcacctcccagcccctgcacagacacggctcggacccgggcagttagtggggctgcccagtgtggacacgtggctcacccagggatcaaggcgctgctgggccgctccccttggaggccctgctcaggaggccctgaccgtggaaggggagaggaactcgaaagcacagctcctcccccagcccttgggaccatcttctcctgcagtcccctgggccccagtgagaggggcaggggcagggccggcagtaggtggggcctgtggtccccccactgccctgagggcattagctggtctaactgcccggaggcacccggccctgggccttaggcacctcaaggacttttctgctatttactgctcttattgttaaggataataattaaggatcatatgaataattaatgaagatgctgatgactatgaataataaataattatcctgaggaga

SEQ ID NO: 602 - DNA, 3884 bp, Homo sapiens
  source 1..3884: mol_type = genomic DNA
  misc_feature 1..3884: note = cDNA of KCNH2 gene SNP c.2684C>A (p.Thr895Lys)
atgccggtgcggaggggccacgtcgcgccgcagaacaccttcctggacaccatcatccgcaagtttgagggccagagccgtaagttcatcatcgccaacgctcgggtggagaactgcgccgtcatctactgcaacgacggcttctgcgagctgtgcggctactcgcgggccgaggtgatgcagcgaccctgcacctgcgacttcctgcacgggccgcgcacgcagcgccgcgctgccgcgcagatcgcgcaggcactgctgggcgccgaggagcgcaaagtggaaatcgccttctaccggaaagatgggagctgcttcctatgtctggtggatgtggtgcccgtgaagaacgaggatggggctgtcatcatgttcatcctcaatttcgaggtggtgatggagaaggacatggtggggtccccggctcatgacaccaaccaccggggcccccccaccagctggctggccccaggccgcgccaagaccttccgcctgaagctgcccgcgctgctggcgctgacggcccgggagtcgtcggtgcggtcgggcggcgcgggcggcgcgggcgccccgggggccgtggtggtggacgtggacctgacgcccgcggcacccagcagcgagtcgctggccctggacgaagtgacagccatggacaaccacgtggcagggctcgggcccgcggaggagcggcgtgcgctggtgggtcccggctctccgccccgcagcgcgcccggccagctcccatcgccccgggcgcacagcctcaaccccgacgcctcgggctccagctgcagcctggcccggacgcgctcccgagaaagctgcgccagcgtgcgccgcgcctcgtcggccgacgacatcgaggccatgcgcgccggggtgctgcccccgccaccgcgccacgccagcaccggggccatgcacccactgcgcagcggcttgctcaactccacctcggactccgacctcgtgcgctaccgcaccattagcaagattccccaaatcaccctcaactttgtggacctcaagggcgaccccttcttggcttcgcccaccagtgaccgtgagatcatagcacctaagataaaggagcgaacccacaatgtcactgagaaggtcacccaggtcctgtccctgggcgccgacgtgctgcctgagtacaagctgcaggcaccgcgcatccaccgctggaccatcctgcattacagccccttcaaggccgtgtgggactggctcatcctgctgctggtcatctacacggctgtcttcacaccctactcggctgccttcctgctgaaggagacggaagaaggcccgcctgctaccgagtgtggctacgcctgccagccgctggctgtggtggacctcatcgtggacatcatgttcattgtggacatcctcatcaacttccgcaccacctacgtcaatgccaacgaggaggtggtcagccaccccggccgcatcgccgtccactacttcaagggctggttcctcatcgacatggtggccgccatccccttcgacctgctcatcttcggctctggctctgaggagctgatcgggctgctgaagactgcgcggctgctgcggctggtgcgcgtggcgcggaagctggatcgctactcagagtacggcgcggccgtgctgttcttgctcatgtgcacctttgcgctcatcgcgcactggctagcctgcatctggtacgccatcggcaacatggagcagccacacatggactcacgcatcggctggctgcacaacctgggcgaccagataggcaaaccctacaacagcagcggcctgggcggcccctccatcaaggacaagtatgtgacggcgctctacttcaccttcagcagcctcaccagtgtgggcttcggcaacgtctctcccaacaccaactcagagaagatcttctccatctgcgtcatgctcattggctccctcatgtatgctagcatcttcggcaacgtgtcggccatcatccagcggctgtactcgggcacagcccgctaccacacacagatgctgcgggtgcgggagttcatccgcttccaccagatccccaatcccctgcgccagcgcctcgaggagtacttccagcacgcctggtcctacaccaacggcatcgacatgaacgcggtgctgaagggcttccctgagtgcctgcaggctgacatctgcctgcacctgaaccgctcactgctgcagcactgcaaacccttccgaggggccaccaagggctgccttcgggccctggccatgaagttcaagaccacacatgcaccgccaggggacacactggtgcatgctggggacctgctcaccgccctgtacttcatctcccggggctccatcgagatcctgcggggcgacgtcgtcgtggccatcctggggaagaatgacatctttggggagcctctgaacctgtatgcaaggcctggcaagtcgaacggggatgtgcgggccctcacctactgtgacctacacaagatccatcgggacgacctgctggaggtgctggacatgtaccctgagttctccgaccacttctggtccagcctggagatcaccttcaacctgcgagataccaacatgatcccgggctcccccggcagtacggagttagagggtggcttcagtcggcaacgcaagcgcaagttgtccttccgcaggcgcaaggacaaggacacggagcagccaggggaggtgtcggccttggggccgggccgggcgggggcagggccgagtagccggggccggccgggggggccgtggggggagagcccgtccagtggcccctccagccctgagagcagtgaggatgagggcccaggccgcagctccagccccctccgcctggtgcccttctccagccccaggccccccggagagccgccgggtggggagcccctgatggaggactgcgagaagagcagcgacacttgcaaccccctgtcaggcgccttctcaggagtgtccaacattttcagcttctggggggacagtcggggccgccagtaccaggagctccctcgatgccccgcccccacccccagcctcctcaacatccccctctccagcccgggtcggcggccccggggcgacgtggagagcaggctggatgccctccagcgccagctcaacaggctggagacccggctgagtgcagacatggccactgtcctgcagctgctacagaggcagatgacgctggtcccgcccgcctacagtgctgtgaccaccccggggcctggccccacttccacatccccgctgttgcccgtcagccccctccccaccctcaccttggactcgctttctcaggtttcccagttcatggcgtgtgaggagctgcccccgggggccccagagcttccccaagaaggccccacacgacgcctctccctaccgggccagctgggggccctcacctcccagcccctgcacagacacggctcggacccgggcagttagtggggctgcccagtgtggacacgtggctcacccagggatcaaggcgctgctgggccgctccccttggaggccctgctcaggaggccctgaccgtggaaggggagaggaactcgaaagcacagctcctcccccagcccttgggaccatcttctcctgcagtcccctgggccccagtgagaggggcaggggcagggccggcagtaggtggggcctgtggtccccccactgccctgagggcattagctggtctaactgcccggaggcacccggccctgggccttaggcacctcaaggacttttctgctatttactgctcttattgttaaggataataattaaggatcatatgaataattaatgaagatgctgatgactatgaataataaataattatcctgaggaga

SEQ ID NO: 603 - DNA, 3884 bp, Homo sapiens
  source 1..3884: mol_type = genomic DNA
  misc_feature 1..3884: note = cDNA of KCNH2 gene SNP c.2684C>G (p.Thr895Arg)
atgccggtgcggaggggccacgtcgcgccgcagaacaccttcctggacaccatcatccgcaagtttgagggccagagccgtaagttcatcatcgccaacgctcgggtggagaactgcgccgtcatctactgcaacgacggcttctgcgagctgtgcggctactcgcgggccgaggtgatgcagcgaccctgcacctgcgacttcctgcacgggccgcgcacgcagcgccgcgctgccgcgcagatcgcgcaggcactgctgggcgccgaggagcgcaaagtggaaatcgccttctaccggaaagatgggagctgcttcctatgtctggtggatgtggtgcccgtgaagaacgaggatggggctgtcatcatgttcatcctcaatttcgaggtggtgatggagaaggacatggtggggtccccggctcatgacaccaaccaccggggcccccccaccagctggctggccccaggccgcgccaagaccttccgcctgaagctgcccgcgctgctggcgctgacggcccgggagtcgtcggtgcggtcgggcggcgcgggcggcgcgggcgccccgggggccgtggtggtggacgtggacctgacgcccgcggcacccagcagcgagtcgctggccctggacgaagtgacagccatggacaaccacgtggcagggctcgggcccgcggaggagcggcgtgcgctggtgggtcccggctctccgccccgcagcgcgcccggccagctcccatcgccccgggcgcacagcctcaaccccgacgcctcgggctccagctgcagcctggcccggacgcgctcccgagaaagctgcgccagcgtgcgccgcgcctcgtcggccgacgacatcgaggccatgcgcgccggggtgctgcccccgccaccgcgccacgccagcaccggggccatgcacccactgcgcagcggcttgctcaactccacctcggactccgacctcgtgcgctaccgcaccattagcaagattccccaaatcaccctcaactttgtggacctcaagggcgaccccttcttggcttcgcccaccagtgaccgtgagatcatagcacctaagataaaggagcgaacccacaatgtcactgagaaggtcacccaggtcctgtccctgggcgccgacgtgctgcctgagtacaagctgcaggcaccgcgcatccaccgctggaccatcctgcattacagccccttcaaggccgtgtgggactggctcatcctgctgctggtcatctacacggctgtcttcacaccctactcggctgccttcctgctgaaggagacggaagaaggcccgcctgctaccgagtgtggctacgcctgccagccgctggctgtggtggacctcatcgtggacatcatgttcattgtggacatcctcatcaacttccgcaccacctacgtcaatgccaacgaggaggtggtcagccaccccggccgcatcgccgtccactacttcaagggctggttcctcatcgacatggtggccgccatccccttcgacctgctcatcttcggctctggctctgaggagctgatcgggctgctgaagactgcgcggctgctgcggctggtgcgcgtggcgcggaagctggatcgctactcagagtacggcgcggccgtgctgttcttgctcatgtgcacctttgcgctcatcgcgcactggctagcctgcatctggtacgccatcggcaacatggagcagccacacatggactcacgcatcggctggctgcacaacctgggcgaccagataggcaaaccctacaacagcagcggcctgggcggcccctccatcaaggacaagtatgtgacggcgctctacttcaccttcagcagcctcaccagtgtgggcttcggcaacgtctctcccaacaccaactcagagaagatcttctccatctgcgtcatgctcattggctccctcatgtatgctagcatcttcggcaacgtgtcggccatcatccagcggctgtactcgggcacagcccgctaccacacacagatgctgcgggtgcgggagttcatccgcttccaccagatccccaatcccctgcgccagcgcctcgaggagtacttccagcacgcctggtcctacaccaacggcatcgacatgaacgcggtgctgaagggcttccctgagtgcctgcaggctgacatctgcctgcacctgaaccgctcactgctgcagcactgcaaacccttccgaggggccaccaagggctgccttcgggccctggccatgaagttcaagaccacacatgcaccgccaggggacacactggtgcatgctggggacctgctcaccgccctgtacttcatctcccggggctccatcgagatcctgcggggcgacgtcgtcgtggccatcctggggaagaatgacatctttggggagcctctgaacctgtatgcaaggcctggcaagtcgaacggggatgtgcgggccctcacctactgtgacctacacaagatccatcgggacgacctgctggaggtgctggacatgtaccctgagttctccgaccacttctggtccagcctggagatcaccttcaacctgcgagataccaacatgatcccgggctcccccggcagtacggagttagagggtggcttcagtcggcaacgcaagcgcaagttgtccttccgcaggcgcagggacaaggacacggagcagccaggggaggtgtcggccttggggccgggccgggcgggggcagggccgagtagccggggccggccgggggggccgtggggggagagcccgtccagtggcccctccagccctgagagcagtgaggatgagggcccaggccgcagctccagccccctccgcctggtgcccttctccagccccaggccccccggagagccgccgggtggggagcccctgatggaggactgcgagaagagcagcgacacttgcaaccccctgtcaggcgccttctcaggagtgtccaacattttcagcttctggggggacagtcggggccgccagtaccaggagctccctcgatgccccgcccccacccccagcctcctcaacatccccctctccagcccgggtcggcggccccggggcgacgtggagagcaggctggatgccctccagcgccagctcaacaggctggagacccggctgagtgcagacatggccactgtcctgcagctgctacagaggcagatgacgctggtcccgcccgcctacagtgctgtgaccaccccggggcctggccccacttccacatccccgctgttgcccgtcagccccctccccaccctcaccttggactcgctttctcaggtttcccagttcatggcgtgtgaggagctgcccccgggggccccagagcttccccaagaaggccccacacgacgcctctccctaccgggccagctgggggccctcacctcccagcccctgcacagacacggctcggacccgggcagttagtggggctgcccagtgtggacacgtggctcacccagggatcaaggcgctgctgggccgctccccttggaggccctgctcaggaggccctgaccgtggaaggggagaggaactcgaaagcacagctcctcccccagcccttgggaccatcttctcctgcagtcccctgggccccagtgagaggggcaggggcagggccggcagtaggtggggcctgtggtccccccactgccctgagggcattagctggtctaactgcccggaggcacccggccctgggccttaggcacctcaaggacttttctgctatttactgctcttattgttaaggataataattaaggatcatatgaataattaatgaagatgctgatgactatgaataataaataattatcctgaggaga

SEQ ID NO: 604 - DNA, 3884 bp, Homo sapiens
  source 1..3884: mol_type = genomic DNA
  misc_feature 1..3884: note = cDNA of KCNH2 gene SNP c.2684C>T (p.Thr895Met)
atgccggtgcggaggggccacgtcgcgccgcagaacaccttcctggacaccatcatccgcaagtttgagggccagagccgtaagttcatcatcgccaacgctcgggtggagaactgcgccgtcatctactgcaacgacggcttctgcgagctgtgcggctactcgcgggccgaggtgatgcagcgaccctgcacctgcgacttcctgcacgggccgcgcacgcagcgccgcgctgccgcgcagatcgcgcaggcactgctgggcgccgaggagcgcaaagtggaaatcgccttctaccggaaagatgggagctgcttcctatgtctggtggatgtggtgcccgtgaagaacgaggatggggctgtcatcatgttcatcctcaatttcgaggtggtgatggagaaggacatggtggggtccccggctcatgacaccaaccaccggggcccccccaccagctggctggccccaggccgcgccaagaccttccgcctgaagctgcccgcgctgctggcgctgacggcccgggagtcgtcggtgcggtcgggcggcgcgggcggcgcgggcgccccgggggccgtggtggtggacgtggacctgacgcccgcggcacccagcagcgagtcgctggccctggacgaagtgacagccatggacaaccacgtggcagggctcgggcccgcggaggagcggcgtgcgctggtgggtcccggctctccgccccgcagcgcgcccggccagctcccatcgccccgggcgcacagcctcaaccccgacgcctcgggctccagctgcagcctggcccggacgcgctcccgagaaagctgcgccagcgtgcgccgcgcctcgtcggccgacgacatcgaggccatgcgcgccggggtgctgcccccgccaccgcgccacgccagcaccggggccatgcacccactgcgcagcggcttgctcaactccacctcggactccgacctcgtgcgctaccgcaccattagcaagattccccaaatcaccctcaactttgtggacctcaagggcgaccccttcttggcttcgcccaccagtgaccgtgagatcatagcacctaagataaaggagcgaacccacaatgtcactgagaaggtcacccaggtcctgtccctgggcgccgacgtgctgcctgagtacaagctgcaggcaccgcgcatccaccgctggaccatcctgcattacagccccttcaaggccgtgtgggactggctcatcctgctgctggtcatctacacggctgtcttcacaccctactcggctgccttcctgctgaaggagacggaagaaggcccgcctgctaccgagtgtggctacgcctgccagccgctggctgtggtggacctcatcgtggacatcatgttcattgtggacatcctcatcaacttccgcaccacctacgtcaatgccaacgaggaggtggtcagccaccccggccgcatcgccgtccactacttcaagggctggttcctcatcgacatggtggccgccatccccttcgacctgctcatcttcggctctggctctgaggagctgatcgggctgctgaagactgcgcggctgctgcggctggtgcgcgtggcgcggaagctggatcgctactcagagtacggcgcggccgtgctgttcttgctcatgtgcacctttgcgctcatcgcgcactggctagcctgcatctggtacgccatcggcaacatggagcagccacacatggactcacgcatcggctggctgcacaacctgggcgaccagataggcaaaccctacaacagcagcggcctgggcggcccctccatcaaggacaagtatgtgacggcgctctacttcaccttcagcagcctcaccagtgtgggcttcggcaacgtctctcccaacaccaactcagagaagatcttctccatctgcgtcatgctcattggctccctcatgtatgctagcatcttcggcaacgtgtcggccatcatccagcggctgtactcgggcacagcccgctaccacacacagatgctgcgggtgcgggagttcatccgcttccaccagatccccaatcccctgcgccagcgcctcgaggagtacttccagcacgcctggtcctacaccaacggcatcgacatgaacgcggtgctgaagggcttccctgagtgcctgcaggctgacatctgcctgcacctgaaccgctcactgctgcagcactgcaaacccttccgaggggccaccaagggctgccttcgggccctggccatgaagttcaagaccacacatgcaccgccaggggacacactggtgcatgctggggacctgctcaccgccctgtacttcatctcccggggctccatcgagatcctgcggggcgacgtcgtcgtggccatcctggggaagaatgacatctttggggagcctctgaacctgtatgcaaggcctggcaagtcgaacggggatgtgcgggccctcacctactgtgacctacacaagatccatcgggacgacctgctggaggtgctggacatgtaccctgagttctccgaccacttctggtccagcctggagatcaccttcaacctgcgagataccaacatgatcccgggctcccccggcagtacggagttagagggtggcttcagtcggcaacgcaagcgcaagttgtccttccgcaggcgcatggacaaggacacggagcagccaggggaggtgtcggccttggggccgggccgggcgggggcagggccgagtagccggggccggccgggggggccgtggggggagagcccgtccagtggcccctccagccctgagagcagtgaggatgagggcccaggccgcagctccagccccctccgcctggtgcccttctccagccccaggccccccggagagccgccgggtggggagcccctgatggaggactgcgagaagagcagcgacacttgcaaccccctgtcaggcgccttctcaggagtgtccaacattttcagcttctggggggacagtcggggccgccagtaccaggagctccctcgatgccccgcccccacccccagcctcctcaacatccccctctccagcccgggtcggcggccccggggcgacgtggagagcaggctggatgccctccagcgccagctcaacaggctggagacccggctgagtgcagacatggccactgtcctgcagctgctacagaggcagatgacgctggtcccgcccgcctacagtgctgtgaccaccccggggcctggccccacttccacatccccgctgttgcccgtcagccccctccccaccctcaccttggactcgctttctcaggtttcccagttcatggcgtgtgaggagctgcccccgggggccccagagcttccccaagaaggccccacacgacgcctctccctaccgggccagctgggggccctcacctcccagcccctgcacagacacggctcggacccgggcagttagtggggctgcccagtgtggacacgtggctcacccagggatcaaggcgctgctgggccgctccccttggaggccctgctcaggaggccctgaccgtggaaggggagaggaactcgaaagcacagctcctcccccagcccttgggaccatcttctcctgcagtcccctgggccccagtgagaggggcaggggcagggccggcagtaggtggggcctgtggtccccccactgccctgagggcattagctggtctaactgcccggaggcacccggccctgggccttaggcacctcaaggacttttctgctatttactgctcttattgttaaggataataattaaggatcatatgaataattaatgaagatgctgatgactatgaataataaataattatcctgaggaga

SEQ ID NO: 605 - DNA, 3884 bp, Homo sapiens
  source 1..3884: mol_type = genomic DNA
  misc_feature 1..3884: note = cDNA of KCNH2 gene SNP c.2690A>C (p.Lys897Thr)
atgccggtgcggaggggccacgtcgcgccgcagaacaccttcctggacaccatcatccgcaagtttgagggccagagccgtaagttcatcatcgccaacgctcgggtggagaactgcgccgtcatctactgcaacgacggcttctgcgagctgtgcggctactcgcgggccgaggtgatgcagcgaccctgcacctgcgacttcctgcacgggccgcgcacgcagcgccgcgctgccgcgcagatcgcgcaggcactgctgggcgccgaggagcgcaaagtggaaatcgccttctaccggaaagatgggagctgcttcctatgtctggtggatgtggtgcccgtgaagaacgaggatggggctgtcatcatgttcatcctcaatttcgaggtggtgatggagaaggacatggtggggtccccggctcatgacaccaaccaccggggcccccccaccagctggctggccccaggccgcgccaagaccttccgcctgaagctgcccgcgctgctggcgctgacggcccgggagtcgtcggtgcggtcgggcggcgcgggcggcgcgggcgccccgggggccgtggtggtggacgtggacctgacgcccgcggcacccagcagcgagtcgctggccctggacgaagtgacagccatggacaaccacgtggcagggctcgggcccgcggaggagcggcgtgcgctggtgggtcccggctctccgccccgcagcgcgcccggccagctcccatcgccccgggcgcacagcctcaaccccgacgcctcgggctccagctgcagcctggcccggacgcgctcccgagaaagctgcgccagcgtgcgccgcgcctcgtcggccgacgacatcgaggccatgcgcgccggggtgctgcccccgccaccgcgccacgccagcaccggggccatgcacccactgcgcagcggcttgctcaactccacctcggactccgacctcgtgcgctaccgcaccattagcaagattccccaaatcaccctcaactttgtggacctcaagggcgaccccttcttggcttcgcccaccagtgaccgtgagatcatagcacctaagataaaggagcgaacccacaatgtcactgagaaggtcacccaggtcctgtccctgggcgccgacgtgctgcctgagtacaagctgcaggcaccgcgcatccaccgctggaccatcctgcattacagccccttcaaggccgtgtgggactggctcatcctgctgctggtcatctacacggctgtcttcacaccctactcggctgccttcctgctgaaggagacggaagaaggcccgcctgctaccgagtgtggctacgcctgccagccgctggctgtggtggacctcatcgtggacatcatgttcattgtggacatcctcatcaacttccgcaccacctacgtcaatgccaacgaggaggtggtcagccaccccggccgcatcgccgtccactacttcaagggctggttcctcatcgacatggtggccgccatccccttcgacctgctcatcttcggctctggctctgaggagctgatcgggctgctgaagactgcgcggctgctgcggctggtgcgcgtggcgcggaagctggatcgctactcagagtacggcgcggccgtgctgttcttgctcatgtgcacctttgcgctcatcgcgcactggctagcctgcatctggtacgccatcggcaacatggagcagccacacatggactcacgcatcggctggctgcacaacctgggcgaccagataggcaaaccctacaacagcagcggcctgggcggcccctccatcaaggacaagtatgtgacggcgctctacttcaccttcagcagcctcaccagtgtgggcttcggcaacgtctctcccaacaccaactcagagaagatcttctccatctgcgtcatgctcattggctccctcatgtatgctagcatcttcggcaacgtgtcggccatcatccagcggctgtactcgggcacagcccgctaccacacacagatgctgcgggtgcgggagttcatccgcttccaccagatccccaatcccctgcgccagcgcctcgaggagtacttccagcacgcctggtcctacaccaacggcatcgacatgaacgcggtgctgaagggcttccctgagtgcctgcaggctgacatctgcctgcacctgaaccgctcactgctgcagcactgcaaacccttccgaggggccaccaagggctgccttcgggccctggccatgaagttcaagaccacacatgcaccgccaggggacacactggtgcatgctggggacctgctcaccgccctgtacttcatctcccggggctccatcgagatcctgcggggcgacgtcgtcgtggccatcctggggaagaatgacatctttggggagcctctgaacctgtatgcaaggcctggcaagtcgaacggggatgtgcgggccctcacctactgtgacctacacaagatccatcgggacgacctgctggaggtgctggacatgtaccctgagttctccgaccacttctggtccagcctggagatcaccttcaacctgcgagataccaacatgatcccgggctcccccggcagtacggagttagagggtggcttcagtcggcaacgcaagcgcaagttgtccttccgcaggcgcacggacacggacacggagcagccaggggaggtgtcggccttggggccgggccgggcgggggcagggccgagtagccggggccggccgggggggccgtggggggagagcccgtccagtggcccctccagccctgagagcagtgaggatgagggcccaggccgcagctccagccccctccgcctggtgcccttctccagccccaggccccccggagagccgccgggtggggagcccctgatggaggactgcgagaagagcagcgacacttgcaaccccctgtcaggcgccttctcaggagtgtccaacattttcagcttctggggggacagtcggggccgccagtaccaggagctccctcgatgccccgcccccacccccagcctcctcaacatccccctctccagcccgggtcggcggccccggggcgacgtggagagcaggctggatgccctccagcgccagctcaacaggctggagacccggctgagtgcagacatggccactgtcctgcagctgctacagaggcagatgacgctggtcccgcccgcctacagtgctgtgaccaccccggggcctggccccacttccacatccccgctgttgcccgtcagccccctccccaccctcaccttggactcgctttctcaggtttcccagttcatggcgtgtgaggagctgcccccgggggccccagagcttccccaagaaggccccacacgacgcctctccctaccgggccagctgggggccctcacctcccagcccctgcacagacacggctcggacccgggcagttagtggggctgcccagtgtggacacgtggctcacccagggatcaaggcgctgctgggccgctccccttggaggccctgctcaggaggccctgaccgtggaaggggagaggaactcgaaagcacagctcctcccccagcccttgggaccatcttctcctgcagtcccctgggccccagtgagaggggcaggggcagggccggcagtaggtggggcctgtggtccccccactgccctgagggcattagctggtctaactgcccggaggcacccggccctgggccttaggcacctcaaggacttttctgctatttactgctcttattgttaaggataataattaaggatcatatgaataattaatgaagatgctgatgactatgaataataaataattatcctgaggaga

SEQ ID NO: 606 - DNA, 3884 bp, Homo sapiens
  source 1..3884: mol_type = genomic DNA
  misc_feature 1..3884: note = cDNA of KCNH2 gene SNP c.2690A>T (p.Lys897Met)
atgccggtgcggaggggccacgtcgcgccgcagaacaccttcctggacaccatcatccgcaagtttgagggccagagccgtaagttcatcatcgccaacgctcgggtggagaactgcgccgtcatctactgcaacgacggcttctgcgagctgtgcggctactcgcgggccgaggtgatgcagcgaccctgcacctgcgacttcctgcacgggccgcgcacgcagcgccgcgctgccgcgcagatcgcgcaggcactgctgggcgccgaggagcgcaaagtggaaatcgccttctaccggaaagatgggagctgcttcctatgtctggtggatgtggtgcccgtgaagaacgaggatggggctgtcatcatgttcatcctcaatttcgaggtggtgatggagaaggacatggtggggtccccggctcatgacaccaaccaccggggcccccccaccagctggctggccccaggccgcgccaagaccttccgcctgaagctgcccgcgctgctggcgctgacggcccgggagtcgtcggtgcggtcgggcggcgcgggcggcgcgggcgccccgggggccgtggtggtggacgtggacctgacgcccgcggcacccagcagcgagtcgctggccctggacgaagtgacagccatggacaaccacgtggcagggctcgggcccgcggaggagcggcgtgcgctggtgggtcccggctctccgccccgcagcgcgcccggccagctcccatcgccccgggcgcacagcctcaaccccgacgcctcgggctccagctgcagcctggcccggacgcgctcccgagaaagctgcgccagcgtgcgccgcgcctcgtcggccgacgacatcgaggccatgcgcgccggggtgctgcccccgccaccgcgccacgccagcaccggggccatgcacccactgcgcagcggcttgctcaactccacctcggactccgacctcgtgcgctaccgcaccattagcaagattccccaaatcaccctcaactttgtggacctcaagggcgaccccttcttggcttcgcccaccagtgaccgtgagatcatagcacctaagataaaggagcgaacccacaatgtcactgagaaggtcacccaggtcctgtccctgggcgccgacgtgctgcctgagtacaagctgcaggcaccgcgcatccaccgctggaccatcctgcattacagccccttcaaggccgtgtgggactggctcatcctgctgctggtcatctacacggctgtcttcacaccctactcggctgccttcctgctgaaggagacggaagaaggcccgcctgctaccgagtgtggctacgcctgccagccgctggctgtggtggacctcatcgtggacatcatgttcattgtggacatcctcatcaacttccgcaccacctacgtcaatgccaacgaggaggtggtcagccaccccggccgcatcgccgtccactacttcaagggctggttcctcatcgacatggtggccgccatccccttcgacctgctcatcttcggctctggctctgaggagctgatcgggctgctgaagactgcgcggctgctgcggctggtgcgcgtggcgcggaagctggatcgctactcagagtacggcgcggccgtgctgttcttgctcatgtgcacctttgcgctcatcgcgcactggctagcctgcatctggtacgccatcggcaacatggagcagccacacatggactcacgcatcggctggctgcacaacctgggcgaccagataggcaaaccctacaacagcagcggcctgggcggcccctccatcaaggacaagtatgtgacggcgctctacttcaccttcagcagcctcaccagtgtgggcttcggcaacgtctctcccaacaccaactcagagaagatcttctccatctgcgtcatgctcattggctccctcatgtatgctagcatcttcggcaacgtgtcggccatcatccagcggctgtactcgggcacagcccgctaccacacacagatgctgcgggtgcgggagttcatccgcttccaccagatccccaatcccctgcgccagcgcctcgaggagtacttccagcacgcctggtcctacaccaacggcatcgacatgaacgcggtgctgaagggcttccctgagtgcctgcaggctgacatctgcctgcacctgaaccgctcactgctgcagcactgcaaacccttccgaggggccaccaagggctgccttcgggccctggccatgaagttcaagaccacacatgcaccgccaggggacacactggtgcatgctggggacctgctcaccgccctgtacttcatctcccggggctccatcgagatcctgcggggcgacgtcgtcgtggccatcctggggaagaatgacatctttggggagcctctgaacctgtatgcaaggcctggcaagtcgaacggggatgtgcgggccctcacctactgtgacctacacaagatccatcgggacgacctgctggaggtgctggacatgtaccctgagttctccgaccacttctggtccagcctggagatcaccttcaacctgcgagataccaacatgatcccgggctcccccggcagtacggagttagagggtggcttcagtcggcaacgcaagcgcaagttgtccttccgcaggcgcacggacatggacacggagcagccaggggaggtgtcggccttggggccgggccgggcgggggcagggccgagtagccggggccggccgggggggccgtggggggagagcccgtccagtggcccctccagccctgagagcagtgaggatgagggcccaggccgcagctccagccccctccgcctggtgcccttctccagccccaggccccccggagagccgccgggtggggagcccctgatggaggactgcgagaagagcagcgacacttgcaaccccctgtcaggcgccttctcaggagtgtccaacattttcagcttctggggggacagtcggggccgccagtaccaggagctccctcgatgccccgcccccacccccagcctcctcaacatccccctctccagcccgggtcggcggccccggggcgacgtggagagcaggctggatgccctccagcgccagctcaacaggctggagacccggctgagtgcagacatggccactgtcctgcagctgctacagaggcagatgacgctggtcccgcccgcctacagtgctgtgaccaccccggggcctggccccacttccacatccccgctgttgcccgtcagccccctccccaccctcaccttggactcgctttctcaggtttcccagttcatggcgtgtgaggagctgcccccgggggccccagagcttccccaagaaggccccacacgacgcctctccctaccgggccagctgggggccctcacctcccagcccctgcacagacacggctcggacccgggcagttagtggggctgcccagtgtggacacgtggctcacccagggatcaaggcgctgctgggccgctccccttggaggccctgctcaggaggccctgaccgtggaaggggagaggaactcgaaagcacagctcctcccccagcccttgggaccatcttctcctgcagtcccctgggccccagtgagaggggcaggggcagggccggcagtaggtggggcctgtggtccccccactgccctgagggcattagctggtctaactgcccggaggcacccggccctgggccttaggcacctcaaggacttttctgctatttactgctcttattgttaaggataataattaaggatcatatgaataattaatgaagatgctgatgactatgaataataaataattatcctgaggaga

SEQ ID NO: 607 - DNA, 3884 bp, Homo sapiens
  source 1..3884: mol_type = genomic DNA
  misc_feature 1..3884: note = cDNA of KCNH2 gene SNP c.2695A>T (p.Thr899Ser)
atgccggtgcggaggggccacgtcgcgccgcagaacaccttcctggacaccatcatccgcaagtttgagggccagagccgtaagttcatcatcgccaacgctcgggtggagaactgcgccgtcatctactgcaacgacggcttctgcgagctgtgcggctactcgcgggccgaggtgatgcagcgaccctgcacctgcgacttcctgcacgggccgcgcacgcagcgccgcgctgccgcgcagatcgcgcaggcactgctgggcgccgaggagcgcaaagtggaaatcgccttctaccggaaagatgggagctgcttcctatgtctggtggatgtggtgcccgtgaagaacgaggatggggctgtcatcatgttcatcctcaatttcgaggtggtgatggagaaggacatggtggggtccccggctcatgacaccaaccaccggggcccccccaccagctggctggccccaggccgcgccaagaccttccgcctgaagctgcccgcgctgctggcgctgacggcccgggagtcgtcggtgcggtcgggcggcgcgggcggcgcgggcgccccgggggccgtggtggtggacgtggacctgacgcccgcggcacccagcagcgagtcgctggccctggacgaagtgacagccatggacaaccacgtggcagggctcgggcccgcggaggagcggcgtgcgctggtgggtcccggctctccgccccgcagcgcgcccggccagctcccatcgccccgggcgcacagcctcaaccccgacgcctcgggctccagctgcagcctggcccggacgcgctcccgagaaagctgcgccagcgtgcgccgcgcctcgtcggccgacgacatcgaggccatgcgcgccggggtgctgcccccgccaccgcgccacgccagcaccggggccatgcacccactgcgcagcggcttgctcaactccacctcggactccgacctcgtgcgctaccgcaccattagcaagattccccaaatcaccctcaactttgtggacctcaagggcgaccccttcttggcttcgcccaccagtgaccgtgagatcatagcacctaagataaaggagcgaacccacaatgtcactgagaaggtcacccaggtcctgtccctgggcgccgacgtgctgcctgagtacaagctgcaggcaccgcgcatccaccgctggaccatcctgcattacagccccttcaaggccgtgtgggactggctcatcctgctgctggtcatctacacggctgtcttcacaccctactcggctgccttcctgctgaaggagacggaagaaggcccgcctgctaccgagtgtggctacgcctgccagccgctggctgtggtggacctcatcgtggacatcatgttcattgtggacatcctcatcaacttccgcaccacctacgtcaatgccaacgaggaggtggtcagccaccccggccgcatcgccgtccactacttcaagggctggttcctcatcgacatggtggccgccatccccttcgacctgctcatcttcggctctggctctgaggagctgatcgggctgctgaagactgcgcggctgctgcggctggtgcgcgtggcgcggaagctggatcgctactcagagtacggcgcggccgtgctgttcttgctcatgtgcacctttgcgctcatcgcgcactggctagcctgcatctggtacgccatcggcaacatggagcagccacacatggactcacgcatcggctggctgcacaacctgggcgaccagataggcaaaccctacaacagcagcggcctgggcggcccctccatcaaggacaagtatgtgacggcgctctacttcaccttcagcagcctcaccagtgtgggcttcggcaacgtctctcccaacaccaactcagagaagatcttctccatctgcgtcatgctcattggctccctcatgtatgctagcatcttcggcaacgtgtcggccatcatccagcggctgtactcgggcacagcccgctaccacacacagatgctgcgggtgcgggagttcatccgcttccaccagatccccaatcccctgcgccagcgcctcgaggagtacttccagcacgcctggtcctacaccaacggcatcgacatgaacgcggtgctgaagggcttccctgagtgcctgcaggctgacatctgcctgcacctgaaccgctcactgctgcagcactgcaaacccttccgaggggccaccaagggctgccttcgggccctggccatgaagttcaagaccacacatgcaccgccaggggacacactggtgcatgctggggacctgctcaccgccctgtacttcatctcccggggctccatcgagatcctgcggggcgacgtcgtcgtggccatcctggggaagaatgacatctttggggagcctctgaacctgtatgcaaggcctggcaagtcgaacggggatgtgcgggccctcacctactgtgacctacacaagatccatcgggacgacctgctggaggtgctggacatgtaccctgagttctccgaccacttctggtccagcctggagatcaccttcaacctgcgagataccaacatgatcccgggctcccccggcagtacggagttagagggtggcttcagtcggcaacgcaagcgcaagttgtccttccgcaggcgcacggacaaggactcggagcagccaggggaggtgtcggccttggggccgggccgggcgggggcagggccgagtagccggggccggccgggggggccgtggggggagagcccgtccagtggcccctccagccctgagagcagtgaggatgagggcccaggccgcagctccagccccctccgcctggtgcccttctccagccccaggccccccggagagccgccgggtggggagcccctgatggaggactgcgagaagagcagcgacacttgcaaccccctgtcaggcgccttctcaggagtgtccaacattttcagcttctggggggacagtcggggccgccagtaccaggagctccctcgatgccccgcccccacccccagcctcctcaacatccccctctccagcccgggtcggcggccccggggcgacgtggagagcaggctggatgccctccagcgccagctcaacaggctggagacccggctgagtgcagacatggccactgtcctgcagctgctacagaggcagatgacgctggtcccgcccgcctacagtgctgtgaccaccccggggcctggccccacttccacatccccgctgttgcccgtcagccccctccccaccctcaccttggactcgctttctcaggtttcccagttcatggcgtgtgaggagctgcccccgggggccccagagcttccccaagaaggccccacacgacgcctctccctaccgggccagctgggggccctcacctcccagcccctgcacagacacggctcggacccgggcagttagtggggctgcccagtgtggacacgtggctcacccagggatcaaggcgctgctgggccgctccccttggaggccctgctcaggaggccctgaccgtggaaggggagaggaactcgaaagcacagctcctcccccagcccttgggaccatcttctcctgcagtcccctgggccccagtgagaggggcaggggcagggccggcagtaggtggggcctgtggtccccccactgccctgagggcattagctggtctaactgcccggaggcacccggccctgggccttaggcacctcaaggacttttctgctatttactgctcttattgttaaggataataattaaggatcatatgaataattaatgaagatgctgatgactatgaataataaataattatcctgaggaga

SEQ ID NO: 608 - DNA, 3884 bp, Homo sapiens
  source 1..3884: mol_type = genomic DNA
  misc_feature 1..3884: note = cDNA of KCNH2 gene SNP c.2696C>A (p.Thr899Lys)
atgccggtgcggaggggccacgtcgcgccgcagaacaccttcctggacaccatcatccgcaagtttgagggccagagccgtaagttcatcatcgccaacgctcgggtggagaactgcgccgtcatctactgcaacgacggcttctgcgagctgtgcggctactcgcgggccgaggtgatgcagcgaccctgcacctgcgacttcctgcacgggccgcgcacgcagcgccgcgctgccgcgcagatcgcgcaggcactgctgggcgccgaggagcgcaaagtggaaatcgccttctaccggaaagatgggagctgcttcctatgtctggtggatgtggtgcccgtgaagaacgaggatggggctgtcatcatgttcatcctcaatttcgaggtggtgatggagaaggacatggtggggtccccggctcatgacaccaaccaccggggcccccccaccagctggctggccccaggccgcgccaagaccttccgcctgaagctgcccgcgctgctggcgctgacggcccgggagtcgtcggtgcggtcgggcggcgcgggcggcgcgggcgccccgggggccgtggtggtggacgtggacctgacgcccgcggcacccagcagcgagtcgctggccctggacgaagtgacagccatggacaaccacgtggcagggctcgggcccgcggaggagcggcgtgcgctggtgggtcccggctctccgccccgcagcgcgcccggccagctcccatcgccccgggcgcacagcctcaaccccgacgcctcgggctccagctgcagcctggcccggacgcgctcccgagaaagctgcgccagcgtgcgccgcgcctcgtcggccgacgacatcgaggccatgcgcgccggggtgctgcccccgccaccgcgccacgccagcaccggggccatgcacccactgcgcagcggcttgctcaactccacctcggactccgacctcgtgcgctaccgcaccattagcaagattccccaaatcaccctcaactttgtggacctcaagggcgaccccttcttggcttcgcccaccagtgaccgtgagatcatagcacctaagataaaggagcgaacccacaatgtcactgagaaggtcacccaggtcctgtccctgggcgccgacgtgctgcctgagtacaagctgcaggcaccgcgcatccaccgctggaccatcctgcattacagccccttcaaggccgtgtgggactggctcatcctgctgctggtcatctacacggctgtcttcacaccctactcggctgccttcctgctgaaggagacggaagaaggcccgcctgctaccgagtgtggctacgcctgccagccgctggctgtggtggacctcatcgtggacatcatgttcattgtggacatcctcatcaacttccgcaccacctacgtcaatgccaacgaggaggtggtcagccaccccggccgcatcgccgtccactacttcaagggctggttcctcatcgacatggtggccgccatccccttcgacctgctcatcttcggctctggctctgaggagctgatcgggctgctgaagactgcgcggctgctgcggctggtgcgcgtggcgcggaagctggatcgctactcagagtacggcgcggccgtgctgttcttgctcatgtgcacctttgcgctcatcgcgcactggctagcctgcatctggtacgccatcggcaacatggagcagccacacatggactcacgcatcggctggctgcacaacctgggcgaccagataggcaaaccctacaacagcagcggcctgggcggcccctccatcaaggacaagtatgtgacggcgctctacttcaccttcagcagcctcaccagtgtgggcttcggcaacgtctctcccaacaccaactcagagaagatcttctccatctgcgtcatgctcattggctccctcatgtatgctagcatcttcggcaacgtgtcggccatcatccagcggctgtactcgggcacagcccgctaccacacacagatgctgcgggtgcgggagttcatccgcttccaccagatccccaatcccctgcgccagcgcctcgaggagtacttccagcacgcctggtcctacaccaacggcatcgacatgaacgcggtgctgaagggcttccctgagtgcctgcaggctgacatctgcctgcacctgaaccgctcactgctgcagcactgcaaacccttccgaggggccaccaagggctgccttcgggccctggccatgaagttcaagaccacacatgcaccgccaggggacacactggtgcatgctggggacctgctcaccgccctgtacttcatctcccggggctccatcgagatcctgcggggcgacgtcgtcgtggccatcctggggaagaatgacatctttggggagcctctgaacctgtatgcaaggcctggcaagtcgaacggggatgtgcgggccctcacctactgtgacctacacaagatccatcgggacgacctgctggaggtgctggacatgtaccctgagttctccgaccacttctggtccagcctggagatcaccttcaacctgcgagataccaacatgatcccgggctcccccggcagtacggagttagagggtggcttcagtcggcaacgcaagcgcaagttgtccttccgcaggcgcacggacaaggacaaggagcagccaggggaggtgtcggccttggggccgggccgggcgggggcagggccgagtagccggggccggccgggggggccgtggggggagagcccgtccagtggcccctccagccctgagagcagtgaggatgagggcccaggccgcagctccagccccctccgcctggtgcccttctccagccccaggccccccggagagccgccgggtggggagcccctgatggaggactgcgagaagagcagcgacacttgcaaccccctgtcaggcgccttctcaggagtgtccaacattttcagcttctggggggacagtcggggccgccagtaccaggagctccctcgatgccccgcccccacccccagcctcctcaacatccccctctccagcccgggtcggcggccccggggcgacgtggagagcaggctggatgccctccagcgccagctcaacaggctggagacccggctgagtgcagacatggccactgtcctgcagctgctacagaggcagatgacgctggtcccgcccgcctacagtgctgtgaccaccccggggcctggccccacttccacatccccgctgttgcccgtcagccccctccccaccctcaccttggactcgctttctcaggtttcccagttcatggcgtgtgaggagctgcccccgggggccccagagcttccccaagaaggccccacacgacgcctctccctaccgggccagctgggggccctcacctcccagcccctgcacagacacggctcggacccgggcagttagtggggctgcccagtgtggacacgtggctcacccagggatcaaggcgctgctgggccgctccccttggaggccctgctcaggaggccctgaccgtggaaggggagaggaactcgaaagcacagctcctcccccagcccttgggaccatcttctcctgcagtcccctgggccccagtgagaggggcaggggcagggccggcagtaggtggggcctgtggtccccccactgccctgagggcattagctggtctaactgcccggaggcacccggccctgggccttaggcacctcaaggacttttctgctatttactgctcttattgttaaggataataattaaggatcatatgaataattaatgaagatgctgatgactatgaataataaataattatcctgaggaga

SEQ ID NO: 609 - DNA, 3884 bp, Homo sapiens
  source 1..3884: mol_type = genomic DNA
  misc_feature 1..3884: note = cDNA of KCNH2 gene SNP c.2696C>G (p.Thr899Arg)
atgccggtgcggaggggccacgtcgcgccgcagaacaccttcctggacaccatcatccgcaagtttgagggccagagccgtaagttcatcatcgccaacgctcgggtggagaactgcgccgtcatctactgcaacgacggcttctgcgagctgtgcggctactcgcgggccgaggtgatgcagcgaccctgcacctgcgacttcctgcacgggccgcgcacgcagcgccgcgctgccgcgcagatcgcgcaggcactgctgggcgccgaggagcgcaaagtggaaatcgccttctaccggaaagatgggagctgcttcctatgtctggtggatgtggtgcccgtgaagaacgaggatggggctgtcatcatgttcatcctcaatttcgaggtggtgatggagaaggacatggtggggtccccggctcatgacaccaaccaccggggcccccccaccagctggctggccccaggccgcgccaagaccttccgcctgaagctgcccgcgctgctggcgctgacggcccgggagtcgtcggtgcggtcgggcggcgcgggcggcgcgggcgccccgggggccgtggtggtggacgtggacctgacgcccgcggcacccagcagcgagtcgctggccctggacgaagtgacagccatggacaaccacgtggcagggctcgggcccgcggaggagcggcgtgcgctggtgggtcccggctctccgccccgcagcgcgcccggccagctcccatcgccccgggcgcacagcctcaaccccgacgcctcgggctccagctgcagcctggcccggacgcgctcccgagaaagctgcgccagcgtgcgccgcgcctcgtcggccgacgacatcgaggccatgcgcgccggggtgctgcccccgccaccgcgccacgccagcaccggggccatgcacccactgcgcagcggcttgctcaactccacctcggactccgacctcgtgcgctaccgcaccattagcaagattccccaaatcaccctcaactttgtggacctcaagggcgaccccttcttggcttcgcccaccagtgaccgtgagatcatagcacctaagataaaggagcgaacccacaatgtcactgagaaggtcacccaggtcctgtccctgggcgccgacgtgctgcctgagtacaagctgcaggcaccgcgcatccaccgctggaccatcctgcattacagccccttcaaggccgtgtgggactggctcatcctgctgctggtcatctacacggctgtcttcacaccctactcggctgccttcctgctgaaggagacggaagaaggcccgcctgctaccgagtgtggctacgcctgccagccgctggctgtggtggacctcatcgtggacatcatgttcattgtggacatcctcatcaacttccgcaccacctacgtcaatgccaacgaggaggtggtcagccaccccggccgcatcgccgtccactacttcaagggctggttcctcatcgacatggtggccgccatccccttcgacctgctcatcttcggctctggctctgaggagctgatcgggctgctgaagactgcgcggctgctgcggctggtgcgcgtggcgcggaagctggatcgctactcagagtacggcgcggccgtgctgttcttgctcatgtgcacctttgcgctcatcgcgcactggctagcctgcatctggtacgccatcggcaacatggagcagccacacatggactcacgcatcggctggctgcacaacctgggcgaccagataggcaaaccctacaacagcagcggcctgggcggcccctccatcaaggacaagtatgtgacggcgctctacttcaccttcagcagcctcaccagtgtgggcttcggcaacgtctctcccaacaccaactcagagaagatcttctccatctgcgtcatgctcattggctccctcatgtatgctagcatcttcggcaacgtgtcggccatcatccagcggctgtactcgggcacagcccgctaccacacacagatgctgcgggtgcgggagttcatccgcttccaccagatccccaatcccctgcgccagcgcctcgaggagtacttccagcacgcctggtcctacaccaacggcatcgacatgaacgcggtgctgaagggcttccctgagtgcctgcaggctgacatctgcctgcacctgaaccgctcactgctgcagcactgcaaacccttccgaggggccaccaagggctgccttcgggccctggccatgaagttcaagaccacacatgcaccgccaggggacacactggtgcatgctggggacctgctcaccgccctgtacttcatctcccggggctccatcgagatcctgcggggcgacgtcgtcgtggccatcctggggaagaatgacatctttggggagcctctgaacctgtatgcaaggcctggcaagtcgaacggggatgtgcgggccctcacctactgtgacctacacaagatccatcgggacgacctgctggaggtgctggacatgtaccctgagttctccgaccacttctggtccagcctggagatcaccttcaacctgcgagataccaacatgatcccgggctcccccggcagtacggagttagagggtggcttcagtcggcaacgcaagcgcaagttgtccttccgcaggcgcacggacaaggacagggagcagccaggggaggtgtcggccttggggccgggccgggcgggggcagggccgagtagccggggccggccgggggggccgtggggggagagcccgtccagtggcccctccagccctgagagcagtgaggatgagggcccaggccgcagctccagccccctccgcctggtgcccttctccagccccaggccccccggagagccgccgggtggggagcccctgatggaggactgcgagaagagcagcgacacttgcaaccccctgtcaggcgccttctcaggagtgtccaacattttcagcttctggggggacagtcggggccgccagtaccaggagctccctcgatgccccgcccccacccccagcctcctcaacatccccctctccagcccgggtcggcggccccggggcgacgtggagagcaggctggatgccctccagcgccagctcaacaggctggagacccggctgagtgcagacatggccactgtcctgcagctgctacagaggcagatgacgctggtcccgcccgcctacagtgctgtgaccaccccggggcctggccccacttccacatccccgctgttgcccgtcagccccctccccaccctcaccttggactcgctttctcaggtttcccagttcatggcgtgtgaggagctgcccccgggggccccagagcttccccaagaaggccccacacgacgcctctccctaccgggccagctgggggccctcacctcccagcccctgcacagacacggctcggacccgggcagttagtggggctgcccagtgtggacacgtggctcacccagggatcaaggcgctgctgggccgctccccttggaggccctgctcaggaggccctgaccgtggaaggggagaggaactcgaaagcacagctcctcccccagcccttgggaccatcttctcctgcagtcccctgggccccagtgagaggggcaggggcagggccggcagtaggtggggcctgtggtccccccactgccctgagggcattagctggtctaactgcccggaggcacccggccctgggccttaggcacctcaaggacttttctgctatttactgctcttattgttaaggataataattaaggatcatatgaataattaatgaagatgctgatgactatgaataataaataattatcctgaggaga

SEQ ID NO: 610 - DNA, 3884 bp, Homo sapiens
  source 1..3884: mol_type = genomic DNA
  misc_feature 1..3884: note = cDNA of KCNH2 gene SNP c.2696C>T (p.Thr899Met)
atgccggtgcggaggggccacgtcgcgccgcagaacaccttcctggacaccatcatccgcaagtttgagggccagagccgtaagttcatcatcgccaacgctcgggtggagaactgcgccgtcatctactgcaacgacggcttctgcgagctgtgcggctactcgcgggccgaggtgatgcagcgaccctgcacctgcgacttcctgcacgggccgcgcacgcagcgccgcgctgccgcgcagatcgcgcaggcactgctgggcgccgaggagcgcaaagtggaaatcgccttctaccggaaagatgggagctgcttcctatgtctggtggatgtggtgcccgtgaagaacgaggatggggctgtcatcatgttcatcctcaatttcgaggtggtgatggagaaggacatggtggggtccccggctcatgacaccaaccaccggggcccccccaccagctggctggccccaggccgcgccaagaccttccgcctgaagctgcccgcgctgctggcgctgacggcccgggagtcgtcggtgcggtcgggcggcgcgggcggcgcgggcgccccgggggccgtggtggtggacgtggacctgacgcccgcggcacccagcagcgagtcgctggccctggacgaagtgacagccatggacaaccacgtggcagggctcgggcccgcggaggagcggcgtgcgctggtgggtcccggctctccgccccgcagcgcgcccggccagctcccatcgccccgggcgcacagcctcaaccccgacgcctcgggctccagctgcagcctggcccggacgcgctcccgagaaagctgcgccagcgtgcgccgcgcctcgtcggccgacgacatcgaggccatgcgcgccggggtgctgcccccgccaccgcgccacgccagcaccggggccatgcacccactgcgcagcggcttgctcaactccacctcggactccgacctcgtgcgctaccgcaccattagcaagattccccaaatcaccctcaactttgtggacctcaagggcgaccccttcttggcttcgcccaccagtgaccgtgagatcatagcacctaagataaaggagcgaacccacaatgtcactgagaaggtcacccaggtcctgtccctgggcgccgacgtgctgcctgagtacaagctgcaggcaccgcgcatccaccgctggaccatcctgcattacagccccttcaaggccgtgtgggactggctcatcctgctgctggtcatctacacggctgtcttcacaccctactcggctgccttcctgctgaaggagacggaagaaggcccgcctgctaccgagtgtggctacgcctgccagccgctggctgtggtggacctcatcgtggacatcatgttcattgtggacatcctcatcaacttccgcaccacctacgtcaatgccaacgaggaggtggtcagccaccccggccgcatcgccgtccactacttcaagggctggttcctcatcgacatggtggccgccatccccttcgacctgctcatcttcggctctggctctgaggagctgatcgggctgctgaagactgcgcggctgctgcggctggtgcgcgtggcgcggaagctggatcgctactcagagtacggcgcggccgtgctgttcttgctcatgtgcacctttgcgctcatcgcgcactggctagcctgcatctggtacgccatcggcaacatggagcagccacacatggactcacgcatcggctggctgcacaacctgggcgaccagataggcaaaccctacaacagcagcggcctgggcggcccctccatcaaggacaagtatgtgacggcgctctacttcaccttcagcagcctcaccagtgtgggcttcggcaacgtctctcccaacaccaactcagagaagatcttctccatctgcgtcatgctcattggctccctcatgtatgctagcatcttcggcaacgtgtcggccatcatccagcggctgtactcgggcacagcccgctaccacacacagatgctgcgggtgcgggagttcatccgcttccaccagatccccaatcccctgcgccagcgcctcgaggagtacttccagcacgcctggtcctacaccaacggcatcgacatgaacgcggtgctgaagggcttccctgagtgcctgcaggctgacatctgcctgcacctgaaccgctcactgctgcagcactgcaaacccttccgaggggccaccaagggctgccttcgggccctggccatgaagttcaagaccacacatgcaccgccaggggacacactggtgcatgctggggacctgctcaccgccctgtacttcatctcccggggctccatcgagatcctgcggggcgacgtcgtcgtggccatcctggggaagaatgacatctttggggagcctctgaacctgtatgcaaggcctggcaagtcgaacggggatgtgcgggccctcacctactgtgacctacacaagatccatcgggacgacctgctggaggtgctggacatgtaccctgagttctccgaccacttctggtccagcctggagatcaccttcaacctgcgagataccaacatgatcccgggctcccccggcagtacggagttagagggtggcttcagtcggcaacgcaagcgcaagttgtccttccgcaggcgcacggacaaggacatggagcagccaggggaggtgtcggccttggggccgggccgggcgggggcagggccgagtagccggggccggccgggggggccgtggggggagagcccgtccagtggcccctccagccctgagagcagtgaggatgagggcccaggccgcagctccagccccctccgcctggtgcccttctccagccccaggccccccggagagccgccgggtggggagcccctgatggaggactgcgagaagagcagcgacacttgcaaccccctgtcaggcgccttctcaggagtgtccaacattttcagcttctggggggacagtcggggccgccagtaccaggagctccctcgatgccccgcccccacccccagcctcctcaacatccccctctccagcccgggtcggcggccccggggcgacgtggagagcaggctggatgccctccagcgccagctcaacaggctggagacccggctgagtgcagacatggccactgtcctgcagctgctacagaggcagatgacgctggtcccgcccgcctacagtgctgtgaccaccccggggcctggccccacttccacatccccgctgttgcccgtcagccccctccccaccctcaccttggactcgctttctcaggtttcccagttcatggcgtgtgaggagctgcccccgggggccccagagcttccccaagaaggccccacacgacgcctctccctaccgggccagctgggggccctcacctcccagcccctgcacagacacggctcggacccgggcagttagtggggctgcccagtgtggacacgtggctcacccagggatcaaggcgctgctgggccgctccccttggaggccctgctcaggaggccctgaccgtggaaggggagaggaactcgaaagcacagctcctcccccagcccttgggaccatcttctcctgcagtcccctgggccccagtgagaggggcaggggcagggccggcagtaggtggggcctgtggtccccccactgccctgagggcattagctggtctaactgcccggaggcacccggccctgggccttaggcacctcaaggacttttctgctatttactgctcttattgttaaggataataattaaggatcatatgaataattaatgaagatgctgatgactatgaataataaataattatcctgaggaga

SEQ ID NO: 611 - DNA, 3884 bp, Homo sapiens
  source 1..3884: mol_type = genomic DNA
  misc_feature 1..3884: note = cDNA of KCNH2 gene SNP c.26C>T (p.Ala9Val)
atgccggtgcggaggggccacgtcgtgccgcagaacaccttcctggacaccatcatccgcaagtttgagggccagagccgtaagttcatcatcgccaacgctcgggtggagaactgcgccgtcatctactgcaacgacggcttctgcgagctgtgcggctactcgcgggccgaggtgatgcagcgaccctgcacctgcgacttcctgcacgggccgcgcacgcagcgccgcgctgccgcgcagatcgcgcaggcactgctgggcgccgaggagcgcaaagtggaaatcgccttctaccggaaagatgggagctgcttcctatgtctggtggatgtggtgcccgtgaagaacgaggatggggctgtcatcatgttcatcctcaatttcgaggtggtgatggagaaggacatggtggggtccccggctcatgacaccaaccaccggggcccccccaccagctggctggccccaggccgcgccaagaccttccgcctgaagctgcccgcgctgctggcgctgacggcccgggagtcgtcggtgcggtcgggcggcgcgggcggcgcgggcgccccgggggccgtggtggtggacgtggacctgacgcccgcggcacccagcagcgagtcgctggccctggacgaagtgacagccatggacaaccacgtggcagggctcgggcccgcggaggagcggcgtgcgctggtgggtcccggctctccgccccgcagcgcgcccggccagctcccatcgccccgggcgcacagcctcaaccccgacgcctcgggctccagctgcagcctggcccggacgcgctcccgagaaagctgcgccagcgtgcgccgcgcctcgtcggccgacgacatcgaggccatgcgcgccggggtgctgcccccgccaccgcgccacgccagcaccggggccatgcacccactgcgcagcggcttgctcaactccacctcggactccgacctcgtgcgctaccgcaccattagcaagattccccaaatcaccctcaactttgtggacctcaagggcgaccccttcttggcttcgcccaccagtgaccgtgagatcatagcacctaagataaaggagcgaacccacaatgtcactgagaaggtcacccaggtcctgtccctgggcgccgacgtgctgcctgagtacaagctgcaggcaccgcgcatccaccgctggaccatcctgcattacagccccttcaaggccgtgtgggactggctcatcctgctgctggtcatctacacggctgtcttcacaccctactcggctgccttcctgctgaaggagacggaagaaggcccgcctgctaccgagtgtggctacgcctgccagccgctggctgtggtggacctcatcgtggacatcatgttcattgtggacatcctcatcaacttccgcaccacctacgtcaatgccaacgaggaggtggtcagccaccccggccgcatcgccgtccactacttcaagggctggttcctcatcgacatggtggccgccatccccttcgacctgctcatcttcggctctggctctgaggagctgatcgggctgctgaagactgcgcggctgctgcggctggtgcgcgtggcgcggaagctggatcgctactcagagtacggcgcggccgtgctgttcttgctcatgtgcacctttgcgctcatcgcgcactggctagcctgcatctggtacgccatcggcaacatggagcagccacacatggactcacgcatcggctggctgcacaacctgggcgaccagataggcaaaccctacaacagcagcggcctgggcggcccctccatcaaggacaagtatgtgacggcgctctacttcaccttcagcagcctcaccagtgtgggcttcggcaacgtctctcccaacaccaactcagagaagatcttctccatctgcgtcatgctcattggctccctcatgtatgctagcatcttcggcaacgtgtcggccatcatccagcggctgtactcgggcacagcccgctaccacacacagatgctgcgggtgcgggagttcatccgcttccaccagatccccaatcccctgcgccagcgcctcgaggagtacttccagcacgcctggtcctacaccaacggcatcgacatgaacgcggtgctgaagggcttccctgagtgcctgcaggctgacatctgcctgcacctgaaccgctcactgctgcagcactgcaaacccttccgaggggccaccaagggctgccttcgggccctggccatgaagttcaagaccacacatgcaccgccaggggacacactggtgcatgctggggacctgctcaccgccctgtacttcatctcccggggctccatcgagatcctgcggggcgacgtcgtcgtggccatcctggggaagaatgacatctttggggagcctctgaacctgtatgcaaggcctggcaagtcgaacggggatgtgcgggccctcacctactgtgacctacacaagatccatcgggacgacctgctggaggtgctggacatgtaccctgagttctccgaccacttctggtccagcctggagatcaccttcaacctgcgagataccaacatgatcccgggctcccccggcagtacggagttagagggtggcttcagtcggcaacgcaagcgcaagttgtccttccgcaggcgcacggacaaggacacggagcagccaggggaggtgtcggccttggggccgggccgggcgggggcagggccgagtagccggggccggccgggggggccgtggggggagagcccgtccagtggcccctccagccctgagagcagtgaggatgagggcccaggccgcagctccagccccctccgcctggtgcccttctccagccccaggccccccggagagccgccgggtggggagcccctgatggaggactgcgagaagagcagcgacacttgcaaccccctgtcaggcgccttctcaggagtgtccaacattttcagcttctggggggacagtcggggccgccagtaccaggagctccctcgatgccccgcccccacccccagcctcctcaacatccccctctccagcccgggtcggcggccccggggcgacgtggagagcaggctggatgccctccagcgccagctcaacaggctggagacccggctgagtgcagacatggccactgtcctgcagctgctacagaggcagatgacgctggtcccgcccgcctacagtgctgtgaccaccccggggcctggccccacttccacatccccgctgttgcccgtcagccccctccccaccctcaccttggactcgctttctcaggtttcccagttcatggcgtgtgaggagctgcccccgggggccccagagcttccccaagaaggccccacacgacgcctctccctaccgggccagctgggggccctcacctcccagcccctgcacagacacggctcggacccgggcagttagtggggctgcccagtgtggacacgtggctcacccagggatcaaggcgctgctgggccgctccccttggaggccctgctcaggaggccctgaccgtggaaggggagaggaactcgaaagcacagctcctcccccagcccttgggaccatcttctcctgcagtcccctgggccccagtgagaggggcaggggcagggccggcagtaggtggggcctgtggtccccccactgccctgagggcattagctggtctaactgcccggaggcacccggccctgggccttaggcacctcaaggacttttctgctatttactgctcttattgttaaggataataattaaggatcatatgaataattaatgaagatgctgatgactatgaataataaataattatcctgaggaga

SEQ ID NO: 612 - DNA, 3884 bp, Homo sapiens
  source 1..3884: mol_type = genomic DNA
  misc_feature 1..3884: note = cDNA of KCNH2 gene SNP c.2701C>T (p.Gln901Ter)
atgccggtgcggaggggccacgtcgcgccgcagaacaccttcctggacaccatcatccgcaagtttgagggccagagccgtaagttcatcatcgccaacgctcgggtggagaactgcgccgtcatctactgcaacgacggcttctgcgagctgtgcggctactcgcgggccgaggtgatgcagcgaccctgcacctgcgacttcctgcacgggccgcgcacgcagcgccgcgctgccgcgcagatcgcgcaggcactgctgggcgccgaggagcgcaaagtggaaatcgccttctaccggaaagatgggagctgcttcctatgtctggtggatgtggtgcccgtgaagaacgaggatggggctgtcatcatgttcatcctcaatttcgaggtggtgatggagaaggacatggtggggtccccggctcatgacaccaaccaccggggcccccccaccagctggctggccccaggccgcgccaagaccttccgcctgaagctgcccgcgctgctggcgctgacggcccgggagtcgtcggtgcggtcgggcggcgcgggcggcgcgggcgccccgggggccgtggtggtggacgtggacctgacgcccgcggcacccagcagcgagtcgctggccctggacgaagtgacagccatggacaaccacgtggcagggctcgggcccgcggaggagcggcgtgcgctggtgggtcccggctctccgccccgcagcgcgcccggccagctcccatcgccccgggcgcacagcctcaaccccgacgcctcgggctccagctgcagcctggcccggacgcgctcccgagaaagctgcgccagcgtgcgccgcgcctcgtcggccgacgacatcgaggccatgcgcgccggggtgctgcccccgccaccgcgccacgccagcaccggggccatgcacccactgcgcagcggcttgctcaactccacctcggactccgacctcgtgcgctaccgcaccattagcaagattccccaaatcaccctcaactttgtggacctcaagggcgaccccttcttggcttcgcccaccagtgaccgtgagatcatagcacctaagataaaggagcgaacccacaatgtcactgagaaggtcacccaggtcctgtccctgggcgccgacgtgctgcctgagtacaagctgcaggcaccgcgcatccaccgctggaccatcctgcattacagccccttcaaggccgtgtgggactggctcatcctgctgctggtcatctacacggctgtcttcacaccctactcggctgccttcctgctgaaggagacggaagaaggcccgcctgctaccgagtgtggctacgcctgccagccgctggctgtggtggacctcatcgtggacatcatgttcattgtggacatcctcatcaacttccgcaccacctacgtcaatgccaacgaggaggtggtcagccaccccggccgcatcgccgtccactacttcaagggctggttcctcatcgacatggtggccgccatccccttcgacctgctcatcttcggctctggctctgaggagctgatcgggctgctgaagactgcgcggctgctgcggctggtgcgcgtggcgcggaagctggatcgctactcagagtacggcgcggccgtgctgttcttgctcatgtgcacctttgcgctcatcgcgcactggctagcctgcatctggtacgccatcggcaacatggagcagccacacatggactcacgcatcggctggctgcacaacctgggcgaccagataggcaaaccctacaacagcagcggcctgggcggcccctccatcaaggacaagtatgtgacggcgctctacttcaccttcagcagcctcaccagtgtgggcttcggcaacgtctctcccaacaccaactcagagaagatcttctccatctgcgtcatgctcattggctccctcatgtatgctagcatcttcggcaacgtgtcggccatcatccagcggctgtactcgggcacagcccgctaccacacacagatgctgcgggtgcgggagttcatccgcttccaccagatccccaatcccctgcgccagcgcctcgaggagtacttccagcacgcctggtcctacaccaacggcatcgacatgaacgcggtgctgaagggcttccctgagtgcctgcaggctgacatctgcctgcacctgaaccgctcactgctgcagcactgcaaacccttccgaggggccaccaagggctgccttcgggccctggccatgaagttcaagaccacacatgcaccgccaggggacacactggtgcatgctggggacctgctcaccgccctgtacttcatctcccggggctccatcgagatcctgcggggcgacgtcgtcgtggccatcctggggaagaatgacatctttggggagcctctgaacctgtatgcaaggcctggcaagtcgaacggggatgtgcgggccctcacctactgtgacctacacaagatccatcgggacgacctgctggaggtgctggacatgtaccctgagttctccgaccacttctggtccagcctggagatcaccttcaacctgcgagataccaacatgatcccgggctcccccggcagtacggagttagagggtggcttcagtcggcaacgcaagcgcaagttgtccttccgcaggcgcacggacaaggacacggagtagccaggggaggtgtcggccttggggccgggccgggcgggggcagggccgagtagccggggccggccgggggggccgtggggggagagcccgtccagtggcccctccagccctgagagcagtgaggatgagggcccaggccgcagctccagccccctccgcctggtgcccttctccagccccaggccccccggagagccgccgggtggggagcccctgatggaggactgcgagaagagcagcgacacttgcaaccccctgtcaggcgccttctcaggagtgtccaacattttcagcttctggggggacagtcggggccgccagtaccaggagctccctcgatgccccgcccccacccccagcctcctcaacatccccctctccagcccgggtcggcggccccggggcgacgtggagagcaggctggatgccctccagcgccagctcaacaggctggagacccggctgagtgcagacatggccactgtcctgcagctgctacagaggcagatgacgctggtcccgcccgcctacagtgctgtgaccaccccggggcctggccccacttccacatccccgctgttgcccgtcagccccctccccaccctcaccttggactcgctttctcaggtttcccagttcatggcgtgtgaggagctgcccccgggggccccagagcttccccaagaaggccccacacgacgcctctccctaccgggccagctgggggccctcacctcccagcccctgcacagacacggctcggacccgggcagttagtggggctgcccagtgtggacacgtggctcacccagggatcaaggcgctgctgggccgctccccttggaggccctgctcaggaggccctgaccgtggaaggggagaggaactcgaaagcacagctcctcccccagcccttgggaccatcttctcctgcagtcccctgggccccagtgagaggggcaggggcagggccggcagtaggtggggcctgtggtccccccactgccctgagggcattagctggtctaactgcccggaggcacccggccctgggccttaggcacctcaaggacttttctgctatttactgctcttattgttaaggataataattaaggatcatatgaataattaatgaagatgctgatgactatgaataataaataattatcctgaggaga

SEQ ID NO: 613 - DNA, 3884 bp, Homo sapiens
  source 1..3884: mol_type = genomic DNA
  misc_feature 1..3884: note = cDNA of KCNH2 gene SNP c.2702A>G (p.Gln901Arg)
atgccggtgcggaggggccacgtcgcgccgcagaacaccttcctggacaccatcatccgcaagtttgagggccagagccgtaagttcatcatcgccaacgctcgggtggagaactgcgccgtcatctactgcaacgacggcttctgcgagctgtgcggctactcgcgggccgaggtgatgcagcgaccctgcacctgcgacttcctgcacgggccgcgcacgcagcgccgcgctgccgcgcagatcgcgcaggcactgctgggcgccgaggagcgcaaagtggaaatcgccttctaccggaaagatgggagctgcttcctatgtctggtggatgtggtgcccgtgaagaacgaggatggggctgtcatcatgttcatcctcaatttcgaggtggtgatggagaaggacatggtggggtccccggctcatgacaccaaccaccggggcccccccaccagctggctggccccaggccgcgccaagaccttccgcctgaagctgcccgcgctgctggcgctgacggcccgggagtcgtcggtgcggtcgggcggcgcgggcggcgcgggcgccccgggggccgtggtggtggacgtggacctgacgcccgcggcacccagcagcgagtcgctggccctggacgaagtgacagccatggacaaccacgtggcagggctcgggcccgcggaggagcggcgtgcgctggtgggtcccggctctccgccccgcagcgcgcccggccagctcccatcgccccgggcgcacagcctcaaccccgacgcctcgggctccagctgcagcctggcccggacgcgctcccgagaaagctgcgccagcgtgcgccgcgcctcgtcggccgacgacatcgaggccatgcgcgccggggtgctgcccccgccaccgcgccacgccagcaccggggccatgcacccactgcgcagcggcttgctcaactccacctcggactccgacctcgtgcgctaccgcaccattagcaagattccccaaatcaccctcaactttgtggacctcaagggcgaccccttcttggcttcgcccaccagtgaccgtgagatcatagcacctaagataaaggagcgaacccacaatgtcactgagaaggtcacccaggtcctgtccctgggcgccgacgtgctgcctgagtacaagctgcaggcaccgcgcatccaccgctggaccatcctgcattacagccccttcaaggccgtgtgggactggctcatcctgctgctggtcatctacacggctgtcttcacaccctactcggctgccttcctgctgaaggagacggaagaaggcccgcctgctaccgagtgtggctacgcctgccagccgctggctgtggtggacctcatcgtggacatcatgttcattgtggacatcctcatcaacttccgcaccacctacgtcaatgccaacgaggaggtggtcagccaccccggccgcatcgccgtccactacttcaagggctggttcctcatcgacatggtggccgccatccccttcgacctgctcatcttcggctctggctctgaggagctgatcgggctgctgaagactgcgcggctgctgcggctggtgcgcgtggcgcggaagctggatcgctactcagagtacggcgcggccgtgctgttcttgctcatgtgcacctttgcgctcatcgcgcactggctagcctgcatctggtacgccatcggcaacatggagcagccacacatggactcacgcatcggctggctgcacaacctgggcgaccagataggcaaaccctacaacagcagcggcctgggcggcccctccatcaaggacaagtatgtgacggcgctctacttcaccttcagcagcctcaccagtgtgggcttcggcaacgtctctcccaacaccaactcagagaagatcttctccatctgcgtcatgctcattggctccctcatgtatgctagcatcttcggcaacgtgtcggccatcatccagcggctgtactcgggcacagcccgctaccacacacagatgctgcgggtgcgggagttcatccgcttccaccagatccccaatcccctgcgccagcgcctcgaggagtacttccagcacgcctggtcctacaccaacggcatcgacatgaacgcggtgctgaagggcttccctgagtgcctgcaggctgacatctgcctgcacctgaaccgctcactgctgcagcactgcaaacccttccgaggggccaccaagggctgccttcgggccctggccatgaagttcaagaccacacatgcaccgccaggggacacactggtgcatgctggggacctgctcaccgccctgtacttcatctcccggggctccatcgagatcctgcggggcgacgtcgtcgtggccatcctggggaagaatgacatctttggggagcctctgaacctgtatgcaaggcctggcaagtcgaacggggatgtgcgggccctcacctactgtgacctacacaagatccatcgggacgacctgctggaggtgctggacatgtaccctgagttctccgaccacttctggtccagcctggagatcaccttcaacctgcgagataccaacatgatcccgggctcccccggcagtacggagttagagggtggcttcagtcggcaacgcaagcgcaagttgtccttccgcaggcgcacggacaaggacacggagcggccaggggaggtgtcggccttggggccgggccgggcgggggcagggccgagtagccggggccggccgggggggccgtggggggagagcccgtccagtggcccctccagccctgagagcagtgaggatgagggcccaggccgcagctccagccccctccgcctggtgcccttctccagccccaggccccccggagagccgccgggtggggagcccctgatggaggactgcgagaagagcagcgacacttgcaaccccctgtcaggcgccttctcaggagtgtccaacattttcagcttctggggggacagtcggggccgccagtaccaggagctccctcgatgccccgcccccacccccagcctcctcaacatccccctctccagcccgggtcggcggccccggggcgacgtggagagcaggctggatgccctccagcgccagctcaacaggctggagacccggctgagtgcagacatggccactgtcctgcagctgctacagaggcagatgacgctggtcccgcccgcctacagtgctgtgaccaccccggggcctggccccacttccacatccccgctgttgcccgtcagccccctccccaccctcaccttggactcgctttctcaggtttcccagttcatggcgtgtgaggagctgcccccgggggccccagagcttccccaagaaggccccacacgacgcctctccctaccgggccagctgggggccctcacctcccagcccctgcacagacacggctcggacccgggcagttagtggggctgcccagtgtggacacgtggctcacccagggatcaaggcgctgctgggccgctccccttggaggccctgctcaggaggccctgaccgtggaaggggagaggaactcgaaagcacagctcctcccccagcccttgggaccatcttctcctgcagtcccctgggccccagtgagaggggcaggggcagggccggcagtaggtggggcctgtggtccccccactgccctgagggcattagctggtctaactgcccggaggcacccggccctgggccttaggcacctcaaggacttttctgctatttactgctcttattgttaaggataataattaaggatcatatgaataattaatgaagatgctgatgactatgaataataaataattatcctgaggaga

SEQ ID NO: 614 - DNA, 3884 bp, Homo sapiens
  source 1..3884: mol_type = genomic DNA
  misc_feature 1..3884: note = cDNA of KCNH2 gene SNP c.2707G>A (p.Gly903Arg)
atgccggtgcggaggggccacgtcgcgccgcagaacaccttcctggacaccatcatccgcaagtttgagggccagagccgtaagttcatcatcgccaacgctcgggtggagaactgcgccgtcatctactgcaacgacggcttctgcgagctgtgcggctactcgcgggccgaggtgatgcagcgaccctgcacctgcgacttcctgcacgggccgcgcacgcagcgccgcgctgccgcgcagatcgcgcaggcactgctgggcgccgaggagcgcaaagtggaaatcgccttctaccggaaagatgggagctgcttcctatgtctggtggatgtggtgcccgtgaagaacgaggatggggctgtcatcatgttcatcctcaatttcgaggtggtgatggagaaggacatggtggggtccccggctcatgacaccaaccaccggggcccccccaccagctggctggccccaggccgcgccaagaccttccgcctgaagctgcccgcgctgctggcgctgacggcccgggagtcgtcggtgcggtcgggcggcgcgggcggcgcgggcgccccgggggccgtggtggtggacgtggacctgacgcccgcggcacccagcagcgagtcgctggccctggacgaagtgacagccatggacaaccacgtggcagggctcgggcccgcggaggagcggcgtgcgctggtgggtcccggctctccgccccgcagcgcgcccggccagctcccatcgccccgggcgcacagcctcaaccccgacgcctcgggctccagctgcagcctggcccggacgcgctcccgagaaagctgcgccagcgtgcgccgcgcctcgtcggccgacgacatcgaggccatgcgcgccggggtgctgcccccgccaccgcgccacgccagcaccggggccatgcacccactgcgcagcggcttgctcaactccacctcggactccgacctcgtgcgctaccgcaccattagcaagattccccaaatcaccctcaactttgtggacctcaagggcgaccccttcttggcttcgcccaccagtgaccgtgagatcatagcacctaagataaaggagcgaacccacaatgtcactgagaaggtcacccaggtcctgtccctgggcgccgacgtgctgcctgagtacaagctgcaggcaccgcgcatccaccgctggaccatcctgcattacagccccttcaaggccgtgtgggactggctcatcctgctgctggtcatctacacggctgtcttcacaccctactcggctgccttcctgctgaaggagacggaagaaggcccgcctgctaccgagtgtggctacgcctgccagccgctggctgtggtggacctcatcgtggacatcatgttcattgtggacatcctcatcaacttccgcaccacctacgtcaatgccaacgaggaggtggtcagccaccccggccgcatcgccgtccactacttcaagggctggttcctcatcgacatggtggccgccatccccttcgacctgctcatcttcggctctggctctgaggagctgatcgggctgctgaagactgcgcggctgctgcggctggtgcgcgtggcgcggaagctggatcgctactcagagtacggcgcggccgtgctgttcttgctcatgtgcacctttgcgctcatcgcgcactggctagcctgcatctggtacgccatcggcaacatggagcagccacacatggactcacgcatcggctggctgcacaacctgggcgaccagataggcaaaccctacaacagcagcggcctgggcggcccctccatcaaggacaagtatgtgacggcgctctacttcaccttcagcagcctcaccagtgtgggcttcggcaacgtctctcccaacaccaactcagagaagatcttctccatctgcgtcatgctcattggctccctcatgtatgctagcatcttcggcaacgtgtcggccatcatccagcggctgtactcgggcacagcccgctaccacacacagatgctgcgggtgcgggagttcatccgcttccaccagatccccaatcccctgcgccagcgcctcgaggagtacttccagcacgcctggtcctacaccaacggcatcgacatgaacgcggtgctgaagggcttccctgagtgcctgcaggctgacatctgcctgcacctgaaccgctcactgctgcagcactgcaaacccttccgaggggccaccaagggctgccttcgggccctggccatgaagttcaagaccacacatgcaccgccaggggacacactggtgcatgctggggacctgctcaccgccctgtacttcatctcccggggctccatcgagatcctgcggggcgacgtcgtcgtggccatcctggggaagaatgacatctttggggagcctctgaacctgtatgcaaggcctggcaagtcgaacggggatgtgcgggccctcacctactgtgacctacacaagatccatcgggacgacctgctggaggtgctggacatgtaccctgagttctccgaccacttctggtccagcctggagatcaccttcaacctgcgagataccaacatgatcccgggctcccccggcagtacggagttagagggtggcttcagtcggcaacgcaagcgcaagttgtccttccgcaggcgcacggacaaggacacggagcagccaagggaggtgtcggccttggggccgggccgggcgggggcagggccgagtagccggggccggccgggggggccgtggggggagagcccgtccagtggcccctccagccctgagagcagtgaggatgagggcccaggccgcagctccagccccctccgcctggtgcccttctccagccccaggccccccggagagccgccgggtggggagcccctgatggaggactgcgagaagagcagcgacacttgcaaccccctgtcaggcgccttctcaggagtgtccaacattttcagcttctggggggacagtcggggccgccagtaccaggagctccctcgatgccccgcccccacccccagcctcctcaacatccccctctccagcccgggtcggcggccccggggcgacgtggagagcaggctggatgccctccagcgccagctcaacaggctggagacccggctgagtgcagacatggccactgtcctgcagctgctacagaggcagatgacgctggtcccgcccgcctacagtgctgtgaccaccccggggcctggccccacttccacatccccgctgttgcccgtcagccccctccccaccctcaccttggactcgctttctcaggtttcccagttcatggcgtgtgaggagctgcccccgggggccccagagcttccccaagaaggccccacacgacgcctctccctaccgggccagctgggggccctcacctcccagcccctgcacagacacggctcggacccgggcagttagtggggctgcccagtgtggacacgtggctcacccagggatcaaggcgctgctgggccgctccccttggaggccctgctcaggaggccctgaccgtggaaggggagaggaactcgaaagcacagctcctcccccagcccttgggaccatcttctcctgcagtcccctgggccccagtgagaggggcaggggcagggccggcagtaggtggggcctgtggtccccccactgccctgagggcattagctggtctaactgcccggaggcacccggccctgggccttaggcacctcaaggacttttctgctatttactgctcttattgttaaggataataattaaggatcatatgaataattaatgaagatgctgatgactatgaataataaataattatcctgaggaga

SEQ ID NO: 615 - DNA, 3884 bp, Homo sapiens
  source 1..3884: mol_type = genomic DNA
  misc_feature 1..3884: note = cDNA of KCNH2 gene SNP c.2707G>C (p.Gly903Arg)
atgccggtgcggaggggccacgtcgcgccgcagaacaccttcctggacaccatcatccgcaagtttgagggccagagccgtaagttcatcatcgccaacgctcgggtggagaactgcgccgtcatctactgcaacgacggcttctgcgagctgtgcggctactcgcgggccgaggtgatgcagcgaccctgcacctgcgacttcctgcacgggccgcgcacgcagcgccgcgctgccgcgcagatcgcgcaggcactgctgggcgccgaggagcgcaaagtggaaatcgccttctaccggaaagatgggagctgcttcctatgtctggtggatgtggtgcccgtgaagaacgaggatggggctgtcatcatgttcatcctcaatttcgaggtggtgatggagaaggacatggtggggtccccggctcatgacaccaaccaccggggcccccccaccagctggctggccccaggccgcgccaagaccttccgcctgaagctgcccgcgctgctggcgctgacggcccgggagtcgtcggtgcggtcgggcggcgcgggcggcgcgggcgccccgggggccgtggtggtggacgtggacctgacgcccgcggcacccagcagcgagtcgctggccctggacgaagtgacagccatggacaaccacgtggcagggctcgggcccgcggaggagcggcgtgcgctggtgggtcccggctctccgccccgcagcgcgcccggccagctcccatcgccccgggcgcacagcctcaaccccgacgcctcgggctccagctgcagcctggcccggacgcgctcccgagaaagctgcgccagcgtgcgccgcgcctcgtcggccgacgacatcgaggccatgcgcgccggggtgctgcccccgccaccgcgccacgccagcaccggggccatgcacccactgcgcagcggcttgctcaactccacctcggactccgacctcgtgcgctaccgcaccattagcaagattccccaaatcaccctcaactttgtggacctcaagggcgaccccttcttggcttcgcccaccagtgaccgtgagatcatagcacctaagataaaggagcgaacccacaatgtcactgagaaggtcacccaggtcctgtccctgggcgccgacgtgctgcctgagtacaagctgcaggcaccgcgcatccaccgctggaccatcctgcattacagccccttcaaggccgtgtgggactggctcatcctgctgctggtcatctacacggctgtcttcacaccctactcggctgccttcctgctgaaggagacggaagaaggcccgcctgctaccgagtgtggctacgcctgccagccgctggctgtggtggacctcatcgtggacatcatgttcattgtggacatcctcatcaacttccgcaccacctacgtcaatgccaacgaggaggtggtcagccaccccggccgcatcgccgtccactacttcaagggctggttcctcatcgacatggtggccgccatccccttcgacctgctcatcttcggctctggctctgaggagctgatcgggctgctgaagactgcgcggctgctgcggctggtgcgcgtggcgcggaagctggatcgctactcagagtacggcgcggccgtgctgttcttgctcatgtgcacctttgcgctcatcgcgcactggctagcctgcatctggtacgccatcggcaacatggagcagccacacatggactcacgcatcggctggctgcacaacctgggcgaccagataggcaaaccctacaacagcagcggcctgggcggcccctccatcaaggacaagtatgtgacggcgctctacttcaccttcagcagcctcaccagtgtgggcttcggcaacgtctctcccaacaccaactcagagaagatcttctccatctgcgtcatgctcattggctccctcatgtatgctagcatcttcggcaacgtgtcggccatcatccagcggctgtactcgggcacagcccgctaccacacacagatgctgcgggtgcgggagttcatccgcttccaccagatccccaatcccctgcgccagcgcctcgaggagtacttccagcacgcctggtcctacaccaacggcatcgacatgaacgcggtgctgaagggcttccctgagtgcctgcaggctgacatctgcctgcacctgaaccgctcactgctgcagcactgcaaacccttccgaggggccaccaagggctgccttcgggccctggccatgaagttcaagaccacacatgcaccgccaggggacacactggtgcatgctggggacctgctcaccgccctgtacttcatctcccggggctccatcgagatcctgcggggcgacgtcgtcgtggccatcctggggaagaatgacatctttggggagcctctgaacctgtatgcaaggcctggcaagtcgaacggggatgtgcgggccctcacctactgtgacctacacaagatccatcgggacgacctgctggaggtgctggacatgtaccctgagttctccgaccacttctggtccagcctggagatcaccttcaacctgcgagataccaacatgatcccgggctcccccggcagtacggagttagagggtggcttcagtcggcaacgcaagcgcaagttgtccttccgcaggcgcacggacaaggacacggagcagccacgggaggtgtcggccttggggccgggccgggcgggggcagggccgagtagccggggccggccgggggggccgtggggggagagcccgtccagtggcccctccagccctgagagcagtgaggatgagggcccaggccgcagctccagccccctccgcctggtgcccttctccagccccaggccccccggagagccgccgggtggggagcccctgatggaggactgcgagaagagcagcgacacttgcaaccccctgtcaggcgccttctcaggagtgtccaacattttcagcttctggggggacagtcggggccgccagtaccaggagctccctcgatgccccgcccccacccccagcctcctcaacatccccctctccagcccgggtcggcggccccggggcgacgtggagagcaggctggatgccctccagcgccagctcaacaggctggagacccggctgagtgcagacatggccactgtcctgcagctgctacagaggcagatgacgctggtcccgcccgcctacagtgctgtgaccaccccggggcctggccccacttccacatccccgctgttgcccgtcagccccctccccaccctcaccttggactcgctttctcaggtttcccagttcatggcgtgtgaggagctgcccccgggggccccagagcttccccaagaaggccccacacgacgcctctccctaccgggccagctgggggccctcacctcccagcccctgcacagacacggctcggacccgggcagttagtggggctgcccagtgtggacacgtggctcacccagggatcaaggcgctgctgggccgctccccttggaggccctgctcaggaggccctgaccgtggaaggggagaggaactcgaaagcacagctcctcccccagcccttgggaccatcttctcctgcagtcccctgggccccagtgagaggggcaggggcagggccggcagtaggtggggcctgtggtccccccactgccctgagggcattagctggtctaactgcccggaggcacccggccctgggccttaggcacctcaaggacttttctgctatttactgctcttattgttaaggataataattaaggatcatatgaataattaatgaagatgctgatgactatgaataataaataattatcctgaggaga

SEQ ID NO: 616 - DNA, 3884 bp, Homo sapiens
  source 1..3884: mol_type = genomic DNA
  misc_feature 1..3884: note = cDNA of KCNH2 gene SNP c.2710G>A (p.Glu904Lys)
atgccggtgcggaggggccacgtcgcgccgcagaacaccttcctggacaccatcatccgcaagtttgagggccagagccgtaagttcatcatcgccaacgctcgggtggagaactgcgccgtcatctactgcaacgacggcttctgcgagctgtgcggctactcgcgggccgaggtgatgcagcgaccctgcacctgcgacttcctgcacgggccgcgcacgcagcgccgcgctgccgcgcagatcgcgcaggcactgctgggcgccgaggagcgcaaagtggaaatcgccttctaccggaaagatgggagctgcttcctatgtctggtggatgtggtgcccgtgaagaacgaggatggggctgtcatcatgttcatcctcaatttcgaggtggtgatggagaaggacatggtggggtccccggctcatgacaccaaccaccggggcccccccaccagctggctggccccaggccgcgccaagaccttccgcctgaagctgcccgcgctgctggcgctgacggcccgggagtcgtcggtgcggtcgggcggcgcgggcggcgcgggcgccccgggggccgtggtggtggacgtggacctgacgcccgcggcacccagcagcgagtcgctggccctggacgaagtgacagccatggacaaccacgtggcagggctcgggcccgcggaggagcggcgtgcgctggtgggtcccggctctccgccccgcagcgcgcccggccagctcccatcgccccgggcgcacagcctcaaccccgacgcctcgggctccagctgcagcctggcccggacgcgctcccgagaaagctgcgccagcgtgcgccgcgcctcgtcggccgacgacatcgaggccatgcgcgccggggtgctgcccccgccaccgcgccacgccagcaccggggccatgcacccactgcgcagcggcttgctcaactccacctcggactccgacctcgtgcgctaccgcaccattagcaagattccccaaatcaccctcaactttgtggacctcaagggcgaccccttcttggcttcgcccaccagtgaccgtgagatcatagcacctaagataaaggagcgaacccacaatgtcactgagaaggtcacccaggtcctgtccctgggcgccgacgtgctgcctgagtacaagctgcaggcaccgcgcatccaccgctggaccatcctgcattacagccccttcaaggccgtgtgggactggctcatcctgctgctggtcatctacacggctgtcttcacaccctactcggctgccttcctgctgaaggagacggaagaaggcccgcctgctaccgagtgtggctacgcctgccagccgctggctgtggtggacctcatcgtggacatcatgttcattgtggacatcctcatcaacttccgcaccacctacgtcaatgccaacgaggaggtggtcagccaccccggccgcatcgccgtccactacttcaagggctggttcctcatcgacatggtggccgccatccccttcgacctgctcatcttcggctctggctctgaggagctgatcgggctgctgaagactgcgcggctgctgcggctggtgcgcgtggcgcggaagctggatcgctactcagagtacggcgcggccgtgctgttcttgctcatgtgcacctttgcgctcatcgcgcactggctagcctgcatctggtacgccatcggcaacatggagcagccacacatggactcacgcatcggctggctgcacaacctgggcgaccagataggcaaaccctacaacagcagcggcctgggcggcccctccatcaaggacaagtatgtgacggcgctctacttcaccttcagcagcctcaccagtgtgggcttcggcaacgtctctcccaacaccaactcagagaagatcttctccatctgcgtcatgctcattggctccctcatgtatgctagcatcttcggcaacgtgtcggccatcatccagcggctgtactcgggcacagcccgctaccacacacagatgctgcgggtgcgggagttcatccgcttccaccagatccccaatcccctgcgccagcgcctcgaggagtacttccagcacgcctggtcctacaccaacggcatcgacatgaacgcggtgctgaagggcttccctgagtgcctgcaggctgacatctgcctgcacctgaaccgctcactgctgcagcactgcaaacccttccgaggggccaccaagggctgccttcgggccctggccatgaagttcaagaccacacatgcaccgccaggggacacactggtgcatgctggggacctgctcaccgccctgtacttcatctcccggggctccatcgagatcctgcggggcgacgtcgtcgtggccatcctggggaagaatgacatctttggggagcctctgaacctgtatgcaaggcctggcaagtcgaacggggatgtgcgggccctcacctactgtgacctacacaagatccatcgggacgacctgctggaggtgctggacatgtaccctgagttctccgaccacttctggtccagcctggagatcaccttcaacctgcgagataccaacatgatcccgggctcccccggcagtacggagttagagggtggcttcagtcggcaacgcaagcgcaagttgtccttccgcaggcgcacggacaaggacacggagcagccagggaaggtgtcggccttggggccgggccgggcgggggcagggccgagtagccggggccggccgggggggccgtggggggagagcccgtccagtggcccctccagccctgagagcagtgaggatgagggcccaggccgcagctccagccccctccgcctggtgcccttctccagccccaggccccccggagagccgccgggtggggagcccctgatggaggactgcgagaagagcagcgacacttgcaaccccctgtcaggcgccttctcaggagtgtccaacattttcagcttctggggggacagtcggggccgccagtaccaggagctccctcgatgccccgcccccacccccagcctcctcaacatccccctctccagcccgggtcggcggccccggggcgacgtggagagcaggctggatgccctccagcgccagctcaacaggctggagacccggctgagtgcagacatggccactgtcctgcagctgctacagaggcagatgacgctggtcccgcccgcctacagtgctgtgaccaccccggggcctggccccacttccacatccccgctgttgcccgtcagccccctccccaccctcaccttggactcgctttctcaggtttcccagttcatggcgtgtgaggagctgcccccgggggccccagagcttccccaagaaggccccacacgacgcctctccctaccgggccagctgggggccctcacctcccagcccctgcacagacacggctcggacccgggcagttagtggggctgcccagtgtggacacgtggctcacccagggatcaaggcgctgctgggccgctccccttggaggccctgctcaggaggccctgaccgtggaaggggagaggaactcgaaagcacagctcctcccccagcccttgggaccatcttctcctgcagtcccctgggccccagtgagaggggcaggggcagggccggcagtaggtggggcctgtggtccccccactgccctgagggcattagctggtctaactgcccggaggcacccggccctgggccttaggcacctcaaggacttttctgctatttactgctcttattgttaaggataataattaaggatcatatgaataattaatgaagatgctgatgactatgaataataaataattatcctgaggaga

SEQ ID NO: 617 - DNA, 3884 bp, Homo sapiens
  source 1..3884: mol_type = genomic DNA
  misc_feature 1..3884: note = cDNA of KCNH2 gene SNP c.2711A>G (p.Glu904Gly)
atgccggtgcggaggggccacgtcgcgccgcagaacaccttcctggacaccatcatccgcaagtttgagggccagagccgtaagttcatcatcgccaacgctcgggtggagaactgcgccgtcatctactgcaacgacggcttctgcgagctgtgcggctactcgcgggccgaggtgatgcagcgaccctgcacctgcgacttcctgcacgggccgcgcacgcagcgccgcgctgccgcgcagatcgcgcaggcactgctgggcgccgaggagcgcaaagtggaaatcgccttctaccggaaagatgggagctgcttcctatgtctggtggatgtggtgcccgtgaagaacgaggatggggctgtcatcatgttcatcctcaatttcgaggtggtgatggagaaggacatggtggggtccccggctcatgacaccaaccaccggggcccccccaccagctggctggccccaggccgcgccaagaccttccgcctgaagctgcccgcgctgctggcgctgacggcccgggagtcgtcggtgcggtcgggcggcgcgggcggcgcgggcgccccgggggccgtggtggtggacgtggacctgacgcccgcggcacccagcagcgagtcgctggccctggacgaagtgacagccatggacaaccacgtggcagggctcgggcccgcggaggagcggcgtgcgctggtgggtcccggctctccgccccgcagcgcgcccggccagctcccatcgccccgggcgcacagcctcaaccccgacgcctcgggctccagctgcagcctggcccggacgcgctcccgagaaagctgcgccagcgtgcgccgcgcctcgtcggccgacgacatcgaggccatgcgcgccggggtgctgcccccgccaccgcgccacgccagcaccggggccatgcacccactgcgcagcggcttgctcaactccacctcggactccgacctcgtgcgctaccgcaccattagcaagattccccaaatcaccctcaactttgtggacctcaagggcgaccccttcttggcttcgcccaccagtgaccgtgagatcatagcacctaagataaaggagcgaacccacaatgtcactgagaaggtcacccaggtcctgtccctgggcgccgacgtgctgcctgagtacaagctgcaggcaccgcgcatccaccgctggaccatcctgcattacagccccttcaaggccgtgtgggactggctcatcctgctgctggtcatctacacggctgtcttcacaccctactcggctgccttcctgctgaaggagacggaagaaggcccgcctgctaccgagtgtggctacgcctgccagccgctggctgtggtggacctcatcgtggacatcatgttcattgtggacatcctcatcaacttccgcaccacctacgtcaatgccaacgaggaggtggtcagccaccccggccgcatcgccgtccactacttcaagggctggttcctcatcgacatggtggccgccatccccttcgacctgctcatcttcggctctggctctgaggagctgatcgggctgctgaagactgcgcggctgctgcggctggtgcgcgtggcgcggaagctggatcgctactcagagtacggcgcggccgtgctgttcttgctcatgtgcacctttgcgctcatcgcgcactggctagcctgcatctggtacgccatcggcaacatggagcagccacacatggactcacgcatcggctggctgcacaacctgggcgaccagataggcaaaccctacaacagcagcggcctgggcggcccctccatcaaggacaagtatgtgacggcgctctacttcaccttcagcagcctcaccagtgtgggcttcggcaacgtctctcccaacaccaactcagagaagatcttctccatctgcgtcatgctcattggctccctcatgtatgctagcatcttcggcaacgtgtcggccatcatccagcggctgtactcgggcacagcccgctaccacacacagatgctgcgggtgcgggagttcatccgcttccaccagatccccaatcccctgcgccagcgcctcgaggagtacttccagcacgcctggtcctacaccaacggcatcgacatgaacgcggtgctgaagggcttccctgagtgcctgcaggctgacatctgcctgcacctgaaccgctcactgctgcagcactgcaaacccttccgaggggccaccaagggctgccttcgggccctggccatgaagttcaagaccacacatgcaccgccaggggacacactggtgcatgctggggacctgctcaccgccctgtacttcatctcccggggctccatcgagatcctgcggggcgacgtcgtcgtggccatcctggggaagaatgacatctttggggagcctctgaacctgtatgcaaggcctggcaagtcgaacggggatgtgcgggccctcacctactgtgacctacacaagatccatcgggacgacctgctggaggtgctggacatgtaccctgagttctccgaccacttctggtccagcctggagatcaccttcaacctgcgagataccaacatgatcccgggctcccccggcagtacggagttagagggtggcttcagtcggcaacgcaagcgcaagttgtccttccgcaggcgcacggacaaggacacggagcagccagggggggtgtcggccttggggccgggccgggcgggggcagggccgagtagccggggccggccgggggggccgtggggggagagcccgtccagtggcccctccagccctgagagcagtgaggatgagggcccaggccgcagctccagccccctccgcctggtgcccttctccagccccaggccccccggagagccgccgggtggggagcccctgatggaggactgcgagaagagcagcgacacttgcaaccccctgtcaggcgccttctcaggagtgtccaacattttcagcttctggggggacagtcggggccgccagtaccaggagctccctcgatgccccgcccccacccccagcctcctcaacatccccctctccagcccgggtcggcggccccggggcgacgtggagagcaggctggatgccctccagcgccagctcaacaggctggagacccggctgagtgcagacatggccactgtcctgcagctgctacagaggcagatgacgctggtcccgcccgcctacagtgctgtgaccaccccggggcctggccccacttccacatccccgctgttgcccgtcagccccctccccaccctcaccttggactcgctttctcaggtttcccagttcatggcgtgtgaggagctgcccccgggggccccagagcttccccaagaaggccccacacgacgcctctccctaccgggccagctgggggccctcacctcccagcccctgcacagacacggctcggacccgggcagttagtggggctgcccagtgtggacacgtggctcacccagggatcaaggcgctgctgggccgctccccttggaggccctgctcaggaggccctgaccgtggaaggggagaggaactcgaaagcacagctcctcccccagcccttgggaccatcttctcctgcagtcccctgggccccagtgagaggggcaggggcagggccggcagtaggtggggcctgtggtccccccactgccctgagggcattagctggtctaactgcccggaggcacccggccctgggccttaggcacctcaaggacttttctgctatttactgctcttattgttaaggataataattaaggatcatatgaataattaatgaagatgctgatgactatgaataataaataattatcctgaggaga

SEQ ID NO: 618 - DNA, 3884 bp, Homo sapiens
  source 1..3884: mol_type = genomic DNA
  misc_feature 1..3884: note = cDNA of KCNH2 gene SNP c.2711A>T (p.Glu904Val)
atgccggtgcggaggggccacgtcgcgccgcagaacaccttcctggacaccatcatccgcaagtttgagggccagagccgtaagttcatcatcgccaacgctcgggtggagaactgcgccgtcatctactgcaacgacggcttctgcgagctgtgcggctactcgcgggccgaggtgatgcagcgaccctgcacctgcgacttcctgcacgggccgcgcacgcagcgccgcgctgccgcgcagatcgcgcaggcactgctgggcgccgaggagcgcaaagtggaaatcgccttctaccggaaagatgggagctgcttcctatgtctggtggatgtggtgcccgtgaagaacgaggatggggctgtcatcatgttcatcctcaatttcgaggtggtgatggagaaggacatggtggggtccccggctcatgacaccaaccaccggggcccccccaccagctggctggccccaggccgcgccaagaccttccgcctgaagctgcccgcgctgctggcgctgacggcccgggagtcgtcggtgcggtcgggcggcgcgggcggcgcgggcgccccgggggccgtggtggtggacgtggacctgacgcccgcggcacccagcagcgagtcgctggccctggacgaagtgacagccatggacaaccacgtggcagggctcgggcccgcggaggagcggcgtgcgctggtgggtcccggctctccgccccgcagcgcgcccggccagctcccatcgccccgggcgcacagcctcaaccccgacgcctcgggctccagctgcagcctggcccggacgcgctcccgagaaagctgcgccagcgtgcgccgcgcctcgtcggccgacgacatcgaggccatgcgcgccggggtgctgcccccgccaccgcgccacgccagcaccggggccatgcacccactgcgcagcggcttgctcaactccacctcggactccgacctcgtgcgctaccgcaccattagcaagattccccaaatcaccctcaactttgtggacctcaagggcgaccccttcttggcttcgcccaccagtgaccgtgagatcatagcacctaagataaaggagcgaacccacaatgtcactgagaaggtcacccaggtcctgtccctgggcgccgacgtgctgcctgagtacaagctgcaggcaccgcgcatccaccgctggaccatcctgcattacagccccttcaaggccgtgtgggactggctcatcctgctgctggtcatctacacggctgtcttcacaccctactcggctgccttcctgctgaaggagacggaagaaggcccgcctgctaccgagtgtggctacgcctgccagccgctggctgtggtggacctcatcgtggacatcatgttcattgtggacatcctcatcaacttccgcaccacctacgtcaatgccaacgaggaggtggtcagccaccccggccgcatcgccgtccactacttcaagggctggttcctcatcgacatggtggccgccatccccttcgacctgctcatcttcggctctggctctgaggagctgatcgggctgctgaagactgcgcggctgctgcggctggtgcgcgtggcgcggaagctggatcgctactcagagtacggcgcggccgtgctgttcttgctcatgtgcacctttgcgctcatcgcgcactggctagcctgcatctggtacgccatcggcaacatggagcagccacacatggactcacgcatcggctggctgcacaacctgggcgaccagataggcaaaccctacaacagcagcggcctgggcggcccctccatcaaggacaagtatgtgacggcgctctacttcaccttcagcagcctcaccagtgtgggcttcggcaacgtctctcccaacaccaactcagagaagatcttctccatctgcgtcatgctcattggctccctcatgtatgctagcatcttcggcaacgtgtcggccatcatccagcggctgtactcgggcacagcccgctaccacacacagatgctgcgggtgcgggagttcatccgcttccaccagatccccaatcccctgcgccagcgcctcgaggagtacttccagcacgcctggtcctacaccaacggcatcgacatgaacgcggtgctgaagggcttccctgagtgcctgcaggctgacatctgcctgcacctgaaccgctcactgctgcagcactgcaaacccttccgaggggccaccaagggctgccttcgggccctggccatgaagttcaagaccacacatgcaccgccaggggacacactggtgcatgctggggacctgctcaccgccctgtacttcatctcccggggctccatcgagatcctgcggggcgacgtcgtcgtggccatcctggggaagaatgacatctttggggagcctctgaacctgtatgcaaggcctggcaagtcgaacggggatgtgcgggccctcacctactgtgacctacacaagatccatcgggacgacctgctggaggtgctggacatgtaccctgagttctccgaccacttctggtccagcctggagatcaccttcaacctgcgagataccaacatgatcccgggctcccccggcagtacggagttagagggtggcttcagtcggcaacgcaagcgcaagttgtccttccgcaggcgcacggacaaggacacggagcagccaggggtggtgtcggccttggggccgggccgggcgggggcagggccgagtagccggggccggccgggggggccgtggggggagagcccgtccagtggcccctccagccctgagagcagtgaggatgagggcccaggccgcagctccagccccctccgcctggtgcccttctccagccccaggccccccggagagccgccgggtggggagcccctgatggaggactgcgagaagagcagcgacacttgcaaccccctgtcaggcgccttctcaggagtgtccaacattttcagcttctggggggacagtcggggccgccagtaccaggagctccctcgatgccccgcccccacccccagcctcctcaacatccccctctccagcccgggtcggcggccccggggcgacgtggagagcaggctggatgccctccagcgccagctcaacaggctggagacccggctgagtgcagacatggccactgtcctgcagctgctacagaggcagatgacgctggtcccgcccgcctacagtgctgtgaccaccccggggcctggccccacttccacatccccgctgttgcccgtcagccccctccccaccctcaccttggactcgctttctcaggtttcccagttcatggcgtgtgaggagctgcccccgggggccccagagcttccccaagaaggccccacacgacgcctctccctaccgggccagctgggggccctcacctcccagcccctgcacagacacggctcggacccgggcagttagtggggctgcccagtgtggacacgtggctcacccagggatcaaggcgctgctgggccgctccccttggaggccctgctcaggaggccctgaccgtggaaggggagaggaactcgaaagcacagctcctcccccagcccttgggaccatcttctcctgcagtcccctgggccccagtgagaggggcaggggcagggccggcagtaggtggggcctgtggtccccccactgccctgagggcattagctggtctaactgcccggaggcacccggccctgggccttaggcacctcaaggacttttctgctatttactgctcttattgttaaggataataattaaggatcatatgaataattaatgaagatgctgatgactatgaataataaataattatcctgaggaga

SEQ ID NO: 619 - DNA, 3884 bp, Homo sapiens
  source 1..3884: mol_type = genomic DNA
  misc_feature 1..3884: note = cDNA of KCNH2 gene SNP c.2717C>T (p.Ser906Leu)
atgccggtgcggaggggccacgtcgcgccgcagaacaccttcctggacaccatcatccgcaagtttgagggccagagccgtaagttcatcatcgccaacgctcgggtggagaactgcgccgtcatctactgcaacgacggcttctgcgagctgtgcggctactcgcgggccgaggtgatgcagcgaccctgcacctgcgacttcctgcacgggccgcgcacgcagcgccgcgctgccgcgcagatcgcgcaggcactgctgggcgccgaggagcgcaaagtggaaatcgccttctaccggaaagatgggagctgcttcctatgtctggtggatgtggtgcccgtgaagaacgaggatggggctgtcatcatgttcatcctcaatttcgaggtggtgatggagaaggacatggtggggtccccggctcatgacaccaaccaccggggcccccccaccagctggctggccccaggccgcgccaagaccttccgcctgaagctgcccgcgctgctggcgctgacggcccgggagtcgtcggtgcggtcgggcggcgcgggcggcgcgggcgccccgggggccgtggtggtggacgtggacctgacgcccgcggcacccagcagcgagtcgctggccctggacgaagtgacagccatggacaaccacgtggcagggctcgggcccgcggaggagcggcgtgcgctggtgggtcccggctctccgccccgcagcgcgcccggccagctcccatcgccccgggcgcacagcctcaaccccgacgcctcgggctccagctgcagcctggcccggacgcgctcccgagaaagctgcgccagcgtgcgccgcgcctcgtcggccgacgacatcgaggccatgcgcgccggggtgctgcccccgccaccgcgccacgccagcaccggggccatgcacccactgcgcagcggcttgctcaactccacctcggactccgacctcgtgcgctaccgcaccattagcaagattccccaaatcaccctcaactttgtggacctcaagggcgaccccttcttggcttcgcccaccagtgaccgtgagatcatagcacctaagataaaggagcgaacccacaatgtcactgagaaggtcacccaggtcctgtccctgggcgccgacgtgctgcctgagtacaagctgcaggcaccgcgcatccaccgctggaccatcctgcattacagccccttcaaggccgtgtgggactggctcatcctgctgctggtcatctacacggctgtcttcacaccctactcggctgccttcctgctgaaggagacggaagaaggcccgcctgctaccgagtgtggctacgcctgccagccgctggctgtggtggacctcatcgtggacatcatgttcattgtggacatcctcatcaacttccgcaccacctacgtcaatgccaacgaggaggtggtcagccaccccggccgcatcgccgtccactacttcaagggctggttcctcatcgacatggtggccgccatccccttcgacctgctcatcttcggctctggctctgaggagctgatcgggctgctgaagactgcgcggctgctgcggctggtgcgcgtggcgcggaagctggatcgctactcagagtacggcgcggccgtgctgttcttgctcatgtgcacctttgcgctcatcgcgcactggctagcctgcatctggtacgccatcggcaacatggagcagccacacatggactcacgcatcggctggctgcacaacctgggcgaccagataggcaaaccctacaacagcagcggcctgggcggcccctccatcaaggacaagtatgtgacggcgctctacttcaccttcagcagcctcaccagtgtgggcttcggcaacgtctctcccaacaccaactcagagaagatcttctccatctgcgtcatgctcattggctccctcatgtatgctagcatcttcggcaacgtgtcggccatcatccagcggctgtactcgggcacagcccgctaccacacacagatgctgcgggtgcgggagttcatccgcttccaccagatccccaatcccctgcgccagcgcctcgaggagtacttccagcacgcctggtcctacaccaacggcatcgacatgaacgcggtgctgaagggcttccctgagtgcctgcaggctgacatctgcctgcacctgaaccgctcactgctgcagcactgcaaacccttccgaggggccaccaagggctgccttcgggccctggccatgaagttcaagaccacacatgcaccgccaggggacacactggtgcatgctggggacctgctcaccgccctgtacttcatctcccggggctccatcgagatcctgcggggcgacgtcgtcgtggccatcctggggaagaatgacatctttggggagcctctgaacctgtatgcaaggcctggcaagtcgaacggggatgtgcgggccctcacctactgtgacctacacaagatccatcgggacgacctgctggaggtgctggacatgtaccctgagttctccgaccacttctggtccagcctggagatcaccttcaacctgcgagataccaacatgatcccgggctcccccggcagtacggagttagagggtggcttcagtcggcaacgcaagcgcaagttgtccttccgcaggcgcacggacaaggacacggagcagccaggggaggtgttggccttggggccgggccgggcgggggcagggccgagtagccggggccggccgggggggccgtggggggagagcccgtccagtggcccctccagccctgagagcagtgaggatgagggcccaggccgcagctccagccccctccgcctggtgcccttctccagccccaggccccccggagagccgccgggtggggagcccctgatggaggactgcgagaagagcagcgacacttgcaaccccctgtcaggcgccttctcaggagtgtccaacattttcagcttctggggggacagtcggggccgccagtaccaggagctccctcgatgccccgcccccacccccagcctcctcaacatccccctctccagcccgggtcggcggccccggggcgacgtggagagcaggctggatgccctccagcgccagctcaacaggctggagacccggctgagtgcagacatggccactgtcctgcagctgctacagaggcagatgacgctggtcccgcccgcctacagtgctgtgaccaccccggggcctggccccacttccacatccccgctgttgcccgtcagccccctccccaccctcaccttggactcgctttctcaggtttcccagttcatggcgtgtgaggagctgcccccgggggccccagagcttccccaagaaggccccacacgacgcctctccctaccgggccagctgggggccctcacctcccagcccctgcacagacacggctcggacccgggcagttagtggggctgcccagtgtggacacgtggctcacccagggatcaaggcgctgctgggccgctccccttggaggccctgctcaggaggccctgaccgtggaaggggagaggaactcgaaagcacagctcctcccccagcccttgggaccatcttctcctgcagtcccctgggccccagtgagaggggcaggggcagggccggcagtaggtggggcctgtggtccccccactgccctgagggcattagctggtctaactgcccggaggcacccggccctgggccttaggcacctcaaggacttttctgctatttactgctcttattgttaaggataataattaaggatcatatgaataattaatgaagatgctgatgactatgaataataaataattatcctgaggaga

SEQ ID NO: 620 - DNA, 3884 bp, Homo sapiens
  source 1..3884: mol_type = genomic DNA
  misc_feature 1..3884: note = cDNA of KCNH2 gene SNP c.2719G>A (p.Ala907Thr)
atgccggtgcggaggggccacgtcgcgccgcagaacaccttcctggacaccatcatccgcaagtttgagggccagagccgtaagttcatcatcgccaacgctcgggtggagaactgcgccgtcatctactgcaacgacggcttctgcgagctgtgcggctactcgcgggccgaggtgatgcagcgaccctgcacctgcgacttcctgcacgggccgcgcacgcagcgccgcgctgccgcgcagatcgcgcaggcactgctgggcgccgaggagcgcaaagtggaaatcgccttctaccggaaagatgggagctgcttcctatgtctggtggatgtggtgcccgtgaagaacgaggatggggctgtcatcatgttcatcctcaatttcgaggtggtgatggagaaggacatggtggggtccccggctcatgacaccaaccaccggggcccccccaccagctggctggccccaggccgcgccaagaccttccgcctgaagctgcccgcgctgctggcgctgacggcccgggagtcgtcggtgcggtcgggcggcgcgggcggcgcgggcgccccgggggccgtggtggtggacgtggacctgacgcccgcggcacccagcagcgagtcgctggccctggacgaagtgacagccatggacaaccacgtggcagggctcgggcccgcggaggagcggcgtgcgctggtgggtcccggctctccgccccgcagcgcgcccggccagctcccatcgccccgggcgcacagcctcaaccccgacgcctcgggctccagctgcagcctggcccggacgcgctcccgagaaagctgcgccagcgtgcgccgcgcctcgtcggccgacgacatcgaggccatgcgcgccggggtgctgcccccgccaccgcgccacgccagcaccggggccatgcacccactgcgcagcggcttgctcaactccacctcggactccgacctcgtgcgctaccgcaccattagcaagattccccaaatcaccctcaactttgtggacctcaagggcgaccccttcttggcttcgcccaccagtgaccgtgagatcatagcacctaagataaaggagcgaacccacaatgtcactgagaaggtcacccaggtcctgtccctgggcgccgacgtgctgcctgagtacaagctgcaggcaccgcgcatccaccgctggaccatcctgcattacagccccttcaaggccgtgtgggactggctcatcctgctgctggtcatctacacggctgtcttcacaccctactcggctgccttcctgctgaaggagacggaagaaggcccgcctgctaccgagtgtggctacgcctgccagccgctggctgtggtggacctcatcgtggacatcatgttcattgtggacatcctcatcaacttccgcaccacctacgtcaatgccaacgaggaggtggtcagccaccccggccgcatcgccgtccactacttcaagggctggttcctcatcgacatggtggccgccatccccttcgacctgctcatcttcggctctggctctgaggagctgatcgggctgctgaagactgcgcggctgctgcggctggtgcgcgtggcgcggaagctggatcgctactcagagtacggcgcggccgtgctgttcttgctcatgtgcacctttgcgctcatcgcgcactggctagcctgcatctggtacgccatcggcaacatggagcagccacacatggactcacgcatcggctggctgcacaacctgggcgaccagataggcaaaccctacaacagcagcggcctgggcggcccctccatcaaggacaagtatgtgacggcgctctacttcaccttcagcagcctcaccagtgtgggcttcggcaacgtctctcccaacaccaactcagagaagatcttctccatctgcgtcatgctcattggctccctcatgtatgctagcatcttcggcaacgtgtcggccatcatccagcggctgtactcgggcacagcccgctaccacacacagatgctgcgggtgcgggagttcatccgcttccaccagatccccaatcccctgcgccagcgcctcgaggagtacttccagcacgcctggtcctacaccaacggcatcgacatgaacgcggtgctgaagggcttccctgagtgcctgcaggctgacatctgcctgcacctgaaccgctcactgctgcagcactgcaaacccttccgaggggccaccaagggctgccttcgggccctggccatgaagttcaagaccacacatgcaccgccaggggacacactggtgcatgctggggacctgctcaccgccctgtacttcatctcccggggctccatcgagatcctgcggggcgacgtcgtcgtggccatcctggggaagaatgacatctttggggagcctctgaacctgtatgcaaggcctggcaagtcgaacggggatgtgcgggccctcacctactgtgacctacacaagatccatcgggacgacctgctggaggtgctggacatgtaccctgagttctccgaccacttctggtccagcctggagatcaccttcaacctgcgagataccaacatgatcccgggctcccccggcagtacggagttagagggtggcttcagtcggcaacgcaagcgcaagttgtccttccgcaggcgcacggacaaggacacggagcagccaggggaggtgtcgaccttggggccgggccgggcgggggcagggccgagtagccggggccggccgggggggccgtggggggagagcccgtccagtggcccctccagccctgagagcagtgaggatgagggcccaggccgcagctccagccccctccgcctggtgcccttctccagccccaggccccccggagagccgccgggtggggagcccctgatggaggactgcgagaagagcagcgacacttgcaaccccctgtcaggcgccttctcaggagtgtccaacattttcagcttctggggggacagtcggggccgccagtaccaggagctccctcgatgccccgcccccacccccagcctcctcaacatccccctctccagcccgggtcggcggccccggggcgacgtggagagcaggctggatgccctccagcgccagctcaacaggctggagacccggctgagtgcagacatggccactgtcctgcagctgctacagaggcagatgacgctggtcccgcccgcctacagtgctgtgaccaccccggggcctggccccacttccacatccccgctgttgcccgtcagccccctccccaccctcaccttggactcgctttctcaggtttcccagttcatggcgtgtgaggagctgcccccgggggccccagagcttccccaagaaggccccacacgacgcctctccctaccgggccagctgggggccctcacctcccagcccctgcacagacacggctcggacccgggcagttagtggggctgcccagtgtggacacgtggctcacccagggatcaaggcgctgctgggccgctccccttggaggccctgctcaggaggccctgaccgtggaaggggagaggaactcgaaagcacagctcctcccccagcccttgggaccatcttctcctgcagtcccctgggccccagtgagaggggcaggggcagggccggcagtaggtggggcctgtggtccccccactgccctgagggcattagctggtctaactgcccggaggcacccggccctgggccttaggcacctcaaggacttttctgctatttactgctcttattgttaaggataataattaaggatcatatgaataattaatgaagatgctgatgactatgaataataaataattatcctgaggaga

SEQ ID NO: 621 - DNA, 3884 bp, Homo sapiens
  source 1..3884: mol_type = genomic DNA
  misc_feature 1..3884: note = cDNA of KCNH2 gene SNP c.2719G>T (p.Ala907Ser)
atgccggtgcggaggggccacgtcgcgccgcagaacaccttcctggacaccatcatccgcaagtttgagggccagagccgtaagttcatcatcgccaacgctcgggtggagaactgcgccgtcatctactgcaacgacggcttctgcgagctgtgcggctactcgcgggccgaggtgatgcagcgaccctgcacctgcgacttcctgcacgggccgcgcacgcagcgccgcgctgccgcgcagatcgcgcaggcactgctgggcgccgaggagcgcaaagtggaaatcgccttctaccggaaagatgggagctgcttcctatgtctggtggatgtggtgcccgtgaagaacgaggatggggctgtcatcatgttcatcctcaatttcgaggtggtgatggagaaggacatggtggggtccccggctcatgacaccaaccaccggggcccccccaccagctggctggccccaggccgcgccaagaccttccgcctgaagctgcccgcgctgctggcgctgacggcccgggagtcgtcggtgcggtcgggcggcgcgggcggcgcgggcgccccgggggccgtggtggtggacgtggacctgacgcccgcggcacccagcagcgagtcgctggccctggacgaagtgacagccatggacaaccacgtggcagggctcgggcccgcggaggagcggcgtgcgctggtgggtcccggctctccgccccgcagcgcgcccggccagctcccatcgccccgggcgcacagcctcaaccccgacgcctcgggctccagctgcagcctggcccggacgcgctcccgagaaagctgcgccagcgtgcgccgcgcctcgtcggccgacgacatcgaggccatgcgcgccggggtgctgcccccgccaccgcgccacgccagcaccggggccatgcacccactgcgcagcggcttgctcaactccacctcggactccgacctcgtgcgctaccgcaccattagcaagattccccaaatcaccctcaactttgtggacctcaagggcgaccccttcttggcttcgcccaccagtgaccgtgagatcatagcacctaagataaaggagcgaacccacaatgtcactgagaaggtcacccaggtcctgtccctgggcgccgacgtgctgcctgagtacaagctgcaggcaccgcgcatccaccgctggaccatcctgcattacagccccttcaaggccgtgtgggactggctcatcctgctgctggtcatctacacggctgtcttcacaccctactcggctgccttcctgctgaaggagacggaagaaggcccgcctgctaccgagtgtggctacgcctgccagccgctggctgtggtggacctcatcgtggacatcatgttcattgtggacatcctcatcaacttccgcaccacctacgtcaatgccaacgaggaggtggtcagccaccccggccgcatcgccgtccactacttcaagggctggttcctcatcgacatggtggccgccatccccttcgacctgctcatcttcggctctggctctgaggagctgatcgggctgctgaagactgcgcggctgctgcggctggtgcgcgtggcgcggaagctggatcgctactcagagtacggcgcggccgtgctgttcttgctcatgtgcacctttgcgctcatcgcgcactggctagcctgcatctggtacgccatcggcaacatggagcagccacacatggactcacgcatcggctggctgcacaacctgggcgaccagataggcaaaccctacaacagcagcggcctgggcggcccctccatcaaggacaagtatgtgacggcgctctacttcaccttcagcagcctcaccagtgtgggcttcggcaacgtctctcccaacaccaactcagagaagatcttctccatctgcgtcatgctcattggctccctcatgtatgctagcatcttcggcaacgtgtcggccatcatccagcggctgtactcgggcacagcccgctaccacacacagatgctgcgggtgcgggagttcatccgcttccaccagatccccaatcccctgcgccagcgcctcgaggagtacttccagcacgcctggtcctacaccaacggcatcgacatgaacgcggtgctgaagggcttccctgagtgcctgcaggctgacatctgcctgcacctgaaccgctcactgctgcagcactgcaaacccttccgaggggccaccaagggctgccttcgggccctggccatgaagttcaagaccacacatgcaccgccaggggacacactggtgcatgctggggacctgctcaccgccctgtacttcatctcccggggctccatcgagatcctgcggggcgacgtcgtcgtggccatcctggggaagaatgacatctttggggagcctctgaacctgtatgcaaggcctggcaagtcgaacggggatgtgcgggccctcacctactgtgacctacacaagatccatcgggacgacctgctggaggtgctggacatgtaccctgagttctccgaccacttctggtccagcctggagatcaccttcaacctgcgagataccaacatgatcccgggctcccccggcagtacggagttagagggtggcttcagtcggcaacgcaagcgcaagttgtccttccgcaggcgcacggacaaggacacggagcagccaggggaggtgtcgtccttggggccgggccgggcgggggcagggccgagtagccggggccggccgggggggccgtggggggagagcccgtccagtggcccctccagccctgagagcagtgaggatgagggcccaggccgcagctccagccccctccgcctggtgcccttctccagccccaggccccccggagagccgccgggtggggagcccctgatggaggactgcgagaagagcagcgacacttgcaaccccctgtcaggcgccttctcaggagtgtccaacattttcagcttctggggggacagtcggggccgccagtaccaggagctccctcgatgccccgcccccacccccagcctcctcaacatccccctctccagcccgggtcggcggccccggggcgacgtggagagcaggctggatgccctccagcgccagctcaacaggctggagacccggctgagtgcagacatggccactgtcctgcagctgctacagaggcagatgacgctggtcccgcccgcctacagtgctgtgaccaccccggggcctggccccacttccacatccccgctgttgcccgtcagccccctccccaccctcaccttggactcgctttctcaggtttcccagttcatggcgtgtgaggagctgcccccgggggccccagagcttccccaagaaggccccacacgacgcctctccctaccgggccagctgggggccctcacctcccagcccctgcacagacacggctcggacccgggcagttagtggggctgcccagtgtggacacgtggctcacccagggatcaaggcgctgctgggccgctccccttggaggccctgctcaggaggccctgaccgtggaaggggagaggaactcgaaagcacagctcctcccccagcccttgggaccatcttctcctgcagtcccctgggccccagtgagaggggcaggggcagggccggcagtaggtggggcctgtggtccccccactgccctgagggcattagctggtctaactgcccggaggcacccggccctgggccttaggcacctcaaggacttttctgctatttactgctcttattgttaaggataataattaaggatcatatgaataattaatgaagatgctgatgactatgaataataaataattatcctgaggaga

SEQ ID NO: 622 - DNA, 3884 bp, Homo sapiens
  source 1..3884: mol_type = genomic DNA
  misc_feature 1..3884: note = cDNA of KCNH2 gene SNP c.2729C>T (p.Pro910Leu)
atgccggtgcggaggggccacgtcgcgccgcagaacaccttcctggacaccatcatccgcaagtttgagggccagagccgtaagttcatcatcgccaacgctcgggtggagaactgcgccgtcatctactgcaacgacggcttctgcgagctgtgcggctactcgcgggccgaggtgatgcagcgaccctgcacctgcgacttcctgcacgggccgcgcacgcagcgccgcgctgccgcgcagatcgcgcaggcactgctgggcgccgaggagcgcaaagtggaaatcgccttctaccggaaagatgggagctgcttcctatgtctggtggatgtggtgcccgtgaagaacgaggatggggctgtcatcatgttcatcctcaatttcgaggtggtgatggagaaggacatggtggggtccccggctcatgacaccaaccaccggggcccccccaccagctggctggccccaggccgcgccaagaccttccgcctgaagctgcccgcgctgctggcgctgacggcccgggagtcgtcggtgcggtcgggcggcgcgggcggcgcgggcgccccgggggccgtggtggtggacgtggacctgacgcccgcggcacccagcagcgagtcgctggccctggacgaagtgacagccatggacaaccacgtggcagggctcgggcccgcggaggagcggcgtgcgctggtgggtcccggctctccgccccgcagcgcgcccggccagctcccatcgccccgggcgcacagcctcaaccccgacgcctcgggctccagctgcagcctggcccggacgcgctcccgagaaagctgcgccagcgtgcgccgcgcctcgtcggccgacgacatcgaggccatgcgcgccggggtgctgcccccgccaccgcgccacgccagcaccggggccatgcacccactgcgcagcggcttgctcaactccacctcggactccgacctcgtgcgctaccgcaccattagcaagattccccaaatcaccctcaactttgtggacctcaagggcgaccccttcttggcttcgcccaccagtgaccgtgagatcatagcacctaagataaaggagcgaacccacaatgtcactgagaaggtcacccaggtcctgtccctgggcgccgacgtgctgcctgagtacaagctgcaggcaccgcgcatccaccgctggaccatcctgcattacagccccttcaaggccgtgtgggactggctcatcctgctgctggtcatctacacggctgtcttcacaccctactcggctgccttcctgctgaaggagacggaagaaggcccgcctgctaccgagtgtggctacgcctgccagccgctggctgtggtggacctcatcgtggacatcatgttcattgtggacatcctcatcaacttccgcaccacctacgtcaatgccaacgaggaggtggtcagccaccccggccgcatcgccgtccactacttcaagggctggttcctcatcgacatggtggccgccatccccttcgacctgctcatcttcggctctggctctgaggagctgatcgggctgctgaagactgcgcggctgctgcggctggtgcgcgtggcgcggaagctggatcgctactcagagtacggcgcggccgtgctgttcttgctcatgtgcacctttgcgctcatcgcgcactggctagcctgcatctggtacgccatcggcaacatggagcagccacacatggactcacgcatcggctggctgcacaacctgggcgaccagataggcaaaccctacaacagcagcggcctgggcggcccctccatcaaggacaagtatgtgacggcgctctacttcaccttcagcagcctcaccagtgtgggcttcggcaacgtctctcccaacaccaactcagagaagatcttctccatctgcgtcatgctcattggctccctcatgtatgctagcatcttcggcaacgtgtcggccatcatccagcggctgtactcgggcacagcccgctaccacacacagatgctgcgggtgcgggagttcatccgcttccaccagatccccaatcccctgcgccagcgcctcgaggagtacttccagcacgcctggtcctacaccaacggcatcgacatgaacgcggtgctgaagggcttccctgagtgcctgcaggctgacatctgcctgcacctgaaccgctcactgctgcagcactgcaaacccttccgaggggccaccaagggctgccttcgggccctggccatgaagttcaagaccacacatgcaccgccaggggacacactggtgcatgctggggacctgctcaccgccctgtacttcatctcccggggctccatcgagatcctgcggggcgacgtcgtcgtggccatcctggggaagaatgacatctttggggagcctctgaacctgtatgcaaggcctggcaagtcgaacggggatgtgcgggccctcacctactgtgacctacacaagatccatcgggacgacctgctggaggtgctggacatgtaccctgagttctccgaccacttctggtccagcctggagatcaccttcaacctgcgagataccaacatgatcccgggctcccccggcagtacggagttagagggtggcttcagtcggcaacgcaagcgcaagttgtccttccgcaggcgcacggacaaggacacggagcagccaggggaggtgtcggccttggggctgggccgggcgggggcagggccgagtagccggggccggccgggggggccgtggggggagagcccgtccagtggcccctccagccctgagagcagtgaggatgagggcccaggccgcagctccagccccctccgcctggtgcccttctccagccccaggccccccggagagccgccgggtggggagcccctgatggaggactgcgagaagagcagcgacacttgcaaccccctgtcaggcgccttctcaggagtgtccaacattttcagcttctggggggacagtcggggccgccagtaccaggagctccctcgatgccccgcccccacccccagcctcctcaacatccccctctccagcccgggtcggcggccccggggcgacgtggagagcaggctggatgccctccagcgccagctcaacaggctggagacccggctgagtgcagacatggccactgtcctgcagctgctacagaggcagatgacgctggtcccgcccgcctacagtgctgtgaccaccccggggcctggccccacttccacatccccgctgttgcccgtcagccccctccccaccctcaccttggactcgctttctcaggtttcccagttcatggcgtgtgaggagctgcccccgggggccccagagcttccccaagaaggccccacacgacgcctctccctaccgggccagctgggggccctcacctcccagcccctgcacagacacggctcggacccgggcagttagtggggctgcccagtgtggacacgtggctcacccagggatcaaggcgctgctgggccgctccccttggaggccctgctcaggaggccctgaccgtggaaggggagaggaactcgaaagcacagctcctcccccagcccttgggaccatcttctcctgcagtcccctgggccccagtgagaggggcaggggcagggccggcagtaggtggggcctgtggtccccccactgccctgagggcattagctggtctaactgcccggaggcacccggccctgggccttaggcacctcaaggacttttctgctatttactgctcttattgttaaggataataattaaggatcatatgaataattaatgaagatgctgatgactatgaataataaataattatcctgaggaga

SEQ ID NO: 623 - DNA, 3884 bp, Homo sapiens
  source 1..3884: mol_type = genomic DNA
  misc_feature 1..3884: note = cDNA of KCNH2 gene SNP c.2731G>C (p.Gly911Arg)
atgccggtgcggaggggccacgtcgcgccgcagaacaccttcctggacaccatcatccgcaagtttgagggccagagccgtaagttcatcatcgccaacgctcgggtggagaactgcgccgtcatctactgcaacgacggcttctgcgagctgtgcggctactcgcgggccgaggtgatgcagcgaccctgcacctgcgacttcctgcacgggccgcgcacgcagcgccgcgctgccgcgcagatcgcgcaggcactgctgggcgccgaggagcgcaaagtggaaatcgccttctaccggaaagatgggagctgcttcctatgtctggtggatgtggtgcccgtgaagaacgaggatggggctgtcatcatgttcatcctcaatttcgaggtggtgatggagaaggacatggtggggtccccggctcatgacaccaaccaccggggcccccccaccagctggctggccccaggccgcgccaagaccttccgcctgaagctgcccgcgctgctggcgctgacggcccgggagtcgtcggtgcggtcgggcggcgcgggcggcgcgggcgccccgggggccgtggtggtggacgtggacctgacgcccgcggcacccagcagcgagtcgctggccctggacgaagtgacagccatggacaaccacgtggcagggctcgggcccgcggaggagcggcgtgcgctggtgggtcccggctctccgccccgcagcgcgcccggccagctcccatcgccccgggcgcacagcctcaaccccgacgcctcgggctccagctgcagcctggcccggacgcgctcccgagaaagctgcgccagcgtgcgccgcgcctcgtcggccgacgacatcgaggccatgcgcgccggggtgctgcccccgccaccgcgccacgccagcaccggggccatgcacccactgcgcagcggcttgctcaactccacctcggactccgacctcgtgcgctaccgcaccattagcaagattccccaaatcaccctcaactttgtggacctcaagggcgaccccttcttggcttcgcccaccagtgaccgtgagatcatagcacctaagataaaggagcgaacccacaatgtcactgagaaggtcacccaggtcctgtccctgggcgccgacgtgctgcctgagtacaagctgcaggcaccgcgcatccaccgctggaccatcctgcattacagccccttcaaggccgtgtgggactggctcatcctgctgctggtcatctacacggctgtcttcacaccctactcggctgccttcctgctgaaggagacggaagaaggcccgcctgctaccgagtgtggctacgcctgccagccgctggctgtggtggacctcatcgtggacatcatgttcattgtggacatcctcatcaacttccgcaccacctacgtcaatgccaacgaggaggtggtcagccaccccggccgcatcgccgtccactacttcaagggctggttcctcatcgacatggtggccgccatccccttcgacctgctcatcttcggctctggctctgaggagctgatcgggctgctgaagactgcgcggctgctgcggctggtgcgcgtggcgcggaagctggatcgctactcagagtacggcgcggccgtgctgttcttgctcatgtgcacctttgcgctcatcgcgcactggctagcctgcatctggtacgccatcggcaacatggagcagccacacatggactcacgcatcggctggctgcacaacctgggcgaccagataggcaaaccctacaacagcagcggcctgggcggcccctccatcaaggacaagtatgtgacggcgctctacttcaccttcagcagcctcaccagtgtgggcttcggcaacgtctctcccaacaccaactcagagaagatcttctccatctgcgtcatgctcattggctccctcatgtatgctagcatcttcggcaacgtgtcggccatcatccagcggctgtactcgggcacagcccgctaccacacacagatgctgcgggtgcgggagttcatccgcttccaccagatccccaatcccctgcgccagcgcctcgaggagtacttccagcacgcctggtcctacaccaacggcatcgacatgaacgcggtgctgaagggcttccctgagtgcctgcaggctgacatctgcctgcacctgaaccgctcactgctgcagcactgcaaacccttccgaggggccaccaagggctgccttcgggccctggccatgaagttcaagaccacacatgcaccgccaggggacacactggtgcatgctggggacctgctcaccgccctgtacttcatctcccggggctccatcgagatcctgcggggcgacgtcgtcgtggccatcctggggaagaatgacatctttggggagcctctgaacctgtatgcaaggcctggcaagtcgaacggggatgtgcgggccctcacctactgtgacctacacaagatccatcgggacgacctgctggaggtgctggacatgtaccctgagttctccgaccacttctggtccagcctggagatcaccttcaacctgcgagataccaacatgatcccgggctcccccggcagtacggagttagagggtggcttcagtcggcaacgcaagcgcaagttgtccttccgcaggcgcacggacaaggacacggagcagccaggggaggtgtcggccttggggccgcgccgggcgggggcagggccgagtagccggggccggccgggggggccgtggggggagagcccgtccagtggcccctccagccctgagagcagtgaggatgagggcccaggccgcagctccagccccctccgcctggtgcccttctccagccccaggccccccggagagccgccgggtggggagcccctgatggaggactgcgagaagagcagcgacacttgcaaccccctgtcaggcgccttctcaggagtgtccaacattttcagcttctggggggacagtcggggccgccagtaccaggagctccctcgatgccccgcccccacccccagcctcctcaacatccccctctccagcccgggtcggcggccccggggcgacgtggagagcaggctggatgccctccagcgccagctcaacaggctggagacccggctgagtgcagacatggccactgtcctgcagctgctacagaggcagatgacgctggtcccgcccgcctacagtgctgtgaccaccccggggcctggccccacttccacatccccgctgttgcccgtcagccccctccccaccctcaccttggactcgctttctcaggtttcccagttcatggcgtgtgaggagctgcccccgggggccccagagcttccccaagaaggccccacacgacgcctctccctaccgggccagctgggggccctcacctcccagcccctgcacagacacggctcggacccgggcagttagtggggctgcccagtgtggacacgtggctcacccagggatcaaggcgctgctgggccgctccccttggaggccctgctcaggaggccctgaccgtggaaggggagaggaactcgaaagcacagctcctcccccagcccttgggaccatcttctcctgcagtcccctgggccccagtgagaggggcaggggcagggccggcagtaggtggggcctgtggtccccccactgccctgagggcattagctggtctaactgcccggaggcacccggccctgggccttaggcacctcaaggacttttctgctatttactgctcttattgttaaggataataattaaggatcatatgaataattaatgaagatgctgatgactatgaataataaataattatcctgaggaga

SEQ ID NO: 624 - DNA, 3884 bp, Homo sapiens
  source 1..3884: mol_type = genomic DNA
  misc_feature 1..3884: note = cDNA of KCNH2 gene SNP c.2734C>T (p.Arg912Trp)
atgccggtgcggaggggccacgtcgcgccgcagaacaccttcctggacaccatcatccgcaagtttgagggccagagccgtaagttcatcatcgccaacgctcgggtggagaactgcgccgtcatctactgcaacgacggcttctgcgagctgtgcggctactcgcgggccgaggtgatgcagcgaccctgcacctgcgacttcctgcacgggccgcgcacgcagcgccgcgctgccgcgcagatcgcgcaggcactgctgggcgccgaggagcgcaaagtggaaatcgccttctaccggaaagatgggagctgcttcctatgtctggtggatgtggtgcccgtgaagaacgaggatggggctgtcatcatgttcatcctcaatttcgaggtggtgatggagaaggacatggtggggtccccggctcatgacaccaaccaccggggcccccccaccagctggctggccccaggccgcgccaagaccttccgcctgaagctgcccgcgctgctggcgctgacggcccgggagtcgtcggtgcggtcgggcggcgcgggcggcgcgggcgccccgggggccgtggtggtggacgtggacctgacgcccgcggcacccagcagcgagtcgctggccctggacgaagtgacagccatggacaaccacgtggcagggctcgggcccgcggaggagcggcgtgcgctggtgggtcccggctctccgccccgcagcgcgcccggccagctcccatcgccccgggcgcacagcctcaaccccgacgcctcgggctccagctgcagcctggcccggacgcgctcccgagaaagctgcgccagcgtgcgccgcgcctcgtcggccgacgacatcgaggccatgcgcgccggggtgctgcccccgccaccgcgccacgccagcaccggggccatgcacccactgcgcagcggcttgctcaactccacctcggactccgacctcgtgcgctaccgcaccattagcaagattccccaaatcaccctcaactttgtggacctcaagggcgaccccttcttggcttcgcccaccagtgaccgtgagatcatagcacctaagataaaggagcgaacccacaatgtcactgagaaggtcacccaggtcctgtccctgggcgccgacgtgctgcctgagtacaagctgcaggcaccgcgcatccaccgctggaccatcctgcattacagccccttcaaggccgtgtgggactggctcatcctgctgctggtcatctacacggctgtcttcacaccctactcggctgccttcctgctgaaggagacggaagaaggcccgcctgctaccgagtgtggctacgcctgccagccgctggctgtggtggacctcatcgtggacatcatgttcattgtggacatcctcatcaacttccgcaccacctacgtcaatgccaacgaggaggtggtcagccaccccggccgcatcgccgtccactacttcaagggctggttcctcatcgacatggtggccgccatccccttcgacctgctcatcttcggctctggctctgaggagctgatcgggctgctgaagactgcgcggctgctgcggctggtgcgcgtggcgcggaagctggatcgctactcagagtacggcgcggccgtgctgttcttgctcatgtgcacctttgcgctcatcgcgcactggctagcctgcatctggtacgccatcggcaacatggagcagccacacatggactcacgcatcggctggctgcacaacctgggcgaccagataggcaaaccctacaacagcagcggcctgggcggcccctccatcaaggacaagtatgtgacggcgctctacttcaccttcagcagcctcaccagtgtgggcttcggcaacgtctctcccaacaccaactcagagaagatcttctccatctgcgtcatgctcattggctccctcatgtatgctagcatcttcggcaacgtgtcggccatcatccagcggctgtactcgggcacagcccgctaccacacacagatgctgcgggtgcgggagttcatccgcttccaccagatccccaatcccctgcgccagcgcctcgaggagtacttccagcacgcctggtcctacaccaacggcatcgacatgaacgcggtgctgaagggcttccctgagtgcctgcaggctgacatctgcctgcacctgaaccgctcactgctgcagcactgcaaacccttccgaggggccaccaagggctgccttcgggccctggccatgaagttcaagaccacacatgcaccgccaggggacacactggtgcatgctggggacctgctcaccgccctgtacttcatctcccggggctccatcgagatcctgcggggcgacgtcgtcgtggccatcctggggaagaatgacatctttggggagcctctgaacctgtatgcaaggcctggcaagtcgaacggggatgtgcgggccctcacctactgtgacctacacaagatccatcgggacgacctgctggaggtgctggacatgtaccctgagttctccgaccacttctggtccagcctggagatcaccttcaacctgcgagataccaacatgatcccgggctcccccggcagtacggagttagagggtggcttcagtcggcaacgcaagcgcaagttgtccttccgcaggcgcacggacaaggacacggagcagccaggggaggtgtcggccttggggccgggctgggcgggggcagggccgagtagccggggccggccgggggggccgtggggggagagcccgtccagtggcccctccagccctgagagcagtgaggatgagggcccaggccgcagctccagccccctccgcctggtgcccttctccagccccaggccccccggagagccgccgggtggggagcccctgatggaggactgcgagaagagcagcgacacttgcaaccccctgtcaggcgccttctcaggagtgtccaacattttcagcttctggggggacagtcggggccgccagtaccaggagctccctcgatgccccgcccccacccccagcctcctcaacatccccctctccagcccgggtcggcggccccggggcgacgtggagagcaggctggatgccctccagcgccagctcaacaggctggagacccggctgagtgcagacatggccactgtcctgcagctgctacagaggcagatgacgctggtcccgcccgcctacagtgctgtgaccaccccggggcctggccccacttccacatccccgctgttgcccgtcagccccctccccaccctcaccttggactcgctttctcaggtttcccagttcatggcgtgtgaggagctgcccccgggggccccagagcttccccaagaaggccccacacgacgcctctccctaccgggccagctgggggccctcacctcccagcccctgcacagacacggctcggacccgggcagttagtggggctgcccagtgtggacacgtggctcacccagggatcaaggcgctgctgggccgctccccttggaggccctgctcaggaggccctgaccgtggaaggggagaggaactcgaaagcacagctcctcccccagcccttgggaccatcttctcctgcagtcccctgggccccagtgagaggggcaggggcagggccggcagtaggtggggcctgtggtccccccactgccctgagggcattagctggtctaactgcccggaggcacccggccctgggccttaggcacctcaaggacttttctgctatttactgctcttattgttaaggataataattaaggatcatatgaataattaatgaagatgctgatgactatgaataataaataattatcctgaggaga

SEQ ID NO: 625 - DNA, 3884 bp, Homo sapiens
  source 1..3884: mol_type = genomic DNA
  misc_feature 1..3884: note = cDNA of KCNH2 gene SNP c.2735G>A (p.Arg912Gln)
atgccggtgcggaggggccacgtcgcgccgcagaacaccttcctggacaccatcatccgcaagtttgagggccagagccgtaagttcatcatcgccaacgctcgggtggagaactgcgccgtcatctactgcaacgacggcttctgcgagctgtgcggctactcgcgggccgaggtgatgcagcgaccctgcacctgcgacttcctgcacgggccgcgcacgcagcgccgcgctgccgcgcagatcgcgcaggcactgctgggcgccgaggagcgcaaagtggaaatcgccttctaccggaaagatgggagctgcttcctatgtctggtggatgtggtgcccgtgaagaacgaggatggggctgtcatcatgttcatcctcaatttcgaggtggtgatggagaaggacatggtggggtccccggctcatgacaccaaccaccggggcccccccaccagctggctggccccaggccgcgccaagaccttccgcctgaagctgcccgcgctgctggcgctgacggcccgggagtcgtcggtgcggtcgggcggcgcgggcggcgcgggcgccccgggggccgtggtggtggacgtggacctgacgcccgcggcacccagcagcgagtcgctggccctggacgaagtgacagccatggacaaccacgtggcagggctcgggcccgcggaggagcggcgtgcgctggtgggtcccggctctccgccccgcagcgcgcccggccagctcccatcgccccgggcgcacagcctcaaccccgacgcctcgggctccagctgcagcctggcccggacgcgctcccgagaaagctgcgccagcgtgcgccgcgcctcgtcggccgacgacatcgaggccatgcgcgccggggtgctgcccccgccaccgcgccacgccagcaccggggccatgcacccactgcgcagcggcttgctcaactccacctcggactccgacctcgtgcgctaccgcaccattagcaagattccccaaatcaccctcaactttgtggacctcaagggcgaccccttcttggcttcgcccaccagtgaccgtgagatcatagcacctaagataaaggagcgaacccacaatgtcactgagaaggtcacccaggtcctgtccctgggcgccgacgtgctgcctgagtacaagctgcaggcaccgcgcatccaccgctggaccatcctgcattacagccccttcaaggccgtgtgggactggctcatcctgctgctggtcatctacacggctgtcttcacaccctactcggctgccttcctgctgaaggagacggaagaaggcccgcctgctaccgagtgtggctacgcctgccagccgctggctgtggtggacctcatcgtggacatcatgttcattgtggacatcctcatcaacttccgcaccacctacgtcaatgccaacgaggaggtggtcagccaccccggccgcatcgccgtccactacttcaagggctggttcctcatcgacatggtggccgccatccccttcgacctgctcatcttcggctctggctctgaggagctgatcgggctgctgaagactgcgcggctgctgcggctggtgcgcgtggcgcggaagctggatcgctactcagagtacggcgcggccgtgctgttcttgctcatgtgcacctttgcgctcatcgcgcactggctagcctgcatctggtacgccatcggcaacatggagcagccacacatggactcacgcatcggctggctgcacaacctgggcgaccagataggcaaaccctacaacagcagcggcctgggcggcccctccatcaaggacaagtatgtgacggcgctctacttcaccttcagcagcctcaccagtgtgggcttcggcaacgtctctcccaacaccaactcagagaagatcttctccatctgcgtcatgctcattggctccctcatgtatgctagcatcttcggcaacgtgtcggccatcatccagcggctgtactcgggcacagcccgctaccacacacagatgctgcgggtgcgggagttcatccgcttccaccagatccccaatcccctgcgccagcgcctcgaggagtacttccagcacgcctggtcctacaccaacggcatcgacatgaacgcggtgctgaagggcttccctgagtgcctgcaggctgacatctgcctgcacctgaaccgctcactgctgcagcactgcaaacccttccgaggggccaccaagggctgccttcgggccctggccatgaagttcaagaccacacatgcaccgccaggggacacactggtgcatgctggggacctgctcaccgccctgtacttcatctcccggggctccatcgagatcctgcggggcgacgtcgtcgtggccatcctggggaagaatgacatctttggggagcctctgaacctgtatgcaaggcctggcaagtcgaacggggatgtgcgggccctcacctactgtgacctacacaagatccatcgggacgacctgctggaggtgctggacatgtaccctgagttctccgaccacttctggtccagcctggagatcaccttcaacctgcgagataccaacatgatcccgggctcccccggcagtacggagttagagggtggcttcagtcggcaacgcaagcgcaagttgtccttccgcaggcgcacggacaaggacacggagcagccaggggaggtgtcggccttggggccgggccaggcgggggcagggccgagtagccggggccggccgggggggccgtggggggagagcccgtccagtggcccctccagccctgagagcagtgaggatgagggcccaggccgcagctccagccccctccgcctggtgcccttctccagccccaggccccccggagagccgccgggtggggagcccctgatggaggactgcgagaagagcagcgacacttgcaaccccctgtcaggcgccttctcaggagtgtccaacattttcagcttctggggggacagtcggggccgccagtaccaggagctccctcgatgccccgcccccacccccagcctcctcaacatccccctctccagcccgggtcggcggccccggggcgacgtggagagcaggctggatgccctccagcgccagctcaacaggctggagacccggctgagtgcagacatggccactgtcctgcagctgctacagaggcagatgacgctggtcccgcccgcctacagtgctgtgaccaccccggggcctggccccacttccacatccccgctgttgcccgtcagccccctccccaccctcaccttggactcgctttctcaggtttcccagttcatggcgtgtgaggagctgcccccgggggccccagagcttccccaagaaggccccacacgacgcctctccctaccgggccagctgggggccctcacctcccagcccctgcacagacacggctcggacccgggcagttagtggggctgcccagtgtggacacgtggctcacccagggatcaaggcgctgctgggccgctccccttggaggccctgctcaggaggccctgaccgtggaaggggagaggaactcgaaagcacagctcctcccccagcccttgggaccatcttctcctgcagtcccctgggccccagtgagaggggcaggggcagggccggcagtaggtggggcctgtggtccccccactgccctgagggcattagctggtctaactgcccggaggcacccggccctgggccttaggcacctcaaggacttttctgctatttactgctcttattgttaaggataataattaaggatcatatgaataattaatgaagatgctgatgactatgaataataaataattatcctgaggaga

SEQ ID NO: 626 - DNA, 3884 bp, Homo sapiens
  source 1..3884: mol_type = genomic DNA
  misc_feature 1..3884: note = cDNA of KCNH2 gene SNP c.2737G>A (p.Ala913Thr)
atgccggtgcggaggggccacgtcgcgccgcagaacaccttcctggacaccatcatccgcaagtttgagggccagagccgtaagttcatcatcgccaacgctcgggtggagaactgcgccgtcatctactgcaacgacggcttctgcgagctgtgcggctactcgcgggccgaggtgatgcagcgaccctgcacctgcgacttcctgcacgggccgcgcacgcagcgccgcgctgccgcgcagatcgcgcaggcactgctgggcgccgaggagcgcaaagtggaaatcgccttctaccggaaagatgggagctgcttcctatgtctggtggatgtggtgcccgtgaagaacgaggatggggctgtcatcatgttcatcctcaatttcgaggtggtgatggagaaggacatggtggggtccccggctcatgacaccaaccaccggggcccccccaccagctggctggccccaggccgcgccaagaccttccgcctgaagctgcccgcgctgctggcgctgacggcccgggagtcgtcggtgcggtcgggcggcgcgggcggcgcgggcgccccgggggccgtggtggtggacgtggacctgacgcccgcggcacccagcagcgagtcgctggccctggacgaagtgacagccatggacaaccacgtggcagggctcgggcccgcggaggagcggcgtgcgctggtgggtcccggctctccgccccgcagcgcgcccggccagctcccatcgccccgggcgcacagcctcaaccccgacgcctcgggctccagctgcagcctggcccggacgcgctcccgagaaagctgcgccagcgtgcgccgcgcctcgtcggccgacgacatcgaggccatgcgcgccggggtgctgcccccgccaccgcgccacgccagcaccggggccatgcacccactgcgcagcggcttgctcaactccacctcggactccgacctcgtgcgctaccgcaccattagcaagattccccaaatcaccctcaactttgtggacctcaagggcgaccccttcttggcttcgcccaccagtgaccgtgagatcatagcacctaagataaaggagcgaacccacaatgtcactgagaaggtcacccaggtcctgtccctgggcgccgacgtgctgcctgagtacaagctgcaggcaccgcgcatccaccgctggaccatcctgcattacagccccttcaaggccgtgtgggactggctcatcctgctgctggtcatctacacggctgtcttcacaccctactcggctgccttcctgctgaaggagacggaagaaggcccgcctgctaccgagtgtggctacgcctgccagccgctggctgtggtggacctcatcgtggacatcatgttcattgtggacatcctcatcaacttccgcaccacctacgtcaatgccaacgaggaggtggtcagccaccccggccgcatcgccgtccactacttcaagggctggttcctcatcgacatggtggccgccatccccttcgacctgctcatcttcggctctggctctgaggagctgatcgggctgctgaagactgcgcggctgctgcggctggtgcgcgtggcgcggaagctggatcgctactcagagtacggcgcggccgtgctgttcttgctcatgtgcacctttgcgctcatcgcgcactggctagcctgcatctggtacgccatcggcaacatggagcagccacacatggactcacgcatcggctggctgcacaacctgggcgaccagataggcaaaccctacaacagcagcggcctgggcggcccctccatcaaggacaagtatgtgacggcgctctacttcaccttcagcagcctcaccagtgtgggcttcggcaacgtctctcccaacaccaactcagagaagatcttctccatctgcgtcatgctcattggctccctcatgtatgctagcatcttcggcaacgtgtcggccatcatccagcggctgtactcgggcacagcccgctaccacacacagatgctgcgggtgcgggagttcatccgcttccaccagatccccaatcccctgcgccagcgcctcgaggagtacttccagcacgcctggtcctacaccaacggcatcgacatgaacgcggtgctgaagggcttccctgagtgcctgcaggctgacatctgcctgcacctgaaccgctcactgctgcagcactgcaaacccttccgaggggccaccaagggctgccttcgggccctggccatgaagttcaagaccacacatgcaccgccaggggacacactggtgcatgctggggacctgctcaccgccctgtacttcatctcccggggctccatcgagatcctgcggggcgacgtcgtcgtggccatcctggggaagaatgacatctttggggagcctctgaacctgtatgcaaggcctggcaagtcgaacggggatgtgcgggccctcacctactgtgacctacacaagatccatcgggacgacctgctggaggtgctggacatgtaccctgagttctccgaccacttctggtccagcctggagatcaccttcaacctgcgagataccaacatgatcccgggctcccccggcagtacggagttagagggtggcttcagtcggcaacgcaagcgcaagttgtccttccgcaggcgcacggacaaggacacggagcagccaggggaggtgtcggccttggggccgggccggacgggggcagggccgagtagccggggccggccgggggggccgtggggggagagcccgtccagtggcccctccagccctgagagcagtgaggatgagggcccaggccgcagctccagccccctccgcctggtgcccttctccagccccaggccccccggagagccgccgggtggggagcccctgatggaggactgcgagaagagcagcgacacttgcaaccccctgtcaggcgccttctcaggagtgtccaacattttcagcttctggggggacagtcggggccgccagtaccaggagctccctcgatgccccgcccccacccccagcctcctcaacatccccctctccagcccgggtcggcggccccggggcgacgtggagagcaggctggatgccctccagcgccagctcaacaggctggagacccggctgagtgcagacatggccactgtcctgcagctgctacagaggcagatgacgctggtcccgcccgcctacagtgctgtgaccaccccggggcctggccccacttccacatccccgctgttgcccgtcagccccctccccaccctcaccttggactcgctttctcaggtttcccagttcatggcgtgtgaggagctgcccccgggggccccagagcttccccaagaaggccccacacgacgcctctccctaccgggccagctgggggccctcacctcccagcccctgcacagacacggctcggacccgggcagttagtggggctgcccagtgtggacacgtggctcacccagggatcaaggcgctgctgggccgctccccttggaggccctgctcaggaggccctgaccgtggaaggggagaggaactcgaaagcacagctcctcccccagcccttgggaccatcttctcctgcagtcccctgggccccagtgagaggggcaggggcagggccggcagtaggtggggcctgtggtccccccactgccctgagggcattagctggtctaactgcccggaggcacccggccctgggccttaggcacctcaaggacttttctgctatttactgctcttattgttaaggataataattaaggatcatatgaataattaatgaagatgctgatgactatgaataataaataattatcctgaggaga

SEQ ID NO: 627 - DNA, 3884 bp, Homo sapiens
  source 1..3884: mol_type = genomic DNA
  misc_feature 1..3884: note = cDNA of KCNH2 gene SNP c.2738C>T (p.Ala913Val)
atgccggtgcggaggggccacgtcgcgccgcagaacaccttcctggacaccatcatccgcaagtttgagggccagagccgtaagttcatcatcgccaacgctcgggtggagaactgcgccgtcatctactgcaacgacggcttctgcgagctgtgcggctactcgcgggccgaggtgatgcagcgaccctgcacctgcgacttcctgcacgggccgcgcacgcagcgccgcgctgccgcgcagatcgcgcaggcactgctgggcgccgaggagcgcaaagtggaaatcgccttctaccggaaagatgggagctgcttcctatgtctggtggatgtggtgcccgtgaagaacgaggatggggctgtcatcatgttcatcctcaatttcgaggtggtgatggagaaggacatggtggggtccccggctcatgacaccaaccaccggggcccccccaccagctggctggccccaggccgcgccaagaccttccgcctgaagctgcccgcgctgctggcgctgacggcccgggagtcgtcggtgcggtcgggcggcgcgggcggcgcgggcgccccgggggccgtggtggtggacgtggacctgacgcccgcggcacccagcagcgagtcgctggccctggacgaagtgacagccatggacaaccacgtggcagggctcgggcccgcggaggagcggcgtgcgctggtgggtcccggctctccgccccgcagcgcgcccggccagctcccatcgccccgggcgcacagcctcaaccccgacgcctcgggctccagctgcagcctggcccggacgcgctcccgagaaagctgcgccagcgtgcgccgcgcctcgtcggccgacgacatcgaggccatgcgcgccggggtgctgcccccgccaccgcgccacgccagcaccggggccatgcacccactgcgcagcggcttgctcaactccacctcggactccgacctcgtgcgctaccgcaccattagcaagattccccaaatcaccctcaactttgtggacctcaagggcgaccccttcttggcttcgcccaccagtgaccgtgagatcatagcacctaagataaaggagcgaacccacaatgtcactgagaaggtcacccaggtcctgtccctgggcgccgacgtgctgcctgagtacaagctgcaggcaccgcgcatccaccgctggaccatcctgcattacagccccttcaaggccgtgtgggactggctcatcctgctgctggtcatctacacggctgtcttcacaccctactcggctgccttcctgctgaaggagacggaagaaggcccgcctgctaccgagtgtggctacgcctgccagccgctggctgtggtggacctcatcgtggacatcatgttcattgtggacatcctcatcaacttccgcaccacctacgtcaatgccaacgaggaggtggtcagccaccccggccgcatcgccgtccactacttcaagggctggttcctcatcgacatggtggccgccatccccttcgacctgctcatcttcggctctggctctgaggagctgatcgggctgctgaagactgcgcggctgctgcggctggtgcgcgtggcgcggaagctggatcgctactcagagtacggcgcggccgtgctgttcttgctcatgtgcacctttgcgctcatcgcgcactggctagcctgcatctggtacgccatcggcaacatggagcagccacacatggactcacgcatcggctggctgcacaacctgggcgaccagataggcaaaccctacaacagcagcggcctgggcggcccctccatcaaggacaagtatgtgacggcgctctacttcaccttcagcagcctcaccagtgtgggcttcggcaacgtctctcccaacaccaactcagagaagatcttctccatctgcgtcatgctcattggctccctcatgtatgctagcatcttcggcaacgtgtcggccatcatccagcggctgtactcgggcacagcccgctaccacacacagatgctgcgggtgcgggagttcatccgcttccaccagatccccaatcccctgcgccagcgcctcgaggagtacttccagcacgcctggtcctacaccaacggcatcgacatgaacgcggtgctgaagggcttccctgagtgcctgcaggctgacatctgcctgcacctgaaccgctcactgctgcagcactgcaaacccttccgaggggccaccaagggctgccttcgggccctggccatgaagttcaagaccacacatgcaccgccaggggacacactggtgcatgctggggacctgctcaccgccctgtacttcatctcccggggctccatcgagatcctgcggggcgacgtcgtcgtggccatcctggggaagaatgacatctttggggagcctctgaacctgtatgcaaggcctggcaagtcgaacggggatgtgcgggccctcacctactgtgacctacacaagatccatcgggacgacctgctggaggtgctggacatgtaccctgagttctccgaccacttctggtccagcctggagatcaccttcaacctgcgagataccaacatgatcccgggctcccccggcagtacggagttagagggtggcttcagtcggcaacgcaagcgcaagttgtccttccgcaggcgcacggacaaggacacggagcagccaggggaggtgtcggccttggggccgggccgggtgggggcagggccgagtagccggggccggccgggggggccgtggggggagagcccgtccagtggcccctccagccctgagagcagtgaggatgagggcccaggccgcagctccagccccctccgcctggtgcccttctccagccccaggccccccggagagccgccgggtggggagcccctgatggaggactgcgagaagagcagcgacacttgcaaccccctgtcaggcgccttctcaggagtgtccaacattttcagcttctggggggacagtcggggccgccagtaccaggagctccctcgatgccccgcccccacccccagcctcctcaacatccccctctccagcccgggtcggcggccccggggcgacgtggagagcaggctggatgccctccagcgccagctcaacaggctggagacccggctgagtgcagacatggccactgtcctgcagctgctacagaggcagatgacgctggtcccgcccgcctacagtgctgtgaccaccccggggcctggccccacttccacatccccgctgttgcccgtcagccccctccccaccctcaccttggactcgctttctcaggtttcccagttcatggcgtgtgaggagctgcccccgggggccccagagcttccccaagaaggccccacacgacgcctctccctaccgggccagctgggggccctcacctcccagcccctgcacagacacggctcggacccgggcagttagtggggctgcccagtgtggacacgtggctcacccagggatcaaggcgctgctgggccgctccccttggaggccctgctcaggaggccctgaccgtggaaggggagaggaactcgaaagcacagctcctcccccagcccttgggaccatcttctcctgcagtcccctgggccccagtgagaggggcaggggcagggccggcagtaggtggggcctgtggtccccccactgccctgagggcattagctggtctaactgcccggaggcacccggccctgggccttaggcacctcaaggacttttctgctatttactgctcttattgttaaggataataattaaggatcatatgaataattaatgaagatgctgatgactatgaataataaataattatcctgaggaga

SEQ ID NO: 628 - DNA, 3884 bp, Homo sapiens
  source 1..3884: mol_type = genomic DNA
  misc_feature 1..3884: note = cDNA of KCNH2 gene SNP c.273G>T (p.Glu91Asp)
atgccggtgcggaggggccacgtcgcgccgcagaacaccttcctggacaccatcatccgcaagtttgagggccagagccgtaagttcatcatcgccaacgctcgggtggagaactgcgccgtcatctactgcaacgacggcttctgcgagctgtgcggctactcgcgggccgaggtgatgcagcgaccctgcacctgcgacttcctgcacgggccgcgcacgcagcgccgcgctgccgcgcagatcgcgcaggcactgctgggcgccgaggatcgcaaagtggaaatcgccttctaccggaaagatgggagctgcttcctatgtctggtggatgtggtgcccgtgaagaacgaggatggggctgtcatcatgttcatcctcaatttcgaggtggtgatggagaaggacatggtggggtccccggctcatgacaccaaccaccggggcccccccaccagctggctggccccaggccgcgccaagaccttccgcctgaagctgcccgcgctgctggcgctgacggcccgggagtcgtcggtgcggtcgggcggcgcgggcggcgcgggcgccccgggggccgtggtggtggacgtggacctgacgcccgcggcacccagcagcgagtcgctggccctggacgaagtgacagccatggacaaccacgtggcagggctcgggcccgcggaggagcggcgtgcgctggtgggtcccggctctccgccccgcagcgcgcccggccagctcccatcgccccgggcgcacagcctcaaccccgacgcctcgggctccagctgcagcctggcccggacgcgctcccgagaaagctgcgccagcgtgcgccgcgcctcgtcggccgacgacatcgaggccatgcgcgccggggtgctgcccccgccaccgcgccacgccagcaccggggccatgcacccactgcgcagcggcttgctcaactccacctcggactccgacctcgtgcgctaccgcaccattagcaagattccccaaatcaccctcaactttgtggacctcaagggcgaccccttcttggcttcgcccaccagtgaccgtgagatcatagcacctaagataaaggagcgaacccacaatgtcactgagaaggtcacccaggtcctgtccctgggcgccgacgtgctgcctgagtacaagctgcaggcaccgcgcatccaccgctggaccatcctgcattacagccccttcaaggccgtgtgggactggctcatcctgctgctggtcatctacacggctgtcttcacaccctactcggctgccttcctgctgaaggagacggaagaaggcccgcctgctaccgagtgtggctacgcctgccagccgctggctgtggtggacctcatcgtggacatcatgttcattgtggacatcctcatcaacttccgcaccacctacgtcaatgccaacgaggaggtggtcagccaccccggccgcatcgccgtccactacttcaagggctggttcctcatcgacatggtggccgccatccccttcgacctgctcatcttcggctctggctctgaggagctgatcgggctgctgaagactgcgcggctgctgcggctggtgcgcgtggcgcggaagctggatcgctactcagagtacggcgcggccgtgctgttcttgctcatgtgcacctttgcgctcatcgcgcactggctagcctgcatctggtacgccatcggcaacatggagcagccacacatggactcacgcatcggctggctgcacaacctgggcgaccagataggcaaaccctacaacagcagcggcctgggcggcccctccatcaaggacaagtatgtgacggcgctctacttcaccttcagcagcctcaccagtgtgggcttcggcaacgtctctcccaacaccaactcagagaagatcttctccatctgcgtcatgctcattggctccctcatgtatgctagcatcttcggcaacgtgtcggccatcatccagcggctgtactcgggcacagcccgctaccacacacagatgctgcgggtgcgggagttcatccgcttccaccagatccccaatcccctgcgccagcgcctcgaggagtacttccagcacgcctggtcctacaccaacggcatcgacatgaacgcggtgctgaagggcttccctgagtgcctgcaggctgacatctgcctgcacctgaaccgctcactgctgcagcactgcaaacccttccgaggggccaccaagggctgccttcgggccctggccatgaagttcaagaccacacatgcaccgccaggggacacactggtgcatgctggggacctgctcaccgccctgtacttcatctcccggggctccatcgagatcctgcggggcgacgtcgtcgtggccatcctggggaagaatgacatctttggggagcctctgaacctgtatgcaaggcctggcaagtcgaacggggatgtgcgggccctcacctactgtgacctacacaagatccatcgggacgacctgctggaggtgctggacatgtaccctgagttctccgaccacttctggtccagcctggagatcaccttcaacctgcgagataccaacatgatcccgggctcccccggcagtacggagttagagggtggcttcagtcggcaacgcaagcgcaagttgtccttccgcaggcgcacggacaaggacacggagcagccaggggaggtgtcggccttggggccgggccgggcgggggcagggccgagtagccggggccggccgggggggccgtggggggagagcccgtccagtggcccctccagccctgagagcagtgaggatgagggcccaggccgcagctccagccccctccgcctggtgcccttctccagccccaggccccccggagagccgccgggtggggagcccctgatggaggactgcgagaagagcagcgacacttgcaaccccctgtcaggcgccttctcaggagtgtccaacattttcagcttctggggggacagtcggggccgccagtaccaggagctccctcgatgccccgcccccacccccagcctcctcaacatccccctctccagcccgggtcggcggccccggggcgacgtggagagcaggctggatgccctccagcgccagctcaacaggctggagacccggctgagtgcagacatggccactgtcctgcagctgctacagaggcagatgacgctggtcccgcccgcctacagtgctgtgaccaccccggggcctggccccacttccacatccccgctgttgcccgtcagccccctccccaccctcaccttggactcgctttctcaggtttcccagttcatggcgtgtgaggagctgcccccgggggccccagagcttccccaagaaggccccacacgacgcctctccctaccgggccagctgggggccctcacctcccagcccctgcacagacacggctcggacccgggcagttagtggggctgcccagtgtggacacgtggctcacccagggatcaaggcgctgctgggccgctccccttggaggccctgctcaggaggccctgaccgtggaaggggagaggaactcgaaagcacagctcctcccccagcccttgggaccatcttctcctgcagtcccctgggccccagtgagaggggcaggggcagggccggcagtaggtggggcctgtggtccccccactgccctgagggcattagctggtctaactgcccggaggcacccggccctgggccttaggcacctcaaggacttttctgctatttactgctcttattgttaaggataataattaaggatcatatgaataattaatgaagatgctgatgactatgaataataaataattatcctgaggaga

SEQ ID NO: 629 - DNA, 3884 bp, Homo sapiens
  source 1..3884: mol_type = genomic DNA
  misc_feature 1..3884: note = cDNA of KCNH2 gene SNP c.2744C>T (p.Ala915Val)
atgccggtgcggaggggccacgtcgcgccgcagaacaccttcctggacaccatcatccgcaagtttgagggccagagccgtaagttcatcatcgccaacgctcgggtggagaactgcgccgtcatctactgcaacgacggcttctgcgagctgtgcggctactcgcgggccgaggtgatgcagcgaccctgcacctgcgacttcctgcacgggccgcgcacgcagcgccgcgctgccgcgcagatcgcgcaggcactgctgggcgccgaggagcgcaaagtggaaatcgccttctaccggaaagatgggagctgcttcctatgtctggtggatgtggtgcccgtgaagaacgaggatggggctgtcatcatgttcatcctcaatttcgaggtggtgatggagaaggacatggtggggtccccggctcatgacaccaaccaccggggcccccccaccagctggctggccccaggccgcgccaagaccttccgcctgaagctgcccgcgctgctggcgctgacggcccgggagtcgtcggtgcggtcgggcggcgcgggcggcgcgggcgccccgggggccgtggtggtggacgtggacctgacgcccgcggcacccagcagcgagtcgctggccctggacgaagtgacagccatggacaaccacgtggcagggctcgggcccgcggaggagcggcgtgcgctggtgggtcccggctctccgccccgcagcgcgcccggccagctcccatcgccccgggcgcacagcctcaaccccgacgcctcgggctccagctgcagcctggcccggacgcgctcccgagaaagctgcgccagcgtgcgccgcgcctcgtcggccgacgacatcgaggccatgcgcgccggggtgctgcccccgccaccgcgccacgccagcaccggggccatgcacccactgcgcagcggcttgctcaactccacctcggactccgacctcgtgcgctaccgcaccattagcaagattccccaaatcaccctcaactttgtggacctcaagggcgaccccttcttggcttcgcccaccagtgaccgtgagatcatagcacctaagataaaggagcgaacccacaatgtcactgagaaggtcacccaggtcctgtccctgggcgccgacgtgctgcctgagtacaagctgcaggcaccgcgcatccaccgctggaccatcctgcattacagccccttcaaggccgtgtgggactggctcatcctgctgctggtcatctacacggctgtcttcacaccctactcggctgccttcctgctgaaggagacggaagaaggcccgcctgctaccgagtgtggctacgcctgccagccgctggctgtggtggacctcatcgtggacatcatgttcattgtggacatcctcatcaacttccgcaccacctacgtcaatgccaacgaggaggtggtcagccaccccggccgcatcgccgtccactacttcaagggctggttcctcatcgacatggtggccgccatccccttcgacctgctcatcttcggctctggctctgaggagctgatcgggctgctgaagactgcgcggctgctgcggctggtgcgcgtggcgcggaagctggatcgctactcagagtacggcgcggccgtgctgttcttgctcatgtgcacctttgcgctcatcgcgcactggctagcctgcatctggtacgccatcggcaacatggagcagccacacatggactcacgcatcggctggctgcacaacctgggcgaccagataggcaaaccctacaacagcagcggcctgggcggcccctccatcaaggacaagtatgtgacggcgctctacttcaccttcagcagcctcaccagtgtgggcttcggcaacgtctctcccaacaccaactcagagaagatcttctccatctgcgtcatgctcattggctccctcatgtatgctagcatcttcggcaacgtgtcggccatcatccagcggctgtactcgggcacagcccgctaccacacacagatgctgcgggtgcgggagttcatccgcttccaccagatccccaatcccctgcgccagcgcctcgaggagtacttccagcacgcctggtcctacaccaacggcatcgacatgaacgcggtgctgaagggcttccctgagtgcctgcaggctgacatctgcctgcacctgaaccgctcactgctgcagcactgcaaacccttccgaggggccaccaagggctgccttcgggccctggccatgaagttcaagaccacacatgcaccgccaggggacacactggtgcatgctggggacctgctcaccgccctgtacttcatctcccggggctccatcgagatcctgcggggcgacgtcgtcgtggccatcctggggaagaatgacatctttggggagcctctgaacctgtatgcaaggcctggcaagtcgaacggggatgtgcgggccctcacctactgtgacctacacaagatccatcgggacgacctgctggaggtgctggacatgtaccctgagttctccgaccacttctggtccagcctggagatcaccttcaacctgcgagataccaacatgatcccgggctcccccggcagtacggagttagagggtggcttcagtcggcaacgcaagcgcaagttgtccttccgcaggcgcacggacaaggacacggagcagccaggggaggtgtcggccttggggccgggccgggcgggggtagggccgagtagccggggccggccgggggggccgtggggggagagcccgtccagtggcccctccagccctgagagcagtgaggatgagggcccaggccgcagctccagccccctccgcctggtgcccttctccagccccaggccccccggagagccgccgggtggggagcccctgatggaggactgcgagaagagcagcgacacttgcaaccccctgtcaggcgccttctcaggagtgtccaacattttcagcttctggggggacagtcggggccgccagtaccaggagctccctcgatgccccgcccccacccccagcctcctcaacatccccctctccagcccgggtcggcggccccggggcgacgtggagagcaggctggatgccctccagcgccagctcaacaggctggagacccggctgagtgcagacatggccactgtcctgcagctgctacagaggcagatgacgctggtcccgcccgcctacagtgctgtgaccaccccggggcctggccccacttccacatccccgctgttgcccgtcagccccctccccaccctcaccttggactcgctttctcaggtttcccagttcatggcgtgtgaggagctgcccccgggggccccagagcttccccaagaaggccccacacgacgcctctccctaccgggccagctgggggccctcacctcccagcccctgcacagacacggctcggacccgggcagttagtggggctgcccagtgtggacacgtggctcacccagggatcaaggcgctgctgggccgctccccttggaggccctgctcaggaggccctgaccgtggaaggggagaggaactcgaaagcacagctcctcccccagcccttgggaccatcttctcctgcagtcccctgggccccagtgagaggggcaggggcagggccggcagtaggtggggcctgtggtccccccactgccctgagggcattagctggtctaactgcccggaggcacccggccctgggccttaggcacctcaaggacttttctgctatttactgctcttattgttaaggataataattaaggatcatatgaataattaatgaagatgctgatgactatgaataataaataattatcctgaggaga

SEQ ID NO: 630 - DNA, 3884 bp, Homo sapiens
  source 1..3884: mol_type = genomic DNA
  misc_feature 1..3884: note = cDNA of KCNH2 gene SNP c.2746G>A (p.Gly916Arg)
atgccggtgcggaggggccacgtcgcgccgcagaacaccttcctggacaccatcatccgcaagtttgagggccagagccgtaagttcatcatcgccaacgctcgggtggagaactgcgccgtcatctactgcaacgacggcttctgcgagctgtgcggctactcgcgggccgaggtgatgcagcgaccctgcacctgcgacttcctgcacgggccgcgcacgcagcgccgcgctgccgcgcagatcgcgcaggcactgctgggcgccgaggagcgcaaagtggaaatcgccttctaccggaaagatgggagctgcttcctatgtctggtggatgtggtgcccgtgaagaacgaggatggggctgtcatcatgttcatcctcaatttcgaggtggtgatggagaaggacatggtggggtccccggctcatgacaccaaccaccggggcccccccaccagctggctggccccaggccgcgccaagaccttccgcctgaagctgcccgcgctgctggcgctgacggcccgggagtcgtcggtgcggtcgggcggcgcgggcggcgcgggcgccccgggggccgtggtggtggacgtggacctgacgcccgcggcacccagcagcgagtcgctggccctggacgaagtgacagccatggacaaccacgtggcagggctcgggcccgcggaggagcggcgtgcgctggtgggtcccggctctccgccccgcagcgcgcccggccagctcccatcgccccgggcgcacagcctcaaccccgacgcctcgggctccagctgcagcctggcccggacgcgctcccgagaaagctgcgccagcgtgcgccgcgcctcgtcggccgacgacatcgaggccatgcgcgccggggtgctgcccccgccaccgcgccacgccagcaccggggccatgcacccactgcgcagcggcttgctcaactccacctcggactccgacctcgtgcgctaccgcaccattagcaagattccccaaatcaccctcaactttgtggacctcaagggcgaccccttcttggcttcgcccaccagtgaccgtgagatcatagcacctaagataaaggagcgaacccacaatgtcactgagaaggtcacccaggtcctgtccctgggcgccgacgtgctgcctgagtacaagctgcaggcaccgcgcatccaccgctggaccatcctgcattacagccccttcaaggccgtgtgggactggctcatcctgctgctggtcatctacacggctgtcttcacaccctactcggctgccttcctgctgaaggagacggaagaaggcccgcctgctaccgagtgtggctacgcctgccagccgctggctgtggtggacctcatcgtggacatcatgttcattgtggacatcctcatcaacttccgcaccacctacgtcaatgccaacgaggaggtggtcagccaccccggccgcatcgccgtccactacttcaagggctggttcctcatcgacatggtggccgccatccccttcgacctgctcatcttcggctctggctctgaggagctgatcgggctgctgaagactgcgcggctgctgcggctggtgcgcgtggcgcggaagctggatcgctactcagagtacggcgcggccgtgctgttcttgctcatgtgcacctttgcgctcatcgcgcactggctagcctgcatctggtacgccatcggcaacatggagcagccacacatggactcacgcatcggctggctgcacaacctgggcgaccagataggcaaaccctacaacagcagcggcctgggcggcccctccatcaaggacaagtatgtgacggcgctctacttcaccttcagcagcctcaccagtgtgggcttcggcaacgtctctcccaacaccaactcagagaagatcttctccatctgcgtcatgctcattggctccctcatgtatgctagcatcttcggcaacgtgtcggccatcatccagcggctgtactcgggcacagcccgctaccacacacagatgctgcgggtgcgggagttcatccgcttccaccagatccccaatcccctgcgccagcgcctcgaggagtacttccagcacgcctggtcctacaccaacggcatcgacatgaacgcggtgctgaagggcttccctgagtgcctgcaggctgacatctgcctgcacctgaaccgctcactgctgcagcactgcaaacccttccgaggggccaccaagggctgccttcgggccctggccatgaagttcaagaccacacatgcaccgccaggggacacactggtgcatgctggggacctgctcaccgccctgtacttcatctcccggggctccatcgagatcctgcggggcgacgtcgtcgtggccatcctggggaagaatgacatctttggggagcctctgaacctgtatgcaaggcctggcaagtcgaacggggatgtgcgggccctcacctactgtgacctacacaagatccatcgggacgacctgctggaggtgctggacatgtaccctgagttctccgaccacttctggtccagcctggagatcaccttcaacctgcgagataccaacatgatcccgggctcccccggcagtacggagttagagggtggcttcagtcggcaacgcaagcgcaagttgtccttccgcaggcgcacggacaaggacacggagcagccaggggaggtgtcggccttggggccgggccgggcgggggcaaggccgagtagccggggccggccgggggggccgtggggggagagcccgtccagtggcccctccagccctgagagcagtgaggatgagggcccaggccgcagctccagccccctccgcctggtgcccttctccagccccaggccccccggagagccgccgggtggggagcccctgatggaggactgcgagaagagcagcgacacttgcaaccccctgtcaggcgccttctcaggagtgtccaacattttcagcttctggggggacagtcggggccgccagtaccaggagctccctcgatgccccgcccccacccccagcctcctcaacatccccctctccagcccgggtcggcggccccggggcgacgtggagagcaggctggatgccctccagcgccagctcaacaggctggagacccggctgagtgcagacatggccactgtcctgcagctgctacagaggcagatgacgctggtcccgcccgcctacagtgctgtgaccaccccggggcctggccccacttccacatccccgctgttgcccgtcagccccctccccaccctcaccttggactcgctttctcaggtttcccagttcatggcgtgtgaggagctgcccccgggggccccagagcttccccaagaaggccccacacgacgcctctccctaccgggccagctgggggccctcacctcccagcccctgcacagacacggctcggacccgggcagttagtggggctgcccagtgtggacacgtggctcacccagggatcaaggcgctgctgggccgctccccttggaggccctgctcaggaggccctgaccgtggaaggggagaggaactcgaaagcacagctcctcccccagcccttgggaccatcttctcctgcagtcccctgggccccagtgagaggggcaggggcagggccggcagtaggtggggcctgtggtccccccactgccctgagggcattagctggtctaactgcccggaggcacccggccctgggccttaggcacctcaaggacttttctgctatttactgctcttattgttaaggataataattaaggatcatatgaataattaatgaagatgctgatgactatgaataataaataattatcctgaggaga

SEQ ID NO: 631 - DNA, 3884 bp, Homo sapiens
  source 1..3884: mol_type = genomic DNA
  misc_feature 1..3884: note = cDNA of KCNH2 gene SNP c.274C>T (p.Arg92Cys)
atgccggtgcggaggggccacgtcgcgccgcagaacaccttcctggacaccatcatccgcaagtttgagggccagagccgtaagttcatcatcgccaacgctcgggtggagaactgcgccgtcatctactgcaacgacggcttctgcgagctgtgcggctactcgcgggccgaggtgatgcagcgaccctgcacctgcgacttcctgcacgggccgcgcacgcagcgccgcgctgccgcgcagatcgcgcaggcactgctgggcgccgaggagtgcaaagtggaaatcgccttctaccggaaagatgggagctgcttcctatgtctggtggatgtggtgcccgtgaagaacgaggatggggctgtcatcatgttcatcctcaatttcgaggtggtgatggagaaggacatggtggggtccccggctcatgacaccaaccaccggggcccccccaccagctggctggccccaggccgcgccaagaccttccgcctgaagctgcccgcgctgctggcgctgacggcccgggagtcgtcggtgcggtcgggcggcgcgggcggcgcgggcgccccgggggccgtggtggtggacgtggacctgacgcccgcggcacccagcagcgagtcgctggccctggacgaagtgacagccatggacaaccacgtggcagggctcgggcccgcggaggagcggcgtgcgctggtgggtcccggctctccgccccgcagcgcgcccggccagctcccatcgccccgggcgcacagcctcaaccccgacgcctcgggctccagctgcagcctggcccggacgcgctcccgagaaagctgcgccagcgtgcgccgcgcctcgtcggccgacgacatcgaggccatgcgcgccggggtgctgcccccgccaccgcgccacgccagcaccggggccatgcacccactgcgcagcggcttgctcaactccacctcggactccgacctcgtgcgctaccgcaccattagcaagattccccaaatcaccctcaactttgtggacctcaagggcgaccccttcttggcttcgcccaccagtgaccgtgagatcatagcacctaagataaaggagcgaacccacaatgtcactgagaaggtcacccaggtcctgtccctgggcgccgacgtgctgcctgagtacaagctgcaggcaccgcgcatccaccgctggaccatcctgcattacagccccttcaaggccgtgtgggactggctcatcctgctgctggtcatctacacggctgtcttcacaccctactcggctgccttcctgctgaaggagacggaagaaggcccgcctgctaccgagtgtggctacgcctgccagccgctggctgtggtggacctcatcgtggacatcatgttcattgtggacatcctcatcaacttccgcaccacctacgtcaatgccaacgaggaggtggtcagccaccccggccgcatcgccgtccactacttcaagggctggttcctcatcgacatggtggccgccatccccttcgacctgctcatcttcggctctggctctgaggagctgatcgggctgctgaagactgcgcggctgctgcggctggtgcgcgtggcgcggaagctggatcgctactcagagtacggcgcggccgtgctgttcttgctcatgtgcacctttgcgctcatcgcgcactggctagcctgcatctggtacgccatcggcaacatggagcagccacacatggactcacgcatcggctggctgcacaacctgggcgaccagataggcaaaccctacaacagcagcggcctgggcggcccctccatcaaggacaagtatgtgacggcgctctacttcaccttcagcagcctcaccagtgtgggcttcggcaacgtctctcccaacaccaactcagagaagatcttctccatctgcgtcatgctcattggctccctcatgtatgctagcatcttcggcaacgtgtcggccatcatccagcggctgtactcgggcacagcccgctaccacacacagatgctgcgggtgcgggagttcatccgcttccaccagatccccaatcccctgcgccagcgcctcgaggagtacttccagcacgcctggtcctacaccaacggcatcgacatgaacgcggtgctgaagggcttccctgagtgcctgcaggctgacatctgcctgcacctgaaccgctcactgctgcagcactgcaaacccttccgaggggccaccaagggctgccttcgggccctggccatgaagttcaagaccacacatgcaccgccaggggacacactggtgcatgctggggacctgctcaccgccctgtacttcatctcccggggctccatcgagatcctgcggggcgacgtcgtcgtggccatcctggggaagaatgacatctttggggagcctctgaacctgtatgcaaggcctggcaagtcgaacggggatgtgcgggccctcacctactgtgacctacacaagatccatcgggacgacctgctggaggtgctggacatgtaccctgagttctccgaccacttctggtccagcctggagatcaccttcaacctgcgagataccaacatgatcccgggctcccccggcagtacggagttagagggtggcttcagtcggcaacgcaagcgcaagttgtccttccgcaggcgcacggacaaggacacggagcagccaggggaggtgtcggccttggggccgggccgggcgggggcagggccgagtagccggggccggccgggggggccgtggggggagagcccgtccagtggcccctccagccctgagagcagtgaggatgagggcccaggccgcagctccagccccctccgcctggtgcccttctccagccccaggccccccggagagccgccgggtggggagcccctgatggaggactgcgagaagagcagcgacacttgcaaccccctgtcaggcgccttctcaggagtgtccaacattttcagcttctggggggacagtcggggccgccagtaccaggagctccctcgatgccccgcccccacccccagcctcctcaacatccccctctccagcccgggtcggcggccccggggcgacgtggagagcaggctggatgccctccagcgccagctcaacaggctggagacccggctgagtgcagacatggccactgtcctgcagctgctacagaggcagatgacgctggtcccgcccgcctacagtgctgtgaccaccccggggcctggccccacttccacatccccgctgttgcccgtcagccccctccccaccctcaccttggactcgctttctcaggtttcccagttcatggcgtgtgaggagctgcccccgggggccccagagcttccccaagaaggccccacacgacgcctctccctaccgggccagctgggggccctcacctcccagcccctgcacagacacggctcggacccgggcagttagtggggctgcccagtgtggacacgtggctcacccagggatcaaggcgctgctgggccgctccccttggaggccctgctcaggaggccctgaccgtggaaggggagaggaactcgaaagcacagctcctcccccagcccttgggaccatcttctcctgcagtcccctgggccccagtgagaggggcaggggcagggccggcagtaggtggggcctgtggtccccccactgccctgagggcattagctggtctaactgcccggaggcacccggccctgggccttaggcacctcaaggacttttctgctatttactgctcttattgttaaggataataattaaggatcatatgaataattaatgaagatgctgatgactatgaataataaataattatcctgaggaga

SEQ ID NO: 632 - DNA, 3884 bp, Homo sapiens
  source 1..3884: mol_type = genomic DNA
  misc_feature 1..3884: note = cDNA of KCNH2 gene SNP c.2750C>T (p.Pro917Leu)
atgccggtgcggaggggccacgtcgcgccgcagaacaccttcctggacaccatcatccgcaagtttgagggccagagccgtaagttcatcatcgccaacgctcgggtggagaactgcgccgtcatctactgcaacgacggcttctgcgagctgtgcggctactcgcgggccgaggtgatgcagcgaccctgcacctgcgacttcctgcacgggccgcgcacgcagcgccgcgctgccgcgcagatcgcgcaggcactgctgggcgccgaggagcgcaaagtggaaatcgccttctaccggaaagatgggagctgcttcctatgtctggtggatgtggtgcccgtgaagaacgaggatggggctgtcatcatgttcatcctcaatttcgaggtggtgatggagaaggacatggtggggtccccggctcatgacaccaaccaccggggcccccccaccagctggctggccccaggccgcgccaagaccttccgcctgaagctgcccgcgctgctggcgctgacggcccgggagtcgtcggtgcggtcgggcggcgcgggcggcgcgggcgccccgggggccgtggtggtggacgtggacctgacgcccgcggcacccagcagcgagtcgctggccctggacgaagtgacagccatggacaaccacgtggcagggctcgggcccgcggaggagcggcgtgcgctggtgggtcccggctctccgccccgcagcgcgcccggccagctcccatcgccccgggcgcacagcctcaaccccgacgcctcgggctccagctgcagcctggcccggacgcgctcccgagaaagctgcgccagcgtgcgccgcgcctcgtcggccgacgacatcgaggccatgcgcgccggggtgctgcccccgccaccgcgccacgccagcaccggggccatgcacccactgcgcagcggcttgctcaactccacctcggactccgacctcgtgcgctaccgcaccattagcaagattccccaaatcaccctcaactttgtggacctcaagggcgaccccttcttggcttcgcccaccagtgaccgtgagatcatagcacctaagataaaggagcgaacccacaatgtcactgagaaggtcacccaggtcctgtccctgggcgccgacgtgctgcctgagtacaagctgcaggcaccgcgcatccaccgctggaccatcctgcattacagccccttcaaggccgtgtgggactggctcatcctgctgctggtcatctacacggctgtcttcacaccctactcggctgccttcctgctgaaggagacggaagaaggcccgcctgctaccgagtgtggctacgcctgccagccgctggctgtggtggacctcatcgtggacatcatgttcattgtggacatcctcatcaacttccgcaccacctacgtcaatgccaacgaggaggtggtcagccaccccggccgcatcgccgtccactacttcaagggctggttcctcatcgacatggtggccgccatccccttcgacctgctcatcttcggctctggctctgaggagctgatcgggctgctgaagactgcgcggctgctgcggctggtgcgcgtggcgcggaagctggatcgctactcagagtacggcgcggccgtgctgttcttgctcatgtgcacctttgcgctcatcgcgcactggctagcctgcatctggtacgccatcggcaacatggagcagccacacatggactcacgcatcggctggctgcacaacctgggcgaccagataggcaaaccctacaacagcagcggcctgggcggcccctccatcaaggacaagtatgtgacggcgctctacttcaccttcagcagcctcaccagtgtgggcttcggcaacgtctctcccaacaccaactcagagaagatcttctccatctgcgtcatgctcattggctccctcatgtatgctagcatcttcggcaacgtgtcggccatcatccagcggctgtactcgggcacagcccgctaccacacacagatgctgcgggtgcgggagttcatccgcttccaccagatccccaatcccctgcgccagcgcctcgaggagtacttccagcacgcctggtcctacaccaacggcatcgacatgaacgcggtgctgaagggcttccctgagtgcctgcaggctgacatctgcctgcacctgaaccgctcactgctgcagcactgcaaacccttccgaggggccaccaagggctgccttcgggccctggccatgaagttcaagaccacacatgcaccgccaggggacacactggtgcatgctggggacctgctcaccgccctgtacttcatctcccggggctccatcgagatcctgcggggcgacgtcgtcgtggccatcctggggaagaatgacatctttggggagcctctgaacctgtatgcaaggcctggcaagtcgaacggggatgtgcgggccctcacctactgtgacctacacaagatccatcgggacgacctgctggaggtgctggacatgtaccctgagttctccgaccacttctggtccagcctggagatcaccttcaacctgcgagataccaacatgatcccgggctcccccggcagtacggagttagagggtggcttcagtcggcaacgcaagcgcaagttgtccttccgcaggcgcacggacaaggacacggagcagccaggggaggtgtcggccttggggccgggccgggcgggggcagggctgagtagccggggccggccgggggggccgtggggggagagcccgtccagtggcccctccagccctgagagcagtgaggatgagggcccaggccgcagctccagccccctccgcctggtgcccttctccagccccaggccccccggagagccgccgggtggggagcccctgatggaggactgcgagaagagcagcgacacttgcaaccccctgtcaggcgccttctcaggagtgtccaacattttcagcttctggggggacagtcggggccgccagtaccaggagctccctcgatgccccgcccccacccccagcctcctcaacatccccctctccagcccgggtcggcggccccggggcgacgtggagagcaggctggatgccctccagcgccagctcaacaggctggagacccggctgagtgcagacatggccactgtcctgcagctgctacagaggcagatgacgctggtcccgcccgcctacagtgctgtgaccaccccggggcctggccccacttccacatccccgctgttgcccgtcagccccctccccaccctcaccttggactcgctttctcaggtttcccagttcatggcgtgtgaggagctgcccccgggggccccagagcttccccaagaaggccccacacgacgcctctccctaccgggccagctgggggccctcacctcccagcccctgcacagacacggctcggacccgggcagttagtggggctgcccagtgtggacacgtggctcacccagggatcaaggcgctgctgggccgctccccttggaggccctgctcaggaggccctgaccgtggaaggggagaggaactcgaaagcacagctcctcccccagcccttgggaccatcttctcctgcagtcccctgggccccagtgagaggggcaggggcagggccggcagtaggtggggcctgtggtccccccactgccctgagggcattagctggtctaactgcccggaggcacccggccctgggccttaggcacctcaaggacttttctgctatttactgctcttattgttaaggataataattaaggatcatatgaataattaatgaagatgctgatgactatgaataataaataattatcctgaggaga

SEQ ID NO: 633 - DNA, 3884 bp, Homo sapiens
  source 1..3884: mol_type = genomic DNA
  misc_feature 1..3884: note = cDNA of KCNH2 gene SNP c.2753G>A (p.Ser918Asn)
atgccggtgcggaggggccacgtcgcgccgcagaacaccttcctggacaccatcatccgcaagtttgagggccagagccgtaagttcatcatcgccaacgctcgggtggagaactgcgccgtcatctactgcaacgacggcttctgcgagctgtgcggctactcgcgggccgaggtgatgcagcgaccctgcacctgcgacttcctgcacgggccgcgcacgcagcgccgcgctgccgcgcagatcgcgcaggcactgctgggcgccgaggagcgcaaagtggaaatcgccttctaccggaaagatgggagctgcttcctatgtctggtggatgtggtgcccgtgaagaacgaggatggggctgtcatcatgttcatcctcaatttcgaggtggtgatggagaaggacatggtggggtccccggctcatgacaccaaccaccggggcccccccaccagctggctggccccaggccgcgccaagaccttccgcctgaagctgcccgcgctgctggcgctgacggcccgggagtcgtcggtgcggtcgggcggcgcgggcggcgcgggcgccccgggggccgtggtggtggacgtggacctgacgcccgcggcacccagcagcgagtcgctggccctggacgaagtgacagccatggacaaccacgtggcagggctcgggcccgcggaggagcggcgtgcgctggtgggtcccggctctccgccccgcagcgcgcccggccagctcccatcgccccgggcgcacagcctcaaccccgacgcctcgggctccagctgcagcctggcccggacgcgctcccgagaaagctgcgccagcgtgcgccgcgcctcgtcggccgacgacatcgaggccatgcgcgccggggtgctgcccccgccaccgcgccacgccagcaccggggccatgcacccactgcgcagcggcttgctcaactccacctcggactccgacctcgtgcgctaccgcaccattagcaagattccccaaatcaccctcaactttgtggacctcaagggcgaccccttcttggcttcgcccaccagtgaccgtgagatcatagcacctaagataaaggagcgaacccacaatgtcactgagaaggtcacccaggtcctgtccctgggcgccgacgtgctgcctgagtacaagctgcaggcaccgcgcatccaccgctggaccatcctgcattacagccccttcaaggccgtgtgggactggctcatcctgctgctggtcatctacacggctgtcttcacaccctactcggctgccttcctgctgaaggagacggaagaaggcccgcctgctaccgagtgtggctacgcctgccagccgctggctgtggtggacctcatcgtggacatcatgttcattgtggacatcctcatcaacttccgcaccacctacgtcaatgccaacgaggaggtggtcagccaccccggccgcatcgccgtccactacttcaagggctggttcctcatcgacatggtggccgccatccccttcgacctgctcatcttcggctctggctctgaggagctgatcgggctgctgaagactgcgcggctgctgcggctggtgcgcgtggcgcggaagctggatcgctactcagagtacggcgcggccgtgctgttcttgctcatgtgcacctttgcgctcatcgcgcactggctagcctgcatctggtacgccatcggcaacatggagcagccacacatggactcacgcatcggctggctgcacaacctgggcgaccagataggcaaaccctacaacagcagcggcctgggcggcccctccatcaaggacaagtatgtgacggcgctctacttcaccttcagcagcctcaccagtgtgggcttcggcaacgtctctcccaacaccaactcagagaagatcttctccatctgcgtcatgctcattggctccctcatgtatgctagcatcttcggcaacgtgtcggccatcatccagcggctgtactcgggcacagcccgctaccacacacagatgctgcgggtgcgggagttcatccgcttccaccagatccccaatcccctgcgccagcgcctcgaggagtacttccagcacgcctggtcctacaccaacggcatcgacatgaacgcggtgctgaagggcttccctgagtgcctgcaggctgacatctgcctgcacctgaaccgctcactgctgcagcactgcaaacccttccgaggggccaccaagggctgccttcgggccctggccatgaagttcaagaccacacatgcaccgccaggggacacactggtgcatgctggggacctgctcaccgccctgtacttcatctcccggggctccatcgagatcctgcggggcgacgtcgtcgtggccatcctggggaagaatgacatctttggggagcctctgaacctgtatgcaaggcctggcaagtcgaacggggatgtgcgggccctcacctactgtgacctacacaagatccatcgggacgacctgctggaggtgctggacatgtaccctgagttctccgaccacttctggtccagcctggagatcaccttcaacctgcgagataccaacatgatcccgggctcccccggcagtacggagttagagggtggcttcagtcggcaacgcaagcgcaagttgtccttccgcaggcgcacggacaaggacacggagcagccaggggaggtgtcggccttggggccgggccgggcgggggcagggccgaatagccggggccggccgggggggccgtggggggagagcccgtccagtggcccctccagccctgagagcagtgaggatgagggcccaggccgcagctccagccccctccgcctggtgcccttctccagccccaggccccccggagagccgccgggtggggagcccctgatggaggactgcgagaagagcagcgacacttgcaaccccctgtcaggcgccttctcaggagtgtccaacattttcagcttctggggggacagtcggggccgccagtaccaggagctccctcgatgccccgcccccacccccagcctcctcaacatccccctctccagcccgggtcggcggccccggggcgacgtggagagcaggctggatgccctccagcgccagctcaacaggctggagacccggctgagtgcagacatggccactgtcctgcagctgctacagaggcagatgacgctggtcccgcccgcctacagtgctgtgaccaccccggggcctggccccacttccacatccccgctgttgcccgtcagccccctccccaccctcaccttggactcgctttctcaggtttcccagttcatggcgtgtgaggagctgcccccgggggccccagagcttccccaagaaggccccacacgacgcctctccctaccgggccagctgggggccctcacctcccagcccctgcacagacacggctcggacccgggcagttagtggggctgcccagtgtggacacgtggctcacccagggatcaaggcgctgctgggccgctccccttggaggccctgctcaggaggccctgaccgtggaaggggagaggaactcgaaagcacagctcctcccccagcccttgggaccatcttctcctgcagtcccctgggccccagtgagaggggcaggggcagggccggcagtaggtggggcctgtggtccccccactgccctgagggcattagctggtctaactgcccggaggcacccggccctgggccttaggcacctcaaggacttttctgctatttactgctcttattgttaaggataataattaaggatcatatgaataattaatgaagatgctgatgactatgaataataaataattatcctgaggaga

SEQ ID NO: 634 - DNA, 3884 bp, Homo sapiens
  source 1..3884: mol_type = genomic DNA
  misc_feature 1..3884: note = cDNA of KCNH2 gene SNP c.2758C>G (p.Arg920Gly)
atgccggtgcggaggggccacgtcgcgccgcagaacaccttcctggacaccatcatccgcaagtttgagggccagagccgtaagttcatcatcgccaacgctcgggtggagaactgcgccgtcatctactgcaacgacggcttctgcgagctgtgcggctactcgcgggccgaggtgatgcagcgaccctgcacctgcgacttcctgcacgggccgcgcacgcagcgccgcgctgccgcgcagatcgcgcaggcactgctgggcgccgaggagcgcaaagtggaaatcgccttctaccggaaagatgggagctgcttcctatgtctggtggatgtggtgcccgtgaagaacgaggatggggctgtcatcatgttcatcctcaatttcgaggtggtgatggagaaggacatggtggggtccccggctcatgacaccaaccaccggggcccccccaccagctggctggccccaggccgcgccaagaccttccgcctgaagctgcccgcgctgctggcgctgacggcccgggagtcgtcggtgcggtcgggcggcgcgggcggcgcgggcgccccgggggccgtggtggtggacgtggacctgacgcccgcggcacccagcagcgagtcgctggccctggacgaagtgacagccatggacaaccacgtggcagggctcgggcccgcggaggagcggcgtgcgctggtgggtcccggctctccgccccgcagcgcgcccggccagctcccatcgccccgggcgcacagcctcaaccccgacgcctcgggctccagctgcagcctggcccggacgcgctcccgagaaagctgcgccagcgtgcgccgcgcctcgtcggccgacgacatcgaggccatgcgcgccggggtgctgcccccgccaccgcgccacgccagcaccggggccatgcacccactgcgcagcggcttgctcaactccacctcggactccgacctcgtgcgctaccgcaccattagcaagattccccaaatcaccctcaactttgtggacctcaagggcgaccccttcttggcttcgcccaccagtgaccgtgagatcatagcacctaagataaaggagcgaacccacaatgtcactgagaaggtcacccaggtcctgtccctgggcgccgacgtgctgcctgagtacaagctgcaggcaccgcgcatccaccgctggaccatcctgcattacagccccttcaaggccgtgtgggactggctcatcctgctgctggtcatctacacggctgtcttcacaccctactcggctgccttcctgctgaaggagacggaagaaggcccgcctgctaccgagtgtggctacgcctgccagccgctggctgtggtggacctcatcgtggacatcatgttcattgtggacatcctcatcaacttccgcaccacctacgtcaatgccaacgaggaggtggtcagccaccccggccgcatcgccgtccactacttcaagggctggttcctcatcgacatggtggccgccatccccttcgacctgctcatcttcggctctggctctgaggagctgatcgggctgctgaagactgcgcggctgctgcggctggtgcgcgtggcgcggaagctggatcgctactcagagtacggcgcggccgtgctgttcttgctcatgtgcacctttgcgctcatcgcgcactggctagcctgcatctggtacgccatcggcaacatggagcagccacacatggactcacgcatcggctggctgcacaacctgggcgaccagataggcaaaccctacaacagcagcggcctgggcggcccctccatcaaggacaagtatgtgacggcgctctacttcaccttcagcagcctcaccagtgtgggcttcggcaacgtctctcccaacaccaactcagagaagatcttctccatctgcgtcatgctcattggctccctcatgtatgctagcatcttcggcaacgtgtcggccatcatccagcggctgtactcgggcacagcccgctaccacacacagatgctgcgggtgcgggagttcatccgcttccaccagatccccaatcccctgcgccagcgcctcgaggagtacttccagcacgcctggtcctacaccaacggcatcgacatgaacgcggtgctgaagggcttccctgagtgcctgcaggctgacatctgcctgcacctgaaccgctcactgctgcagcactgcaaacccttccgaggggccaccaagggctgccttcgggccctggccatgaagttcaagaccacacatgcaccgccaggggacacactggtgcatgctggggacctgctcaccgccctgtacttcatctcccggggctccatcgagatcctgcggggcgacgtcgtcgtggccatcctggggaagaatgacatctttggggagcctctgaacctgtatgcaaggcctggcaagtcgaacggggatgtgcgggccctcacctactgtgacctacacaagatccatcgggacgacctgctggaggtgctggacatgtaccctgagttctccgaccacttctggtccagcctggagatcaccttcaacctgcgagataccaacatgatcccgggctcccccggcagtacggagttagagggtggcttcagtcggcaacgcaagcgcaagttgtccttccgcaggcgcacggacaaggacacggagcagccaggggaggtgtcggccttggggccgggccgggcgggggcagggccgagtagcgggggccggccgggggggccgtggggggagagcccgtccagtggcccctccagccctgagagcagtgaggatgagggcccaggccgcagctccagccccctccgcctggtgcccttctccagccccaggccccccggagagccgccgggtggggagcccctgatggaggactgcgagaagagcagcgacacttgcaaccccctgtcaggcgccttctcaggagtgtccaacattttcagcttctggggggacagtcggggccgccagtaccaggagctccctcgatgccccgcccccacccccagcctcctcaacatccccctctccagcccgggtcggcggccccggggcgacgtggagagcaggctggatgccctccagcgccagctcaacaggctggagacccggctgagtgcagacatggccactgtcctgcagctgctacagaggcagatgacgctggtcccgcccgcctacagtgctgtgaccaccccggggcctggccccacttccacatccccgctgttgcccgtcagccccctccccaccctcaccttggactcgctttctcaggtttcccagttcatggcgtgtgaggagctgcccccgggggccccagagcttccccaagaaggccccacacgacgcctctccctaccgggccagctgggggccctcacctcccagcccctgcacagacacggctcggacccgggcagttagtggggctgcccagtgtggacacgtggctcacccagggatcaaggcgctgctgggccgctccccttggaggccctgctcaggaggccctgaccgtggaaggggagaggaactcgaaagcacagctcctcccccagcccttgggaccatcttctcctgcagtcccctgggccccagtgagaggggcaggggcagggccggcagtaggtggggcctgtggtccccccactgccctgagggcattagctggtctaactgcccggaggcacccggccctgggccttaggcacctcaaggacttttctgctatttactgctcttattgttaaggataataattaaggatcatatgaataattaatgaagatgctgatgactatgaataataaataattatcctgaggaga

SEQ ID NO: 635 - DNA, 3884 bp, Homo sapiens
  source 1..3884: mol_type = genomic DNA
  misc_feature 1..3884: note = cDNA of KCNH2 gene SNP c.2758C>T (p.Arg920Trp)
atgccggtgcggaggggccacgtcgcgccgcagaacaccttcctggacaccatcatccgcaagtttgagggccagagccgtaagttcatcatcgccaacgctcgggtggagaactgcgccgtcatctactgcaacgacggcttctgcgagctgtgcggctactcgcgggccgaggtgatgcagcgaccctgcacctgcgacttcctgcacgggccgcgcacgcagcgccgcgctgccgcgcagatcgcgcaggcactgctgggcgccgaggagcgcaaagtggaaatcgccttctaccggaaagatgggagctgcttcctatgtctggtggatgtggtgcccgtgaagaacgaggatggggctgtcatcatgttcatcctcaatttcgaggtggtgatggagaaggacatggtggggtccccggctcatgacaccaaccaccggggcccccccaccagctggctggccccaggccgcgccaagaccttccgcctgaagctgcccgcgctgctggcgctgacggcccgggagtcgtcggtgcggtcgggcggcgcgggcggcgcgggcgccccgggggccgtggtggtggacgtggacctgacgcccgcggcacccagcagcgagtcgctggccctggacgaagtgacagccatggacaaccacgtggcagggctcgggcccgcggaggagcggcgtgcgctggtgggtcccggctctccgccccgcagcgcgcccggccagctcccatcgccccgggcgcacagcctcaaccccgacgcctcgggctccagctgcagcctggcccggacgcgctcccgagaaagctgcgccagcgtgcgccgcgcctcgtcggccgacgacatcgaggccatgcgcgccggggtgctgcccccgccaccgcgccacgccagcaccggggccatgcacccactgcgcagcggcttgctcaactccacctcggactccgacctcgtgcgctaccgcaccattagcaagattccccaaatcaccctcaactttgtggacctcaagggcgaccccttcttggcttcgcccaccagtgaccgtgagatcatagcacctaagataaaggagcgaacccacaatgtcactgagaaggtcacccaggtcctgtccctgggcgccgacgtgctgcctgagtacaagctgcaggcaccgcgcatccaccgctggaccatcctgcattacagccccttcaaggccgtgtgggactggctcatcctgctgctggtcatctacacggctgtcttcacaccctactcggctgccttcctgctgaaggagacggaagaaggcccgcctgctaccgagtgtggctacgcctgccagccgctggctgtggtggacctcatcgtggacatcatgttcattgtggacatcctcatcaacttccgcaccacctacgtcaatgccaacgaggaggtggtcagccaccccggccgcatcgccgtccactacttcaagggctggttcctcatcgacatggtggccgccatccccttcgacctgctcatcttcggctctggctctgaggagctgatcgggctgctgaagactgcgcggctgctgcggctggtgcgcgtggcgcggaagctggatcgctactcagagtacggcgcggccgtgctgttcttgctcatgtgcacctttgcgctcatcgcgcactggctagcctgcatctggtacgccatcggcaacatggagcagccacacatggactcacgcatcggctggctgcacaacctgggcgaccagataggcaaaccctacaacagcagcggcctgggcggcccctccatcaaggacaagtatgtgacggcgctctacttcaccttcagcagcctcaccagtgtgggcttcggcaacgtctctcccaacaccaactcagagaagatcttctccatctgcgtcatgctcattggctccctcatgtatgctagcatcttcggcaacgtgtcggccatcatccagcggctgtactcgggcacagcccgctaccacacacagatgctgcgggtgcgggagttcatccgcttccaccagatccccaatcccctgcgccagcgcctcgaggagtacttccagcacgcctggtcctacaccaacggcatcgacatgaacgcggtgctgaagggcttccctgagtgcctgcaggctgacatctgcctgcacctgaaccgctcactgctgcagcactgcaaacccttccgaggggccaccaagggctgccttcgggccctggccatgaagttcaagaccacacatgcaccgccaggggacacactggtgcatgctggggacctgctcaccgccctgtacttcatctcccggggctccatcgagatcctgcggggcgacgtcgtcgtggccatcctggggaagaatgacatctttggggagcctctgaacctgtatgcaaggcctggcaagtcgaacggggatgtgcgggccctcacctactgtgacctacacaagatccatcgggacgacctgctggaggtgctggacatgtaccctgagttctccgaccacttctggtccagcctggagatcaccttcaacctgcgagataccaacatgatcccgggctcccccggcagtacggagttagagggtggcttcagtcggcaacgcaagcgcaagttgtccttccgcaggcgcacggacaaggacacggagcagccaggggaggtgtcggccttggggccgggccgggcgggggcagggccgagtagctggggccggccgggggggccgtggggggagagcccgtccagtggcccctccagccctgagagcagtgaggatgagggcccaggccgcagctccagccccctccgcctggtgcccttctccagccccaggccccccggagagccgccgggtggggagcccctgatggaggactgcgagaagagcagcgacacttgcaaccccctgtcaggcgccttctcaggagtgtccaacattttcagcttctggggggacagtcggggccgccagtaccaggagctccctcgatgccccgcccccacccccagcctcctcaacatccccctctccagcccgggtcggcggccccggggcgacgtggagagcaggctggatgccctccagcgccagctcaacaggctggagacccggctgagtgcagacatggccactgtcctgcagctgctacagaggcagatgacgctggtcccgcccgcctacagtgctgtgaccaccccggggcctggccccacttccacatccccgctgttgcccgtcagccccctccccaccctcaccttggactcgctttctcaggtttcccagttcatggcgtgtgaggagctgcccccgggggccccagagcttccccaagaaggccccacacgacgcctctccctaccgggccagctgggggccctcacctcccagcccctgcacagacacggctcggacccgggcagttagtggggctgcccagtgtggacacgtggctcacccagggatcaaggcgctgctgggccgctccccttggaggccctgctcaggaggccctgaccgtggaaggggagaggaactcgaaagcacagctcctcccccagcccttgggaccatcttctcctgcagtcccctgggccccagtgagaggggcaggggcagggccggcagtaggtggggcctgtggtccccccactgccctgagggcattagctggtctaactgcccggaggcacccggccctgggccttaggcacctcaaggacttttctgctatttactgctcttattgttaaggataataattaaggatcatatgaataattaatgaagatgctgatgactatgaataataaataattatcctgaggaga

SEQ ID NO: 636 - DNA, 3884 bp, Homo sapiens
  source 1..3884: mol_type = genomic DNA
  misc_feature 1..3884: note = cDNA of KCNH2 gene SNP c.2759G>A (p.Arg920Gln)
atgccggtgcggaggggccacgtcgcgccgcagaacaccttcctggacaccatcatccgcaagtttgagggccagagccgtaagttcatcatcgccaacgctcgggtggagaactgcgccgtcatctactgcaacgacggcttctgcgagctgtgcggctactcgcgggccgaggtgatgcagcgaccctgcacctgcgacttcctgcacgggccgcgcacgcagcgccgcgctgccgcgcagatcgcgcaggcactgctgggcgccgaggagcgcaaagtggaaatcgccttctaccggaaagatgggagctgcttcctatgtctggtggatgtggtgcccgtgaagaacgaggatggggctgtcatcatgttcatcctcaatttcgaggtggtgatggagaaggacatggtggggtccccggctcatgacaccaaccaccggggcccccccaccagctggctggccccaggccgcgccaagaccttccgcctgaagctgcccgcgctgctggcgctgacggcccgggagtcgtcggtgcggtcgggcggcgcgggcggcgcgggcgccccgggggccgtggtggtggacgtggacctgacgcccgcggcacccagcagcgagtcgctggccctggacgaagtgacagccatggacaaccacgtggcagggctcgggcccgcggaggagcggcgtgcgctggtgggtcccggctctccgccccgcagcgcgcccggccagctcccatcgccccgggcgcacagcctcaaccccgacgcctcgggctccagctgcagcctggcccggacgcgctcccgagaaagctgcgccagcgtgcgccgcgcctcgtcggccgacgacatcgaggccatgcgcgccggggtgctgcccccgccaccgcgccacgccagcaccggggccatgcacccactgcgcagcggcttgctcaactccacctcggactccgacctcgtgcgctaccgcaccattagcaagattccccaaatcaccctcaactttgtggacctcaagggcgaccccttcttggcttcgcccaccagtgaccgtgagatcatagcacctaagataaaggagcgaacccacaatgtcactgagaaggtcacccaggtcctgtccctgggcgccgacgtgctgcctgagtacaagctgcaggcaccgcgcatccaccgctggaccatcctgcattacagccccttcaaggccgtgtgggactggctcatcctgctgctggtcatctacacggctgtcttcacaccctactcggctgccttcctgctgaaggagacggaagaaggcccgcctgctaccgagtgtggctacgcctgccagccgctggctgtggtggacctcatcgtggacatcatgttcattgtggacatcctcatcaacttccgcaccacctacgtcaatgccaacgaggaggtggtcagccaccccggccgcatcgccgtccactacttcaagggctggttcctcatcgacatggtggccgccatccccttcgacctgctcatcttcggctctggctctgaggagctgatcgggctgctgaagactgcgcggctgctgcggctggtgcgcgtggcgcggaagctggatcgctactcagagtacggcgcggccgtgctgttcttgctcatgtgcacctttgcgctcatcgcgcactggctagcctgcatctggtacgccatcggcaacatggagcagccacacatggactcacgcatcggctggctgcacaacctgggcgaccagataggcaaaccctacaacagcagcggcctgggcggcccctccatcaaggacaagtatgtgacggcgctctacttcaccttcagcagcctcaccagtgtgggcttcggcaacgtctctcccaacaccaactcagagaagatcttctccatctgcgtcatgctcattggctccctcatgtatgctagcatcttcggcaacgtgtcggccatcatccagcggctgtactcgggcacagcccgctaccacacacagatgctgcgggtgcgggagttcatccgcttccaccagatccccaatcccctgcgccagcgcctcgaggagtacttccagcacgcctggtcctacaccaacggcatcgacatgaacgcggtgctgaagggcttccctgagtgcctgcaggctgacatctgcctgcacctgaaccgctcactgctgcagcactgcaaacccttccgaggggccaccaagggctgccttcgggccctggccatgaagttcaagaccacacatgcaccgccaggggacacactggtgcatgctggggacctgctcaccgccctgtacttcatctcccggggctccatcgagatcctgcggggcgacgtcgtcgtggccatcctggggaagaatgacatctttggggagcctctgaacctgtatgcaaggcctggcaagtcgaacggggatgtgcgggccctcacctactgtgacctacacaagatccatcgggacgacctgctggaggtgctggacatgtaccctgagttctccgaccacttctggtccagcctggagatcaccttcaacctgcgagataccaacatgatcccgggctcccccggcagtacggagttagagggtggcttcagtcggcaacgcaagcgcaagttgtccttccgcaggcgcacggacaaggacacggagcagccaggggaggtgtcggccttggggccgggccgggcgggggcagggccgagtagccagggccggccgggggggccgtggggggagagcccgtccagtggcccctccagccctgagagcagtgaggatgagggcccaggccgcagctccagccccctccgcctggtgcccttctccagccccaggccccccggagagccgccgggtggggagcccctgatggaggactgcgagaagagcagcgacacttgcaaccccctgtcaggcgccttctcaggagtgtccaacattttcagcttctggggggacagtcggggccgccagtaccaggagctccctcgatgccccgcccccacccccagcctcctcaacatccccctctccagcccgggtcggcggccccggggcgacgtggagagcaggctggatgccctccagcgccagctcaacaggctggagacccggctgagtgcagacatggccactgtcctgcagctgctacagaggcagatgacgctggtcccgcccgcctacagtgctgtgaccaccccggggcctggccccacttccacatccccgctgttgcccgtcagccccctccccaccctcaccttggactcgctttctcaggtttcccagttcatggcgtgtgaggagctgcccccgggggccccagagcttccccaagaaggccccacacgacgcctctccctaccgggccagctgggggccctcacctcccagcccctgcacagacacggctcggacccgggcagttagtggggctgcccagtgtggacacgtggctcacccagggatcaaggcgctgctgggccgctccccttggaggccctgctcaggaggccctgaccgtggaaggggagaggaactcgaaagcacagctcctcccccagcccttgggaccatcttctcctgcagtcccctgggccccagtgagaggggcaggggcagggccggcagtaggtggggcctgtggtccccccactgccctgagggcattagctggtctaactgcccggaggcacccggccctgggccttaggcacctcaaggacttttctgctatttactgctcttattgttaaggataataattaaggatcatatgaataattaatgaagatgctgatgactatgaataataaataattatcctgaggaga

SEQ ID NO: 637 - DNA, 3884 bp, Homo sapiens
  source 1..3884: mol_type = genomic DNA
  misc_feature 1..3884: note = cDNA of KCNH2 gene SNP c.275G>C (p.Arg92Pro)
atgccggtgcggaggggccacgtcgcgccgcagaacaccttcctggacaccatcatccgcaagtttgagggccagagccgtaagttcatcatcgccaacgctcgggtggagaactgcgccgtcatctactgcaacgacggcttctgcgagctgtgcggctactcgcgggccgaggtgatgcagcgaccctgcacctgcgacttcctgcacgggccgcgcacgcagcgccgcgctgccgcgcagatcgcgcaggcactgctgggcgccgaggagcccaaagtggaaatcgccttctaccggaaagatgggagctgcttcctatgtctggtggatgtggtgcccgtgaagaacgaggatggggctgtcatcatgttcatcctcaatttcgaggtggtgatggagaaggacatggtggggtccccggctcatgacaccaaccaccggggcccccccaccagctggctggccccaggccgcgccaagaccttccgcctgaagctgcccgcgctgctggcgctgacggcccgggagtcgtcggtgcggtcgggcggcgcgggcggcgcgggcgccccgggggccgtggtggtggacgtggacctgacgcccgcggcacccagcagcgagtcgctggccctggacgaagtgacagccatggacaaccacgtggcagggctcgggcccgcggaggagcggcgtgcgctggtgggtcccggctctccgccccgcagcgcgcccggccagctcccatcgccccgggcgcacagcctcaaccccgacgcctcgggctccagctgcagcctggcccggacgcgctcccgagaaagctgcgccagcgtgcgccgcgcctcgtcggccgacgacatcgaggccatgcgcgccggggtgctgcccccgccaccgcgccacgccagcaccggggccatgcacccactgcgcagcggcttgctcaactccacctcggactccgacctcgtgcgctaccgcaccattagcaagattccccaaatcaccctcaactttgtggacctcaagggcgaccccttcttggcttcgcccaccagtgaccgtgagatcatagcacctaagataaaggagcgaacccacaatgtcactgagaaggtcacccaggtcctgtccctgggcgccgacgtgctgcctgagtacaagctgcaggcaccgcgcatccaccgctggaccatcctgcattacagccccttcaaggccgtgtgggactggctcatcctgctgctggtcatctacacggctgtcttcacaccctactcggctgccttcctgctgaaggagacggaagaaggcccgcctgctaccgagtgtggctacgcctgccagccgctggctgtggtggacctcatcgtggacatcatgttcattgtggacatcctcatcaacttccgcaccacctacgtcaatgccaacgaggaggtggtcagccaccccggccgcatcgccgtccactacttcaagggctggttcctcatcgacatggtggccgccatccccttcgacctgctcatcttcggctctggctctgaggagctgatcgggctgctgaagactgcgcggctgctgcggctggtgcgcgtggcgcggaagctggatcgctactcagagtacggcgcggccgtgctgttcttgctcatgtgcacctttgcgctcatcgcgcactggctagcctgcatctggtacgccatcggcaacatggagcagccacacatggactcacgcatcggctggctgcacaacctgggcgaccagataggcaaaccctacaacagcagcggcctgggcggcccctccatcaaggacaagtatgtgacggcgctctacttcaccttcagcagcctcaccagtgtgggcttcggcaacgtctctcccaacaccaactcagagaagatcttctccatctgcgtcatgctcattggctccctcatgtatgctagcatcttcggcaacgtgtcggccatcatccagcggctgtactcgggcacagcccgctaccacacacagatgctgcgggtgcgggagttcatccgcttccaccagatccccaatcccctgcgccagcgcctcgaggagtacttccagcacgcctggtcctacaccaacggcatcgacatgaacgcggtgctgaagggcttccctgagtgcctgcaggctgacatctgcctgcacctgaaccgctcactgctgcagcactgcaaacccttccgaggggccaccaagggctgccttcgggccctggccatgaagttcaagaccacacatgcaccgccaggggacacactggtgcatgctggggacctgctcaccgccctgtacttcatctcccggggctccatcgagatcctgcggggcgacgtcgtcgtggccatcctggggaagaatgacatctttggggagcctctgaacctgtatgcaaggcctggcaagtcgaacggggatgtgcgggccctcacctactgtgacctacacaagatccatcgggacgacctgctggaggtgctggacatgtaccctgagttctccgaccacttctggtccagcctggagatcaccttcaacctgcgagataccaacatgatcccgggctcccccggcagtacggagttagagggtggcttcagtcggcaacgcaagcgcaagttgtccttccgcaggcgcacggacaaggacacggagcagccaggggaggtgtcggccttggggccgggccgggcgggggcagggccgagtagccggggccggccgggggggccgtggggggagagcccgtccagtggcccctccagccctgagagcagtgaggatgagggcccaggccgcagctccagccccctccgcctggtgcccttctccagccccaggccccccggagagccgccgggtggggagcccctgatggaggactgcgagaagagcagcgacacttgcaaccccctgtcaggcgccttctcaggagtgtccaacattttcagcttctggggggacagtcggggccgccagtaccaggagctccctcgatgccccgcccccacccccagcctcctcaacatccccctctccagcccgggtcggcggccccggggcgacgtggagagcaggctggatgccctccagcgccagctcaacaggctggagacccggctgagtgcagacatggccactgtcctgcagctgctacagaggcagatgacgctggtcccgcccgcctacagtgctgtgaccaccccggggcctggccccacttccacatccccgctgttgcccgtcagccccctccccaccctcaccttggactcgctttctcaggtttcccagttcatggcgtgtgaggagctgcccccgggggccccagagcttccccaagaaggccccacacgacgcctctccctaccgggccagctgggggccctcacctcccagcccctgcacagacacggctcggacccgggcagttagtggggctgcccagtgtggacacgtggctcacccagggatcaaggcgctgctgggccgctccccttggaggccctgctcaggaggccctgaccgtggaaggggagaggaactcgaaagcacagctcctcccccagcccttgggaccatcttctcctgcagtcccctgggccccagtgagaggggcaggggcagggccggcagtaggtggggcctgtggtccccccactgccctgagggcattagctggtctaactgcccggaggcacccggccctgggccttaggcacctcaaggacttttctgctatttactgctcttattgttaaggataataattaaggatcatatgaataattaatgaagatgctgatgactatgaataataaataattatcctgaggaga

SEQ ID NO: 638 - DNA, 3884 bp, Homo sapiens
  source 1..3884: mol_type = genomic DNA
  misc_feature 1..3884: note = cDNA of KCNH2 gene SNP c.275G>T (p.Arg92Leu)
atgccggtgcggaggggccacgtcgcgccgcagaacaccttcctggacaccatcatccgcaagtttgagggccagagccgtaagttcatcatcgccaacgctcgggtggagaactgcgccgtcatctactgcaacgacggcttctgcgagctgtgcggctactcgcgggccgaggtgatgcagcgaccctgcacctgcgacttcctgcacgggccgcgcacgcagcgccgcgctgccgcgcagatcgcgcaggcactgctgggcgccgaggagctcaaagtggaaatcgccttctaccggaaagatgggagctgcttcctatgtctggtggatgtggtgcccgtgaagaacgaggatggggctgtcatcatgttcatcctcaatttcgaggtggtgatggagaaggacatggtggggtccccggctcatgacaccaaccaccggggcccccccaccagctggctggccccaggccgcgccaagaccttccgcctgaagctgcccgcgctgctggcgctgacggcccgggagtcgtcggtgcggtcgggcggcgcgggcggcgcgggcgccccgggggccgtggtggtggacgtggacctgacgcccgcggcacccagcagcgagtcgctggccctggacgaagtgacagccatggacaaccacgtggcagggctcgggcccgcggaggagcggcgtgcgctggtgggtcccggctctccgccccgcagcgcgcccggccagctcccatcgccccgggcgcacagcctcaaccccgacgcctcgggctccagctgcagcctggcccggacgcgctcccgagaaagctgcgccagcgtgcgccgcgcctcgtcggccgacgacatcgaggccatgcgcgccggggtgctgcccccgccaccgcgccacgccagcaccggggccatgcacccactgcgcagcggcttgctcaactccacctcggactccgacctcgtgcgctaccgcaccattagcaagattccccaaatcaccctcaactttgtggacctcaagggcgaccccttcttggcttcgcccaccagtgaccgtgagatcatagcacctaagataaaggagcgaacccacaatgtcactgagaaggtcacccaggtcctgtccctgggcgccgacgtgctgcctgagtacaagctgcaggcaccgcgcatccaccgctggaccatcctgcattacagccccttcaaggccgtgtgggactggctcatcctgctgctggtcatctacacggctgtcttcacaccctactcggctgccttcctgctgaaggagacggaagaaggcccgcctgctaccgagtgtggctacgcctgccagccgctggctgtggtggacctcatcgtggacatcatgttcattgtggacatcctcatcaacttccgcaccacctacgtcaatgccaacgaggaggtggtcagccaccccggccgcatcgccgtccactacttcaagggctggttcctcatcgacatggtggccgccatccccttcgacctgctcatcttcggctctggctctgaggagctgatcgggctgctgaagactgcgcggctgctgcggctggtgcgcgtggcgcggaagctggatcgctactcagagtacggcgcggccgtgctgttcttgctcatgtgcacctttgcgctcatcgcgcactggctagcctgcatctggtacgccatcggcaacatggagcagccacacatggactcacgcatcggctggctgcacaacctgggcgaccagataggcaaaccctacaacagcagcggcctgggcggcccctccatcaaggacaagtatgtgacggcgctctacttcaccttcagcagcctcaccagtgtgggcttcggcaacgtctctcccaacaccaactcagagaagatcttctccatctgcgtcatgctcattggctccctcatgtatgctagcatcttcggcaacgtgtcggccatcatccagcggctgtactcgggcacagcccgctaccacacacagatgctgcgggtgcgggagttcatccgcttccaccagatccccaatcccctgcgccagcgcctcgaggagtacttccagcacgcctggtcctacaccaacggcatcgacatgaacgcggtgctgaagggcttccctgagtgcctgcaggctgacatctgcctgcacctgaaccgctcactgctgcagcactgcaaacccttccgaggggccaccaagggctgccttcgggccctggccatgaagttcaagaccacacatgcaccgccaggggacacactggtgcatgctggggacctgctcaccgccctgtacttcatctcccggggctccatcgagatcctgcggggcgacgtcgtcgtggccatcctggggaagaatgacatctttggggagcctctgaacctgtatgcaaggcctggcaagtcgaacggggatgtgcgggccctcacctactgtgacctacacaagatccatcgggacgacctgctggaggtgctggacatgtaccctgagttctccgaccacttctggtccagcctggagatcaccttcaacctgcgagataccaacatgatcccgggctcccccggcagtacggagttagagggtggcttcagtcggcaacgcaagcgcaagttgtccttccgcaggcgcacggacaaggacacggagcagccaggggaggtgtcggccttggggccgggccgggcgggggcagggccgagtagccggggccggccgggggggccgtggggggagagcccgtccagtggcccctccagccctgagagcagtgaggatgagggcccaggccgcagctccagccccctccgcctggtgcccttctccagccccaggccccccggagagccgccgggtggggagcccctgatggaggactgcgagaagagcagcgacacttgcaaccccctgtcaggcgccttctcaggagtgtccaacattttcagcttctggggggacagtcggggccgccagtaccaggagctccctcgatgccccgcccccacccccagcctcctcaacatccccctctccagcccgggtcggcggccccggggcgacgtggagagcaggctggatgccctccagcgccagctcaacaggctggagacccggctgagtgcagacatggccactgtcctgcagctgctacagaggcagatgacgctggtcccgcccgcctacagtgctgtgaccaccccggggcctggccccacttccacatccccgctgttgcccgtcagccccctccccaccctcaccttggactcgctttctcaggtttcccagttcatggcgtgtgaggagctgcccccgggggccccagagcttccccaagaaggccccacacgacgcctctccctaccgggccagctgggggccctcacctcccagcccctgcacagacacggctcggacccgggcagttagtggggctgcccagtgtggacacgtggctcacccagggatcaaggcgctgctgggccgctccccttggaggccctgctcaggaggccctgaccgtggaaggggagaggaactcgaaagcacagctcctcccccagcccttgggaccatcttctcctgcagtcccctgggccccagtgagaggggcaggggcagggccggcagtaggtggggcctgtggtccccccactgccctgagggcattagctggtctaactgcccggaggcacccggccctgggccttaggcacctcaaggacttttctgctatttactgctcttattgttaaggataataattaaggatcatatgaataattaatgaagatgctgatgactatgaataataaataattatcctgaggaga

SEQ ID NO: 639 - DNA, 3884 bp, Homo sapiens
  source 1..3884: mol_type = genomic DNA
  misc_feature 1..3884: note = cDNA of KCNH2 gene SNP c.2764C>T (p.Arg922Trp)
atgccggtgcggaggggccacgtcgcgccgcagaacaccttcctggacaccatcatccgcaagtttgagggccagagccgtaagttcatcatcgccaacgctcgggtggagaactgcgccgtcatctactgcaacgacggcttctgcgagctgtgcggctactcgcgggccgaggtgatgcagcgaccctgcacctgcgacttcctgcacgggccgcgcacgcagcgccgcgctgccgcgcagatcgcgcaggcactgctgggcgccgaggagcgcaaagtggaaatcgccttctaccggaaagatgggagctgcttcctatgtctggtggatgtggtgcccgtgaagaacgaggatggggctgtcatcatgttcatcctcaatttcgaggtggtgatggagaaggacatggtggggtccccggctcatgacaccaaccaccggggcccccccaccagctggctggccccaggccgcgccaagaccttccgcctgaagctgcccgcgctgctggcgctgacggcccgggagtcgtcggtgcggtcgggcggcgcgggcggcgcgggcgccccgggggccgtggtggtggacgtggacctgacgcccgcggcacccagcagcgagtcgctggccctggacgaagtgacagccatggacaaccacgtggcagggctcgggcccgcggaggagcggcgtgcgctggtgggtcccggctctccgccccgcagcgcgcccggccagctcccatcgccccgggcgcacagcctcaaccccgacgcctcgggctccagctgcagcctggcccggacgcgctcccgagaaagctgcgccagcgtgcgccgcgcctcgtcggccgacgacatcgaggccatgcgcgccggggtgctgcccccgccaccgcgccacgccagcaccggggccatgcacccactgcgcagcggcttgctcaactccacctcggactccgacctcgtgcgctaccgcaccattagcaagattccccaaatcaccctcaactttgtggacctcaagggcgaccccttcttggcttcgcccaccagtgaccgtgagatcatagcacctaagataaaggagcgaacccacaatgtcactgagaaggtcacccaggtcctgtccctgggcgccgacgtgctgcctgagtacaagctgcaggcaccgcgcatccaccgctggaccatcctgcattacagccccttcaaggccgtgtgggactggctcatcctgctgctggtcatctacacggctgtcttcacaccctactcggctgccttcctgctgaaggagacggaagaaggcccgcctgctaccgagtgtggctacgcctgccagccgctggctgtggtggacctcatcgtggacatcatgttcattgtggacatcctcatcaacttccgcaccacctacgtcaatgccaacgaggaggtggtcagccaccccggccgcatcgccgtccactacttcaagggctggttcctcatcgacatggtggccgccatccccttcgacctgctcatcttcggctctggctctgaggagctgatcgggctgctgaagactgcgcggctgctgcggctggtgcgcgtggcgcggaagctggatcgctactcagagtacggcgcggccgtgctgttcttgctcatgtgcacctttgcgctcatcgcgcactggctagcctgcatctggtacgccatcggcaacatggagcagccacacatggactcacgcatcggctggctgcacaacctgggcgaccagataggcaaaccctacaacagcagcggcctgggcggcccctccatcaaggacaagtatgtgacggcgctctacttcaccttcagcagcctcaccagtgtgggcttcggcaacgtctctcccaacaccaactcagagaagatcttctccatctgcgtcatgctcattggctccctcatgtatgctagcatcttcggcaacgtgtcggccatcatccagcggctgtactcgggcacagcccgctaccacacacagatgctgcgggtgcgggagttcatccgcttccaccagatccccaatcccctgcgccagcgcctcgaggagtacttccagcacgcctggtcctacaccaacggcatcgacatgaacgcggtgctgaagggcttccctgagtgcctgcaggctgacatctgcctgcacctgaaccgctcactgctgcagcactgcaaacccttccgaggggccaccaagggctgccttcgggccctggccatgaagttcaagaccacacatgcaccgccaggggacacactggtgcatgctggggacctgctcaccgccctgtacttcatctcccggggctccatcgagatcctgcggggcgacgtcgtcgtggccatcctggggaagaatgacatctttggggagcctctgaacctgtatgcaaggcctggcaagtcgaacggggatgtgcgggccctcacctactgtgacctacacaagatccatcgggacgacctgctggaggtgctggacatgtaccctgagttctccgaccacttctggtccagcctggagatcaccttcaacctgcgagataccaacatgatcccgggctcccccggcagtacggagttagagggtggcttcagtcggcaacgcaagcgcaagttgtccttccgcaggcgcacggacaaggacacggagcagccaggggaggtgtcggccttggggccgggccgggcgggggcagggccgagtagccggggctggccgggggggccgtggggggagagcccgtccagtggcccctccagccctgagagcagtgaggatgagggcccaggccgcagctccagccccctccgcctggtgcccttctccagccccaggccccccggagagccgccgggtggggagcccctgatggaggactgcgagaagagcagcgacacttgcaaccccctgtcaggcgccttctcaggagtgtccaacattttcagcttctggggggacagtcggggccgccagtaccaggagctccctcgatgccccgcccccacccccagcctcctcaacatccccctctccagcccgggtcggcggccccggggcgacgtggagagcaggctggatgccctccagcgccagctcaacaggctggagacccggctgagtgcagacatggccactgtcctgcagctgctacagaggcagatgacgctggtcccgcccgcctacagtgctgtgaccaccccggggcctggccccacttccacatccccgctgttgcccgtcagccccctccccaccctcaccttggactcgctttctcaggtttcccagttcatggcgtgtgaggagctgcccccgggggccccagagcttccccaagaaggccccacacgacgcctctccctaccgggccagctgggggccctcacctcccagcccctgcacagacacggctcggacccgggcagttagtggggctgcccagtgtggacacgtggctcacccagggatcaaggcgctgctgggccgctccccttggaggccctgctcaggaggccctgaccgtggaaggggagaggaactcgaaagcacagctcctcccccagcccttgggaccatcttctcctgcagtcccctgggccccagtgagaggggcaggggcagggccggcagtaggtggggcctgtggtccccccactgccctgagggcattagctggtctaactgcccggaggcacccggccctgggccttaggcacctcaaggacttttctgctatttactgctcttattgttaaggataataattaaggatcatatgaataattaatgaagatgctgatgactatgaataataaataattatcctgaggaga

SEQ ID NO: 640 - DNA, 3884 bp, Homo sapiens
  source 1..3884: mol_type = genomic DNA
  misc_feature 1..3884: note = cDNA of KCNH2 gene SNP c.2765G>A (p.Arg922Gln)
atgccggtgcggaggggccacgtcgcgccgcagaacaccttcctggacaccatcatccgcaagtttgagggccagagccgtaagttcatcatcgccaacgctcgggtggagaactgcgccgtcatctactgcaacgacggcttctgcgagctgtgcggctactcgcgggccgaggtgatgcagcgaccctgcacctgcgacttcctgcacgggccgcgcacgcagcgccgcgctgccgcgcagatcgcgcaggcactgctgggcgccgaggagcgcaaagtggaaatcgccttctaccggaaagatgggagctgcttcctatgtctggtggatgtggtgcccgtgaagaacgaggatggggctgtcatcatgttcatcctcaatttcgaggtggtgatggagaaggacatggtggggtccccggctcatgacaccaaccaccggggcccccccaccagctggctggccccaggccgcgccaagaccttccgcctgaagctgcccgcgctgctggcgctgacggcccgggagtcgtcggtgcggtcgggcggcgcgggcggcgcgggcgccccgggggccgtggtggtggacgtggacctgacgcccgcggcacccagcagcgagtcgctggccctggacgaagtgacagccatggacaaccacgtggcagggctcgggcccgcggaggagcggcgtgcgctggtgggtcccggctctccgccccgcagcgcgcccggccagctcccatcgccccgggcgcacagcctcaaccccgacgcctcgggctccagctgcagcctggcccggacgcgctcccgagaaagctgcgccagcgtgcgccgcgcctcgtcggccgacgacatcgaggccatgcgcgccggggtgctgcccccgccaccgcgccacgccagcaccggggccatgcacccactgcgcagcggcttgctcaactccacctcggactccgacctcgtgcgctaccgcaccattagcaagattccccaaatcaccctcaactttgtggacctcaagggcgaccccttcttggcttcgcccaccagtgaccgtgagatcatagcacctaagataaaggagcgaacccacaatgtcactgagaaggtcacccaggtcctgtccctgggcgccgacgtgctgcctgagtacaagctgcaggcaccgcgcatccaccgctggaccatcctgcattacagccccttcaaggccgtgtgggactggctcatcctgctgctggtcatctacacggctgtcttcacaccctactcggctgccttcctgctgaaggagacggaagaaggcccgcctgctaccgagtgtggctacgcctgccagccgctggctgtggtggacctcatcgtggacatcatgttcattgtggacatcctcatcaacttccgcaccacctacgtcaatgccaacgaggaggtggtcagccaccccggccgcatcgccgtccactacttcaagggctggttcctcatcgacatggtggccgccatccccttcgacctgctcatcttcggctctggctctgaggagctgatcgggctgctgaagactgcgcggctgctgcggctggtgcgcgtggcgcggaagctggatcgctactcagagtacggcgcggccgtgctgttcttgctcatgtgcacctttgcgctcatcgcgcactggctagcctgcatctggtacgccatcggcaacatggagcagccacacatggactcacgcatcggctggctgcacaacctgggcgaccagataggcaaaccctacaacagcagcggcctgggcggcccctccatcaaggacaagtatgtgacggcgctctacttcaccttcagcagcctcaccagtgtgggcttcggcaacgtctctcccaacaccaactcagagaagatcttctccatctgcgtcatgctcattggctccctcatgtatgctagcatcttcggcaacgtgtcggccatcatccagcggctgtactcgggcacagcccgctaccacacacagatgctgcgggtgcgggagttcatccgcttccaccagatccccaatcccctgcgccagcgcctcgaggagtacttccagcacgcctggtcctacaccaacggcatcgacatgaacgcggtgctgaagggcttccctgagtgcctgcaggctgacatctgcctgcacctgaaccgctcactgctgcagcactgcaaacccttccgaggggccaccaagggctgccttcgggccctggccatgaagttcaagaccacacatgcaccgccaggggacacactggtgcatgctggggacctgctcaccgccctgtacttcatctcccggggctccatcgagatcctgcggggcgacgtcgtcgtggccatcctggggaagaatgacatctttggggagcctctgaacctgtatgcaaggcctggcaagtcgaacggggatgtgcgggccctcacctactgtgacctacacaagatccatcgggacgacctgctggaggtgctggacatgtaccctgagttctccgaccacttctggtccagcctggagatcaccttcaacctgcgagataccaacatgatcccgggctcccccggcagtacggagttagagggtggcttcagtcggcaacgcaagcgcaagttgtccttccgcaggcgcacggacaaggacacggagcagccaggggaggtgtcggccttggggccgggccgggcgggggcagggccgagtagccggggccagccgggggggccgtggggggagagcccgtccagtggcccctccagccctgagagcagtgaggatgagggcccaggccgcagctccagccccctccgcctggtgcccttctccagccccaggccccccggagagccgccgggtggggagcccctgatggaggactgcgagaagagcagcgacacttgcaaccccctgtcaggcgccttctcaggagtgtccaacattttcagcttctggggggacagtcggggccgccagtaccaggagctccctcgatgccccgcccccacccccagcctcctcaacatccccctctccagcccgggtcggcggccccggggcgacgtggagagcaggctggatgccctccagcgccagctcaacaggctggagacccggctgagtgcagacatggccactgtcctgcagctgctacagaggcagatgacgctggtcccgcccgcctacagtgctgtgaccaccccggggcctggccccacttccacatccccgctgttgcccgtcagccccctccccaccctcaccttggactcgctttctcaggtttcccagttcatggcgtgtgaggagctgcccccgggggccccagagcttccccaagaaggccccacacgacgcctctccctaccgggccagctgggggccctcacctcccagcccctgcacagacacggctcggacccgggcagttagtggggctgcccagtgtggacacgtggctcacccagggatcaaggcgctgctgggccgctccccttggaggccctgctcaggaggccctgaccgtggaaggggagaggaactcgaaagcacagctcctcccccagcccttgggaccatcttctcctgcagtcccctgggccccagtgagaggggcaggggcagggccggcagtaggtggggcctgtggtccccccactgccctgagggcattagctggtctaactgcccggaggcacccggccctgggccttaggcacctcaaggacttttctgctatttactgctcttattgttaaggataataattaaggatcatatgaataattaatgaagatgctgatgactatgaataataaataattatcctgaggaga

SEQ ID NO: 641 - DNA, 3884 bp, Homo sapiens
  source 1..3884: mol_type = genomic DNA
  misc_feature 1..3884: note = cDNA of KCNH2 gene SNP c.2765G>T (p.Arg922Leu)
atgccggtgcggaggggccacgtcgcgccgcagaacaccttcctggacaccatcatccgcaagtttgagggccagagccgtaagttcatcatcgccaacgctcgggtggagaactgcgccgtcatctactgcaacgacggcttctgcgagctgtgcggctactcgcgggccgaggtgatgcagcgaccctgcacctgcgacttcctgcacgggccgcgcacgcagcgccgcgctgccgcgcagatcgcgcaggcactgctgggcgccgaggagcgcaaagtggaaatcgccttctaccggaaagatgggagctgcttcctatgtctggtggatgtggtgcccgtgaagaacgaggatggggctgtcatcatgttcatcctcaatttcgaggtggtgatggagaaggacatggtggggtccccggctcatgacaccaaccaccggggcccccccaccagctggctggccccaggccgcgccaagaccttccgcctgaagctgcccgcgctgctggcgctgacggcccgggagtcgtcggtgcggtcgggcggcgcgggcggcgcgggcgccccgggggccgtggtggtggacgtggacctgacgcccgcggcacccagcagcgagtcgctggccctggacgaagtgacagccatggacaaccacgtggcagggctcgggcccgcggaggagcggcgtgcgctggtgggtcccggctctccgccccgcagcgcgcccggccagctcccatcgccccgggcgcacagcctcaaccccgacgcctcgggctccagctgcagcctggcccggacgcgctcccgagaaagctgcgccagcgtgcgccgcgcctcgtcggccgacgacatcgaggccatgcgcgccggggtgctgcccccgccaccgcgccacgccagcaccggggccatgcacccactgcgcagcggcttgctcaactccacctcggactccgacctcgtgcgctaccgcaccattagcaagattccccaaatcaccctcaactttgtggacctcaagggcgaccccttcttggcttcgcccaccagtgaccgtgagatcatagcacctaagataaaggagcgaacccacaatgtcactgagaaggtcacccaggtcctgtccctgggcgccgacgtgctgcctgagtacaagctgcaggcaccgcgcatccaccgctggaccatcctgcattacagccccttcaaggccgtgtgggactggctcatcctgctgctggtcatctacacggctgtcttcacaccctactcggctgccttcctgctgaaggagacggaagaaggcccgcctgctaccgagtgtggctacgcctgccagccgctggctgtggtggacctcatcgtggacatcatgttcattgtggacatcctcatcaacttccgcaccacctacgtcaatgccaacgaggaggtggtcagccaccccggccgcatcgccgtccactacttcaagggctggttcctcatcgacatggtggccgccatccccttcgacctgctcatcttcggctctggctctgaggagctgatcgggctgctgaagactgcgcggctgctgcggctggtgcgcgtggcgcggaagctggatcgctactcagagtacggcgcggccgtgctgttcttgctcatgtgcacctttgcgctcatcgcgcactggctagcctgcatctggtacgccatcggcaacatggagcagccacacatggactcacgcatcggctggctgcacaacctgggcgaccagataggcaaaccctacaacagcagcggcctgggcggcccctccatcaaggacaagtatgtgacggcgctctacttcaccttcagcagcctcaccagtgtgggcttcggcaacgtctctcccaacaccaactcagagaagatcttctccatctgcgtcatgctcattggctccctcatgtatgctagcatcttcggcaacgtgtcggccatcatccagcggctgtactcgggcacagcccgctaccacacacagatgctgcgggtgcgggagttcatccgcttccaccagatccccaatcccctgcgccagcgcctcgaggagtacttccagcacgcctggtcctacaccaacggcatcgacatgaacgcggtgctgaagggcttccctgagtgcctgcaggctgacatctgcctgcacctgaaccgctcactgctgcagcactgcaaacccttccgaggggccaccaagggctgccttcgggccctggccatgaagttcaagaccacacatgcaccgccaggggacacactggtgcatgctggggacctgctcaccgccctgtacttcatctcccggggctccatcgagatcctgcggggcgacgtcgtcgtggccatcctggggaagaatgacatctttggggagcctctgaacctgtatgcaaggcctggcaagtcgaacggggatgtgcgggccctcacctactgtgacctacacaagatccatcgggacgacctgctggaggtgctggacatgtaccctgagttctccgaccacttctggtccagcctggagatcaccttcaacctgcgagataccaacatgatcccgggctcccccggcagtacggagttagagggtggcttcagtcggcaacgcaagcgcaagttgtccttccgcaggcgcacggacaaggacacggagcagccaggggaggtgtcggccttggggccgggccgggcgggggcagggccgagtagccggggcctgccgggggggccgtggggggagagcccgtccagtggcccctccagccctgagagcagtgaggatgagggcccaggccgcagctccagccccctccgcctggtgcccttctccagccccaggccccccggagagccgccgggtggggagcccctgatggaggactgcgagaagagcagcgacacttgcaaccccctgtcaggcgccttctcaggagtgtccaacattttcagcttctggggggacagtcggggccgccagtaccaggagctccctcgatgccccgcccccacccccagcctcctcaacatccccctctccagcccgggtcggcggccccggggcgacgtggagagcaggctggatgccctccagcgccagctcaacaggctggagacccggctgagtgcagacatggccactgtcctgcagctgctacagaggcagatgacgctggtcccgcccgcctacagtgctgtgaccaccccggggcctggccccacttccacatccccgctgttgcccgtcagccccctccccaccctcaccttggactcgctttctcaggtttcccagttcatggcgtgtgaggagctgcccccgggggccccagagcttccccaagaaggccccacacgacgcctctccctaccgggccagctgggggccctcacctcccagcccctgcacagacacggctcggacccgggcagttagtggggctgcccagtgtggacacgtggctcacccagggatcaaggcgctgctgggccgctccccttggaggccctgctcaggaggccctgaccgtggaaggggagaggaactcgaaagcacagctcctcccccagcccttgggaccatcttctcctgcagtcccctgggccccagtgagaggggcaggggcagggccggcagtaggtggggcctgtggtccccccactgccctgagggcattagctggtctaactgcccggaggcacccggccctgggccttaggcacctcaaggacttttctgctatttactgctcttattgttaaggataataattaaggatcatatgaataattaatgaagatgctgatgactatgaataataaataattatcctgaggaga

SEQ ID NO: 642 - DNA, 3884 bp, Homo sapiens
  source 1..3884: mol_type = genomic DNA
  misc_feature 1..3884: note = cDNA of KCNH2 gene SNP c.2768C>A (p.Pro923Gln)
atgccggtgcggaggggccacgtcgcgccgcagaacaccttcctggacaccatcatccgcaagtttgagggccagagccgtaagttcatcatcgccaacgctcgggtggagaactgcgccgtcatctactgcaacgacggcttctgcgagctgtgcggctactcgcgggccgaggtgatgcagcgaccctgcacctgcgacttcctgcacgggccgcgcacgcagcgccgcgctgccgcgcagatcgcgcaggcactgctgggcgccgaggagcgcaaagtggaaatcgccttctaccggaaagatgggagctgcttcctatgtctggtggatgtggtgcccgtgaagaacgaggatggggctgtcatcatgttcatcctcaatttcgaggtggtgatggagaaggacatggtggggtccccggctcatgacaccaaccaccggggcccccccaccagctggctggccccaggccgcgccaagaccttccgcctgaagctgcccgcgctgctggcgctgacggcccgggagtcgtcggtgcggtcgggcggcgcgggcggcgcgggcgccccgggggccgtggtggtggacgtggacctgacgcccgcggcacccagcagcgagtcgctggccctggacgaagtgacagccatggacaaccacgtggcagggctcgggcccgcggaggagcggcgtgcgctggtgggtcccggctctccgccccgcagcgcgcccggccagctcccatcgccccgggcgcacagcctcaaccccgacgcctcgggctccagctgcagcctggcccggacgcgctcccgagaaagctgcgccagcgtgcgccgcgcctcgtcggccgacgacatcgaggccatgcgcgccggggtgctgcccccgccaccgcgccacgccagcaccggggccatgcacccactgcgcagcggcttgctcaactccacctcggactccgacctcgtgcgctaccgcaccattagcaagattccccaaatcaccctcaactttgtggacctcaagggcgaccccttcttggcttcgcccaccagtgaccgtgagatcatagcacctaagataaaggagcgaacccacaatgtcactgagaaggtcacccaggtcctgtccctgggcgccgacgtgctgcctgagtacaagctgcaggcaccgcgcatccaccgctggaccatcctgcattacagccccttcaaggccgtgtgggactggctcatcctgctgctggtcatctacacggctgtcttcacaccctactcggctgccttcctgctgaaggagacggaagaaggcccgcctgctaccgagtgtggctacgcctgccagccgctggctgtggtggacctcatcgtggacatcatgttcattgtggacatcctcatcaacttccgcaccacctacgtcaatgccaacgaggaggtggtcagccaccccggccgcatcgccgtccactacttcaagggctggttcctcatcgacatggtggccgccatccccttcgacctgctcatcttcggctctggctctgaggagctgatcgggctgctgaagactgcgcggctgctgcggctggtgcgcgtggcgcggaagctggatcgctactcagagtacggcgcggccgtgctgttcttgctcatgtgcacctttgcgctcatcgcgcactggctagcctgcatctggtacgccatcggcaacatggagcagccacacatggactcacgcatcggctggctgcacaacctgggcgaccagataggcaaaccctacaacagcagcggcctgggcggcccctccatcaaggacaagtatgtgacggcgctctacttcaccttcagcagcctcaccagtgtgggcttcggcaacgtctctcccaacaccaactcagagaagatcttctccatctgcgtcatgctcattggctccctcatgtatgctagcatcttcggcaacgtgtcggccatcatccagcggctgtactcgggcacagcccgctaccacacacagatgctgcgggtgcgggagttcatccgcttccaccagatccccaatcccctgcgccagcgcctcgaggagtacttccagcacgcctggtcctacaccaacggcatcgacatgaacgcggtgctgaagggcttccctgagtgcctgcaggctgacatctgcctgcacctgaaccgctcactgctgcagcactgcaaacccttccgaggggccaccaagggctgccttcgggccctggccatgaagttcaagaccacacatgcaccgccaggggacacactggtgcatgctggggacctgctcaccgccctgtacttcatctcccggggctccatcgagatcctgcggggcgacgtcgtcgtggccatcctggggaagaatgacatctttggggagcctctgaacctgtatgcaaggcctggcaagtcgaacggggatgtgcgggccctcacctactgtgacctacacaagatccatcgggacgacctgctggaggtgctggacatgtaccctgagttctccgaccacttctggtccagcctggagatcaccttcaacctgcgagataccaacatgatcccgggctcccccggcagtacggagttagagggtggcttcagtcggcaacgcaagcgcaagttgtccttccgcaggcgcacggacaaggacacggagcagccaggggaggtgtcggccttggggccgggccgggcgggggcagggccgagtagccggggccggcagggggggccgtggggggagagcccgtccagtggcccctccagccctgagagcagtgaggatgagggcccaggccgcagctccagccccctccgcctggtgcccttctccagccccaggccccccggagagccgccgggtggggagcccctgatggaggactgcgagaagagcagcgacacttgcaaccccctgtcaggcgccttctcaggagtgtccaacattttcagcttctggggggacagtcggggccgccagtaccaggagctccctcgatgccccgcccccacccccagcctcctcaacatccccctctccagcccgggtcggcggccccggggcgacgtggagagcaggctggatgccctccagcgccagctcaacaggctggagacccggctgagtgcagacatggccactgtcctgcagctgctacagaggcagatgacgctggtcccgcccgcctacagtgctgtgaccaccccggggcctggccccacttccacatccccgctgttgcccgtcagccccctccccaccctcaccttggactcgctttctcaggtttcccagttcatggcgtgtgaggagctgcccccgggggccccagagcttccccaagaaggccccacacgacgcctctccctaccgggccagctgggggccctcacctcccagcccctgcacagacacggctcggacccgggcagttagtggggctgcccagtgtggacacgtggctcacccagggatcaaggcgctgctgggccgctccccttggaggccctgctcaggaggccctgaccgtggaaggggagaggaactcgaaagcacagctcctcccccagcccttgggaccatcttctcctgcagtcccctgggccccagtgagaggggcaggggcagggccggcagtaggtggggcctgtggtccccccactgccctgagggcattagctggtctaactgcccggaggcacccggccctgggccttaggcacctcaaggacttttctgctatttactgctcttattgttaaggataataattaaggatcatatgaataattaatgaagatgctgatgactatgaataataaataattatcctgaggaga

SEQ ID NO: 643 - DNA, 3884 bp, Homo sapiens
  source 1..3884: mol_type = genomic DNA
  misc_feature 1..3884: note = cDNA of KCNH2 gene SNP c.2768C>T (p.Pro923Leu)
atgccggtgcggaggggccacgtcgcgccgcagaacaccttcctggacaccatcatccgcaagtttgagggccagagccgtaagttcatcatcgccaacgctcgggtggagaactgcgccgtcatctactgcaacgacggcttctgcgagctgtgcggctactcgcgggccgaggtgatgcagcgaccctgcacctgcgacttcctgcacgggccgcgcacgcagcgccgcgctgccgcgcagatcgcgcaggcactgctgggcgccgaggagcgcaaagtggaaatcgccttctaccggaaagatgggagctgcttcctatgtctggtggatgtggtgcccgtgaagaacgaggatggggctgtcatcatgttcatcctcaatttcgaggtggtgatggagaaggacatggtggggtccccggctcatgacaccaaccaccggggcccccccaccagctggctggccccaggccgcgccaagaccttccgcctgaagctgcccgcgctgctggcgctgacggcccgggagtcgtcggtgcggtcgggcggcgcgggcggcgcgggcgccccgggggccgtggtggtggacgtggacctgacgcccgcggcacccagcagcgagtcgctggccctggacgaagtgacagccatggacaaccacgtggcagggctcgggcccgcggaggagcggcgtgcgctggtgggtcccggctctccgccccgcagcgcgcccggccagctcccatcgccccgggcgcacagcctcaaccccgacgcctcgggctccagctgcagcctggcccggacgcgctcccgagaaagctgcgccagcgtgcgccgcgcctcgtcggccgacgacatcgaggccatgcgcgccggggtgctgcccccgccaccgcgccacgccagcaccggggccatgcacccactgcgcagcggcttgctcaactccacctcggactccgacctcgtgcgctaccgcaccattagcaagattccccaaatcaccctcaactttgtggacctcaagggcgaccccttcttggcttcgcccaccagtgaccgtgagatcatagcacctaagataaaggagcgaacccacaatgtcactgagaaggtcacccaggtcctgtccctgggcgccgacgtgctgcctgagtacaagctgcaggcaccgcgcatccaccgctggaccatcctgcattacagccccttcaaggccgtgtgggactggctcatcctgctgctggtcatctacacggctgtcttcacaccctactcggctgccttcctgctgaaggagacggaagaaggcccgcctgctaccgagtgtggctacgcctgccagccgctggctgtggtggacctcatcgtggacatcatgttcattgtggacatcctcatcaacttccgcaccacctacgtcaatgccaacgaggaggtggtcagccaccccggccgcatcgccgtccactacttcaagggctggttcctcatcgacatggtggccgccatccccttcgacctgctcatcttcggctctggctctgaggagctgatcgggctgctgaagactgcgcggctgctgcggctggtgcgcgtggcgcggaagctggatcgctactcagagtacggcgcggccgtgctgttcttgctcatgtgcacctttgcgctcatcgcgcactggctagcctgcatctggtacgccatcggcaacatggagcagccacacatggactcacgcatcggctggctgcacaacctgggcgaccagataggcaaaccctacaacagcagcggcctgggcggcccctccatcaaggacaagtatgtgacggcgctctacttcaccttcagcagcctcaccagtgtgggcttcggcaacgtctctcccaacaccaactcagagaagatcttctccatctgcgtcatgctcattggctccctcatgtatgctagcatcttcggcaacgtgtcggccatcatccagcggctgtactcgggcacagcccgctaccacacacagatgctgcgggtgcgggagttcatccgcttccaccagatccccaatcccctgcgccagcgcctcgaggagtacttccagcacgcctggtcctacaccaacggcatcgacatgaacgcggtgctgaagggcttccctgagtgcctgcaggctgacatctgcctgcacctgaaccgctcactgctgcagcactgcaaacccttccgaggggccaccaagggctgccttcgggccctggccatgaagttcaagaccacacatgcaccgccaggggacacactggtgcatgctggggacctgctcaccgccctgtacttcatctcccggggctccatcgagatcctgcggggcgacgtcgtcgtggccatcctggggaagaatgacatctttggggagcctctgaacctgtatgcaaggcctggcaagtcgaacggggatgtgcgggccctcacctactgtgacctacacaagatccatcgggacgacctgctggaggtgctggacatgtaccctgagttctccgaccacttctggtccagcctggagatcaccttcaacctgcgagataccaacatgatcccgggctcccccggcagtacggagttagagggtggcttcagtcggcaacgcaagcgcaagttgtccttccgcaggcgcacggacaaggacacggagcagccaggggaggtgtcggccttggggccgggccgggcgggggcagggccgagtagccggggccggctgggggggccgtggggggagagcccgtccagtggcccctccagccctgagagcagtgaggatgagggcccaggccgcagctccagccccctccgcctggtgcccttctccagccccaggccccccggagagccgccgggtggggagcccctgatggaggactgcgagaagagcagcgacacttgcaaccccctgtcaggcgccttctcaggagtgtccaacattttcagcttctggggggacagtcggggccgccagtaccaggagctccctcgatgccccgcccccacccccagcctcctcaacatccccctctccagcccgggtcggcggccccggggcgacgtggagagcaggctggatgccctccagcgccagctcaacaggctggagacccggctgagtgcagacatggccactgtcctgcagctgctacagaggcagatgacgctggtcccgcccgcctacagtgctgtgaccaccccggggcctggccccacttccacatccccgctgttgcccgtcagccccctccccaccctcaccttggactcgctttctcaggtttcccagttcatggcgtgtgaggagctgcccccgggggccccagagcttccccaagaaggccccacacgacgcctctccctaccgggccagctgggggccctcacctcccagcccctgcacagacacggctcggacccgggcagttagtggggctgcccagtgtggacacgtggctcacccagggatcaaggcgctgctgggccgctccccttggaggccctgctcaggaggccctgaccgtggaaggggagaggaactcgaaagcacagctcctcccccagcccttgggaccatcttctcctgcagtcccctgggccccagtgagaggggcaggggcagggccggcagtaggtggggcctgtggtccccccactgccctgagggcattagctggtctaactgcccggaggcacccggccctgggccttaggcacctcaaggacttttctgctatttactgctcttattgttaaggataataattaaggatcatatgaataattaatgaagatgctgatgactatgaataataaataattatcctgaggaga

SEQ ID NO: 644 - DNA, 3884 bp, Homo sapiens
  source 1..3884: mol_type = genomic DNA
  misc_feature 1..3884: note = cDNA of KCNH2 gene SNP c.2770G>A (p.Gly924Arg)
atgccggtgcggaggggccacgtcgcgccgcagaacaccttcctggacaccatcatccgcaagtttgagggccagagccgtaagttcatcatcgccaacgctcgggtggagaactgcgccgtcatctactgcaacgacggcttctgcgagctgtgcggctactcgcgggccgaggtgatgcagcgaccctgcacctgcgacttcctgcacgggccgcgcacgcagcgccgcgctgccgcgcagatcgcgcaggcactgctgggcgccgaggagcgcaaagtggaaatcgccttctaccggaaagatgggagctgcttcctatgtctggtggatgtggtgcccgtgaagaacgaggatggggctgtcatcatgttcatcctcaatttcgaggtggtgatggagaaggacatggtggggtccccggctcatgacaccaaccaccggggcccccccaccagctggctggccccaggccgcgccaagaccttccgcctgaagctgcccgcgctgctggcgctgacggcccgggagtcgtcggtgcggtcgggcggcgcgggcggcgcgggcgccccgggggccgtggtggtggacgtggacctgacgcccgcggcacccagcagcgagtcgctggccctggacgaagtgacagccatggacaaccacgtggcagggctcgggcccgcggaggagcggcgtgcgctggtgggtcccggctctccgccccgcagcgcgcccggccagctcccatcgccccgggcgcacagcctcaaccccgacgcctcgggctccagctgcagcctggcccggacgcgctcccgagaaagctgcgccagcgtgcgccgcgcctcgtcggccgacgacatcgaggccatgcgcgccggggtgctgcccccgccaccgcgccacgccagcaccggggccatgcacccactgcgcagcggcttgctcaactccacctcggactccgacctcgtgcgctaccgcaccattagcaagattccccaaatcaccctcaactttgtggacctcaagggcgaccccttcttggcttcgcccaccagtgaccgtgagatcatagcacctaagataaaggagcgaacccacaatgtcactgagaaggtcacccaggtcctgtccctgggcgccgacgtgctgcctgagtacaagctgcaggcaccgcgcatccaccgctggaccatcctgcattacagccccttcaaggccgtgtgggactggctcatcctgctgctggtcatctacacggctgtcttcacaccctactcggctgccttcctgctgaaggagacggaagaaggcccgcctgctaccgagtgtggctacgcctgccagccgctggctgtggtggacctcatcgtggacatcatgttcattgtggacatcctcatcaacttccgcaccacctacgtcaatgccaacgaggaggtggtcagccaccccggccgcatcgccgtccactacttcaagggctggttcctcatcgacatggtggccgccatccccttcgacctgctcatcttcggctctggctctgaggagctgatcgggctgctgaagactgcgcggctgctgcggctggtgcgcgtggcgcggaagctggatcgctactcagagtacggcgcggccgtgctgttcttgctcatgtgcacctttgcgctcatcgcgcactggctagcctgcatctggtacgccatcggcaacatggagcagccacacatggactcacgcatcggctggctgcacaacctgggcgaccagataggcaaaccctacaacagcagcggcctgggcggcccctccatcaaggacaagtatgtgacggcgctctacttcaccttcagcagcctcaccagtgtgggcttcggcaacgtctctcccaacaccaactcagagaagatcttctccatctgcgtcatgctcattggctccctcatgtatgctagcatcttcggcaacgtgtcggccatcatccagcggctgtactcgggcacagcccgctaccacacacagatgctgcgggtgcgggagttcatccgcttccaccagatccccaatcccctgcgccagcgcctcgaggagtacttccagcacgcctggtcctacaccaacggcatcgacatgaacgcggtgctgaagggcttccctgagtgcctgcaggctgacatctgcctgcacctgaaccgctcactgctgcagcactgcaaacccttccgaggggccaccaagggctgccttcgggccctggccatgaagttcaagaccacacatgcaccgccaggggacacactggtgcatgctggggacctgctcaccgccctgtacttcatctcccggggctccatcgagatcctgcggggcgacgtcgtcgtggccatcctggggaagaatgacatctttggggagcctctgaacctgtatgcaaggcctggcaagtcgaacggggatgtgcgggccctcacctactgtgacctacacaagatccatcgggacgacctgctggaggtgctggacatgtaccctgagttctccgaccacttctggtccagcctggagatcaccttcaacctgcgagataccaacatgatcccgggctcccccggcagtacggagttagagggtggcttcagtcggcaacgcaagcgcaagttgtccttccgcaggcgcacggacaaggacacggagcagccaggggaggtgtcggccttggggccgggccgggcgggggcagggccgagtagccggggccggccgagggggccgtggggggagagcccgtccagtggcccctccagccctgagagcagtgaggatgagggcccaggccgcagctccagccccctccgcctggtgcccttctccagccccaggccccccggagagccgccgggtggggagcccctgatggaggactgcgagaagagcagcgacacttgcaaccccctgtcaggcgccttctcaggagtgtccaacattttcagcttctggggggacagtcggggccgccagtaccaggagctccctcgatgccccgcccccacccccagcctcctcaacatccccctctccagcccgggtcggcggccccggggcgacgtggagagcaggctggatgccctccagcgccagctcaacaggctggagacccggctgagtgcagacatggccactgtcctgcagctgctacagaggcagatgacgctggtcccgcccgcctacagtgctgtgaccaccccggggcctggccccacttccacatccccgctgttgcccgtcagccccctccccaccctcaccttggactcgctttctcaggtttcccagttcatggcgtgtgaggagctgcccccgggggccccagagcttccccaagaaggccccacacgacgcctctccctaccgggccagctgggggccctcacctcccagcccctgcacagacacggctcggacccgggcagttagtggggctgcccagtgtggacacgtggctcacccagggatcaaggcgctgctgggccgctccccttggaggccctgctcaggaggccctgaccgtggaaggggagaggaactcgaaagcacagctcctcccccagcccttgggaccatcttctcctgcagtcccctgggccccagtgagaggggcaggggcagggccggcagtaggtggggcctgtggtccccccactgccctgagggcattagctggtctaactgcccggaggcacccggccctgggccttaggcacctcaaggacttttctgctatttactgctcttattgttaaggataataattaaggatcatatgaataattaatgaagatgctgatgactatgaataataaataattatcctgaggaga

SEQ ID NO: 645 - DNA, 3884 bp, Homo sapiens
  source 1..3884: mol_type = genomic DNA
  misc_feature 1..3884: note = cDNA of KCNH2 gene SNP c.2770G>T (p.Gly924Trp)
atgccggtgcggaggggccacgtcgcgccgcagaacaccttcctggacaccatcatccgcaagtttgagggccagagccgtaagttcatcatcgccaacgctcgggtggagaactgcgccgtcatctactgcaacgacggcttctgcgagctgtgcggctactcgcgggccgaggtgatgcagcgaccctgcacctgcgacttcctgcacgggccgcgcacgcagcgccgcgctgccgcgcagatcgcgcaggcactgctgggcgccgaggagcgcaaagtggaaatcgccttctaccggaaagatgggagctgcttcctatgtctggtggatgtggtgcccgtgaagaacgaggatggggctgtcatcatgttcatcctcaatttcgaggtggtgatggagaaggacatggtggggtccccggctcatgacaccaaccaccggggcccccccaccagctggctggccccaggccgcgccaagaccttccgcctgaagctgcccgcgctgctggcgctgacggcccgggagtcgtcggtgcggtcgggcggcgcgggcggcgcgggcgccccgggggccgtggtggtggacgtggacctgacgcccgcggcacccagcagcgagtcgctggccctggacgaagtgacagccatggacaaccacgtggcagggctcgggcccgcggaggagcggcgtgcgctggtgggtcccggctctccgccccgcagcgcgcccggccagctcccatcgccccgggcgcacagcctcaaccccgacgcctcgggctccagctgcagcctggcccggacgcgctcccgagaaagctgcgccagcgtgcgccgcgcctcgtcggccgacgacatcgaggccatgcgcgccggggtgctgcccccgccaccgcgccacgccagcaccggggccatgcacccactgcgcagcggcttgctcaactccacctcggactccgacctcgtgcgctaccgcaccattagcaagattccccaaatcaccctcaactttgtggacctcaagggcgaccccttcttggcttcgcccaccagtgaccgtgagatcatagcacctaagataaaggagcgaacccacaatgtcactgagaaggtcacccaggtcctgtccctgggcgccgacgtgctgcctgagtacaagctgcaggcaccgcgcatccaccgctggaccatcctgcattacagccccttcaaggccgtgtgggactggctcatcctgctgctggtcatctacacggctgtcttcacaccctactcggctgccttcctgctgaaggagacggaagaaggcccgcctgctaccgagtgtggctacgcctgccagccgctggctgtggtggacctcatcgtggacatcatgttcattgtggacatcctcatcaacttccgcaccacctacgtcaatgccaacgaggaggtggtcagccaccccggccgcatcgccgtccactacttcaagggctggttcctcatcgacatggtggccgccatccccttcgacctgctcatcttcggctctggctctgaggagctgatcgggctgctgaagactgcgcggctgctgcggctggtgcgcgtggcgcggaagctggatcgctactcagagtacggcgcggccgtgctgttcttgctcatgtgcacctttgcgctcatcgcgcactggctagcctgcatctggtacgccatcggcaacatggagcagccacacatggactcacgcatcggctggctgcacaacctgggcgaccagataggcaaaccctacaacagcagcggcctgggcggcccctccatcaaggacaagtatgtgacggcgctctacttcaccttcagcagcctcaccagtgtgggcttcggcaacgtctctcccaacaccaactcagagaagatcttctccatctgcgtcatgctcattggctccctcatgtatgctagcatcttcggcaacgtgtcggccatcatccagcggctgtactcgggcacagcccgctaccacacacagatgctgcgggtgcgggagttcatccgcttccaccagatccccaatcccctgcgccagcgcctcgaggagtacttccagcacgcctggtcctacaccaacggcatcgacatgaacgcggtgctgaagggcttccctgagtgcctgcaggctgacatctgcctgcacctgaaccgctcactgctgcagcactgcaaacccttccgaggggccaccaagggctgccttcgggccctggccatgaagttcaagaccacacatgcaccgccaggggacacactggtgcatgctggggacctgctcaccgccctgtacttcatctcccggggctccatcgagatcctgcggggcgacgtcgtcgtggccatcctggggaagaatgacatctttggggagcctctgaacctgtatgcaaggcctggcaagtcgaacggggatgtgcgggccctcacctactgtgacctacacaagatccatcgggacgacctgctggaggtgctggacatgtaccctgagttctccgaccacttctggtccagcctggagatcaccttcaacctgcgagataccaacatgatcccgggctcccccggcagtacggagttagagggtggcttcagtcggcaacgcaagcgcaagttgtccttccgcaggcgcacggacaaggacacggagcagccaggggaggtgtcggccttggggccgggccgggcgggggcagggccgagtagccggggccggccgtgggggccgtggggggagagcccgtccagtggcccctccagccctgagagcagtgaggatgagggcccaggccgcagctccagccccctccgcctggtgcccttctccagccccaggccccccggagagccgccgggtggggagcccctgatggaggactgcgagaagagcagcgacacttgcaaccccctgtcaggcgccttctcaggagtgtccaacattttcagcttctggggggacagtcggggccgccagtaccaggagctccctcgatgccccgcccccacccccagcctcctcaacatccccctctccagcccgggtcggcggccccggggcgacgtggagagcaggctggatgccctccagcgccagctcaacaggctggagacccggctgagtgcagacatggccactgtcctgcagctgctacagaggcagatgacgctggtcccgcccgcctacagtgctgtgaccaccccggggcctggccccacttccacatccccgctgttgcccgtcagccccctccccaccctcaccttggactcgctttctcaggtttcccagttcatggcgtgtgaggagctgcccccgggggccccagagcttccccaagaaggccccacacgacgcctctccctaccgggccagctgggggccctcacctcccagcccctgcacagacacggctcggacccgggcagttagtggggctgcccagtgtggacacgtggctcacccagggatcaaggcgctgctgggccgctccccttggaggccctgctcaggaggccctgaccgtggaaggggagaggaactcgaaagcacagctcctcccccagcccttgggaccatcttctcctgcagtcccctgggccccagtgagaggggcaggggcagggccggcagtaggtggggcctgtggtccccccactgccctgagggcattagctggtctaactgcccggaggcacccggccctgggccttaggcacctcaaggacttttctgctatttactgctcttattgttaaggataataattaaggatcatatgaataattaatgaagatgctgatgactatgaataataaataattatcctgaggaga

SEQ ID NO: 646 - DNA, 3884 bp, Homo sapiens
  source 1..3884: mol_type = genomic DNA
  misc_feature 1..3884: note = cDNA of KCNH2 gene SNP c.2771G>A (p.Gly924Glu)
atgccggtgcggaggggccacgtcgcgccgcagaacaccttcctggacaccatcatccgcaagtttgagggccagagccgtaagttcatcatcgccaacgctcgggtggagaactgcgccgtcatctactgcaacgacggcttctgcgagctgtgcggctactcgcgggccgaggtgatgcagcgaccctgcacctgcgacttcctgcacgggccgcgcacgcagcgccgcgctgccgcgcagatcgcgcaggcactgctgggcgccgaggagcgcaaagtggaaatcgccttctaccggaaagatgggagctgcttcctatgtctggtggatgtggtgcccgtgaagaacgaggatggggctgtcatcatgttcatcctcaatttcgaggtggtgatggagaaggacatggtggggtccccggctcatgacaccaaccaccggggcccccccaccagctggctggccccaggccgcgccaagaccttccgcctgaagctgcccgcgctgctggcgctgacggcccgggagtcgtcggtgcggtcgggcggcgcgggcggcgcgggcgccccgggggccgtggtggtggacgtggacctgacgcccgcggcacccagcagcgagtcgctggccctggacgaagtgacagccatggacaaccacgtggcagggctcgggcccgcggaggagcggcgtgcgctggtgggtcccggctctccgccccgcagcgcgcccggccagctcccatcgccccgggcgcacagcctcaaccccgacgcctcgggctccagctgcagcctggcccggacgcgctcccgagaaagctgcgccagcgtgcgccgcgcctcgtcggccgacgacatcgaggccatgcgcgccggggtgctgcccccgccaccgcgccacgccagcaccggggccatgcacccactgcgcagcggcttgctcaactccacctcggactccgacctcgtgcgctaccgcaccattagcaagattccccaaatcaccctcaactttgtggacctcaagggcgaccccttcttggcttcgcccaccagtgaccgtgagatcatagcacctaagataaaggagcgaacccacaatgtcactgagaaggtcacccaggtcctgtccctgggcgccgacgtgctgcctgagtacaagctgcaggcaccgcgcatccaccgctggaccatcctgcattacagccccttcaaggccgtgtgggactggctcatcctgctgctggtcatctacacggctgtcttcacaccctactcggctgccttcctgctgaaggagacggaagaaggcccgcctgctaccgagtgtggctacgcctgccagccgctggctgtggtggacctcatcgtggacatcatgttcattgtggacatcctcatcaacttccgcaccacctacgtcaatgccaacgaggaggtggtcagccaccccggccgcatcgccgtccactacttcaagggctggttcctcatcgacatggtggccgccatccccttcgacctgctcatcttcggctctggctctgaggagctgatcgggctgctgaagactgcgcggctgctgcggctggtgcgcgtggcgcggaagctggatcgctactcagagtacggcgcggccgtgctgttcttgctcatgtgcacctttgcgctcatcgcgcactggctagcctgcatctggtacgccatcggcaacatggagcagccacacatggactcacgcatcggctggctgcacaacctgggcgaccagataggcaaaccctacaacagcagcggcctgggcggcccctccatcaaggacaagtatgtgacggcgctctacttcaccttcagcagcctcaccagtgtgggcttcggcaacgtctctcccaacaccaactcagagaagatcttctccatctgcgtcatgctcattggctccctcatgtatgctagcatcttcggcaacgtgtcggccatcatccagcggctgtactcgggcacagcccgctaccacacacagatgctgcgggtgcgggagttcatccgcttccaccagatccccaatcccctgcgccagcgcctcgaggagtacttccagcacgcctggtcctacaccaacggcatcgacatgaacgcggtgctgaagggcttccctgagtgcctgcaggctgacatctgcctgcacctgaaccgctcactgctgcagcactgcaaacccttccgaggggccaccaagggctgccttcgggccctggccatgaagttcaagaccacacatgcaccgccaggggacacactggtgcatgctggggacctgctcaccgccctgtacttcatctcccggggctccatcgagatcctgcggggcgacgtcgtcgtggccatcctggggaagaatgacatctttggggagcctctgaacctgtatgcaaggcctggcaagtcgaacggggatgtgcgggccctcacctactgtgacctacacaagatccatcgggacgacctgctggaggtgctggacatgtaccctgagttctccgaccacttctggtccagcctggagatcaccttcaacctgcgagataccaacatgatcccgggctcccccggcagtacggagttagagggtggcttcagtcggcaacgcaagcgcaagttgtccttccgcaggcgcacggacaaggacacggagcagccaggggaggtgtcggccttggggccgggccgggcgggggcagggccgagtagccggggccggccggaggggccgtggggggagagcccgtccagtggcccctccagccctgagagcagtgaggatgagggcccaggccgcagctccagccccctccgcctggtgcccttctccagccccaggccccccggagagccgccgggtggggagcccctgatggaggactgcgagaagagcagcgacacttgcaaccccctgtcaggcgccttctcaggagtgtccaacattttcagcttctggggggacagtcggggccgccagtaccaggagctccctcgatgccccgcccccacccccagcctcctcaacatccccctctccagcccgggtcggcggccccggggcgacgtggagagcaggctggatgccctccagcgccagctcaacaggctggagacccggctgagtgcagacatggccactgtcctgcagctgctacagaggcagatgacgctggtcccgcccgcctacagtgctgtgaccaccccggggcctggccccacttccacatccccgctgttgcccgtcagccccctccccaccctcaccttggactcgctttctcaggtttcccagttcatggcgtgtgaggagctgcccccgggggccccagagcttccccaagaaggccccacacgacgcctctccctaccgggccagctgggggccctcacctcccagcccctgcacagacacggctcggacccgggcagttagtggggctgcccagtgtggacacgtggctcacccagggatcaaggcgctgctgggccgctccccttggaggccctgctcaggaggccctgaccgtggaaggggagaggaactcgaaagcacagctcctcccccagcccttgggaccatcttctcctgcagtcccctgggccccagtgagaggggcaggggcagggccggcagtaggtggggcctgtggtccccccactgccctgagggcattagctggtctaactgcccggaggcacccggccctgggccttaggcacctcaaggacttttctgctatttactgctcttattgttaaggataataattaaggatcatatgaataattaatgaagatgctgatgactatgaataataaataattatcctgaggaga

SEQ ID NO: 647 - DNA, 3884 bp, Homo sapiens
  source 1..3884: mol_type = genomic DNA
  misc_feature 1..3884: note = cDNA of KCNH2 gene SNP c.2771G>C (p.Gly924Ala)
atgccggtgcggaggggccacgtcgcgccgcagaacaccttcctggacaccatcatccgcaagtttgagggccagagccgtaagttcatcatcgccaacgctcgggtggagaactgcgccgtcatctactgcaacgacggcttctgcgagctgtgcggctactcgcgggccgaggtgatgcagcgaccctgcacctgcgacttcctgcacgggccgcgcacgcagcgccgcgctgccgcgcagatcgcgcaggcactgctgggcgccgaggagcgcaaagtggaaatcgccttctaccggaaagatgggagctgcttcctatgtctggtggatgtggtgcccgtgaagaacgaggatggggctgtcatcatgttcatcctcaatttcgaggtggtgatggagaaggacatggtggggtccccggctcatgacaccaaccaccggggcccccccaccagctggctggccccaggccgcgccaagaccttccgcctgaagctgcccgcgctgctggcgctgacggcccgggagtcgtcggtgcggtcgggcggcgcgggcggcgcgggcgccccgggggccgtggtggtggacgtggacctgacgcccgcggcacccagcagcgagtcgctggccctggacgaagtgacagccatggacaaccacgtggcagggctcgggcccgcggaggagcggcgtgcgctggtgggtcccggctctccgccccgcagcgcgcccggccagctcccatcgccccgggcgcacagcctcaaccccgacgcctcgggctccagctgcagcctggcccggacgcgctcccgagaaagctgcgccagcgtgcgccgcgcctcgtcggccgacgacatcgaggccatgcgcgccggggtgctgcccccgccaccgcgccacgccagcaccggggccatgcacccactgcgcagcggcttgctcaactccacctcggactccgacctcgtgcgctaccgcaccattagcaagattccccaaatcaccctcaactttgtggacctcaagggcgaccccttcttggcttcgcccaccagtgaccgtgagatcatagcacctaagataaaggagcgaacccacaatgtcactgagaaggtcacccaggtcctgtccctgggcgccgacgtgctgcctgagtacaagctgcaggcaccgcgcatccaccgctggaccatcctgcattacagccccttcaaggccgtgtgggactggctcatcctgctgctggtcatctacacggctgtcttcacaccctactcggctgccttcctgctgaaggagacggaagaaggcccgcctgctaccgagtgtggctacgcctgccagccgctggctgtggtggacctcatcgtggacatcatgttcattgtggacatcctcatcaacttccgcaccacctacgtcaatgccaacgaggaggtggtcagccaccccggccgcatcgccgtccactacttcaagggctggttcctcatcgacatggtggccgccatccccttcgacctgctcatcttcggctctggctctgaggagctgatcgggctgctgaagactgcgcggctgctgcggctggtgcgcgtggcgcggaagctggatcgctactcagagtacggcgcggccgtgctgttcttgctcatgtgcacctttgcgctcatcgcgcactggctagcctgcatctggtacgccatcggcaacatggagcagccacacatggactcacgcatcggctggctgcacaacctgggcgaccagataggcaaaccctacaacagcagcggcctgggcggcccctccatcaaggacaagtatgtgacggcgctctacttcaccttcagcagcctcaccagtgtgggcttcggcaacgtctctcccaacaccaactcagagaagatcttctccatctgcgtcatgctcattggctccctcatgtatgctagcatcttcggcaacgtgtcggccatcatccagcggctgtactcgggcacagcccgctaccacacacagatgctgcgggtgcgggagttcatccgcttccaccagatccccaatcccctgcgccagcgcctcgaggagtacttccagcacgcctggtcctacaccaacggcatcgacatgaacgcggtgctgaagggcttccctgagtgcctgcaggctgacatctgcctgcacctgaaccgctcactgctgcagcactgcaaacccttccgaggggccaccaagggctgccttcgggccctggccatgaagttcaagaccacacatgcaccgccaggggacacactggtgcatgctggggacctgctcaccgccctgtacttcatctcccggggctccatcgagatcctgcggggcgacgtcgtcgtggccatcctggggaagaatgacatctttggggagcctctgaacctgtatgcaaggcctggcaagtcgaacggggatgtgcgggccctcacctactgtgacctacacaagatccatcgggacgacctgctggaggtgctggacatgtaccctgagttctccgaccacttctggtccagcctggagatcaccttcaacctgcgagataccaacatgatcccgggctcccccggcagtacggagttagagggtggcttcagtcggcaacgcaagcgcaagttgtccttccgcaggcgcacggacaaggacacggagcagccaggggaggtgtcggccttggggccgggccgggcgggggcagggccgagtagccggggccggccggcggggccgtggggggagagcccgtccagtggcccctccagccctgagagcagtgaggatgagggcccaggccgcagctccagccccctccgcctggtgcccttctccagccccaggccccccggagagccgccgggtggggagcccctgatggaggactgcgagaagagcagcgacacttgcaaccccctgtcaggcgccttctcaggagtgtccaacattttcagcttctggggggacagtcggggccgccagtaccaggagctccctcgatgccccgcccccacccccagcctcctcaacatccccctctccagcccgggtcggcggccccggggcgacgtggagagcaggctggatgccctccagcgccagctcaacaggctggagacccggctgagtgcagacatggccactgtcctgcagctgctacagaggcagatgacgctggtcccgcccgcctacagtgctgtgaccaccccggggcctggccccacttccacatccccgctgttgcccgtcagccccctccccaccctcaccttggactcgctttctcaggtttcccagttcatggcgtgtgaggagctgcccccgggggccccagagcttccccaagaaggccccacacgacgcctctccctaccgggccagctgggggccctcacctcccagcccctgcacagacacggctcggacccgggcagttagtggggctgcccagtgtggacacgtggctcacccagggatcaaggcgctgctgggccgctccccttggaggccctgctcaggaggccctgaccgtggaaggggagaggaactcgaaagcacagctcctcccccagcccttgggaccatcttctcctgcagtcccctgggccccagtgagaggggcaggggcagggccggcagtaggtggggcctgtggtccccccactgccctgagggcattagctggtctaactgcccggaggcacccggccctgggccttaggcacctcaaggacttttctgctatttactgctcttattgttaaggataataattaaggatcatatgaataattaatgaagatgctgatgactatgaataataaataattatcctgaggaga

SEQ ID NO: 648 - DNA, 3884 bp, Homo sapiens
  source 1..3884: mol_type = genomic DNA
  misc_feature 1..3884: note = cDNA of KCNH2 gene SNP c.2773G>A (p.Gly925Arg)
atgccggtgcggaggggccacgtcgcgccgcagaacaccttcctggacaccatcatccgcaagtttgagggccagagccgtaagttcatcatcgccaacgctcgggtggagaactgcgccgtcatctactgcaacgacggcttctgcgagctgtgcggctactcgcgggccgaggtgatgcagcgaccctgcacctgcgacttcctgcacgggccgcgcacgcagcgccgcgctgccgcgcagatcgcgcaggcactgctgggcgccgaggagcgcaaagtggaaatcgccttctaccggaaagatgggagctgcttcctatgtctggtggatgtggtgcccgtgaagaacgaggatggggctgtcatcatgttcatcctcaatttcgaggtggtgatggagaaggacatggtggggtccccggctcatgacaccaaccaccggggcccccccaccagctggctggccccaggccgcgccaagaccttccgcctgaagctgcccgcgctgctggcgctgacggcccgggagtcgtcggtgcggtcgggcggcgcgggcggcgcgggcgccccgggggccgtggtggtggacgtggacctgacgcccgcggcacccagcagcgagtcgctggccctggacgaagtgacagccatggacaaccacgtggcagggctcgggcccgcggaggagcggcgtgcgctggtgggtcccggctctccgccccgcagcgcgcccggccagctcccatcgccccgggcgcacagcctcaaccccgacgcctcgggctccagctgcagcctggcccggacgcgctcccgagaaagctgcgccagcgtgcgccgcgcctcgtcggccgacgacatcgaggccatgcgcgccggggtgctgcccccgccaccgcgccacgccagcaccggggccatgcacccactgcgcagcggcttgctcaactccacctcggactccgacctcgtgcgctaccgcaccattagcaagattccccaaatcaccctcaactttgtggacctcaagggcgaccccttcttggcttcgcccaccagtgaccgtgagatcatagcacctaagataaaggagcgaacccacaatgtcactgagaaggtcacccaggtcctgtccctgggcgccgacgtgctgcctgagtacaagctgcaggcaccgcgcatccaccgctggaccatcctgcattacagccccttcaaggccgtgtgggactggctcatcctgctgctggtcatctacacggctgtcttcacaccctactcggctgccttcctgctgaaggagacggaagaaggcccgcctgctaccgagtgtggctacgcctgccagccgctggctgtggtggacctcatcgtggacatcatgttcattgtggacatcctcatcaacttccgcaccacctacgtcaatgccaacgaggaggtggtcagccaccccggccgcatcgccgtccactacttcaagggctggttcctcatcgacatggtggccgccatccccttcgacctgctcatcttcggctctggctctgaggagctgatcgggctgctgaagactgcgcggctgctgcggctggtgcgcgtggcgcggaagctggatcgctactcagagtacggcgcggccgtgctgttcttgctcatgtgcacctttgcgctcatcgcgcactggctagcctgcatctggtacgccatcggcaacatggagcagccacacatggactcacgcatcggctggctgcacaacctgggcgaccagataggcaaaccctacaacagcagcggcctgggcggcccctccatcaaggacaagtatgtgacggcgctctacttcaccttcagcagcctcaccagtgtgggcttcggcaacgtctctcccaacaccaactcagagaagatcttctccatctgcgtcatgctcattggctccctcatgtatgctagcatcttcggcaacgtgtcggccatcatccagcggctgtactcgggcacagcccgctaccacacacagatgctgcgggtgcgggagttcatccgcttccaccagatccccaatcccctgcgccagcgcctcgaggagtacttccagcacgcctggtcctacaccaacggcatcgacatgaacgcggtgctgaagggcttccctgagtgcctgcaggctgacatctgcctgcacctgaaccgctcactgctgcagcactgcaaacccttccgaggggccaccaagggctgccttcgggccctggccatgaagttcaagaccacacatgcaccgccaggggacacactggtgcatgctggggacctgctcaccgccctgtacttcatctcccggggctccatcgagatcctgcggggcgacgtcgtcgtggccatcctggggaagaatgacatctttggggagcctctgaacctgtatgcaaggcctggcaagtcgaacggggatgtgcgggccctcacctactgtgacctacacaagatccatcgggacgacctgctggaggtgctggacatgtaccctgagttctccgaccacttctggtccagcctggagatcaccttcaacctgcgagataccaacatgatcccgggctcccccggcagtacggagttagagggtggcttcagtcggcaacgcaagcgcaagttgtccttccgcaggcgcacggacaaggacacggagcagccaggggaggtgtcggccttggggccgggccgggcgggggcagggccgagtagccggggccggccggggaggccgtggggggagagcccgtccagtggcccctccagccctgagagcagtgaggatgagggcccaggccgcagctccagccccctccgcctggtgcccttctccagccccaggccccccggagagccgccgggtggggagcccctgatggaggactgcgagaagagcagcgacacttgcaaccccctgtcaggcgccttctcaggagtgtccaacattttcagcttctggggggacagtcggggccgccagtaccaggagctccctcgatgccccgcccccacccccagcctcctcaacatccccctctccagcccgggtcggcggccccggggcgacgtggagagcaggctggatgccctccagcgccagctcaacaggctggagacccggctgagtgcagacatggccactgtcctgcagctgctacagaggcagatgacgctggtcccgcccgcctacagtgctgtgaccaccccggggcctggccccacttccacatccccgctgttgcccgtcagccccctccccaccctcaccttggactcgctttctcaggtttcccagttcatggcgtgtgaggagctgcccccgggggccccagagcttccccaagaaggccccacacgacgcctctccctaccgggccagctgggggccctcacctcccagcccctgcacagacacggctcggacccgggcagttagtggggctgcccagtgtggacacgtggctcacccagggatcaaggcgctgctgggccgctccccttggaggccctgctcaggaggccctgaccgtggaaggggagaggaactcgaaagcacagctcctcccccagcccttgggaccatcttctcctgcagtcccctgggccccagtgagaggggcaggggcagggccggcagtaggtggggcctgtggtccccccactgccctgagggcattagctggtctaactgcccggaggcacccggccctgggccttaggcacctcaaggacttttctgctatttactgctcttattgttaaggataataattaaggatcatatgaataattaatgaagatgctgatgactatgaataataaataattatcctgaggaga

SEQ ID NO: 649 - DNA, 3884 bp, Homo sapiens
  source 1..3884: mol_type = genomic DNA
  misc_feature 1..3884: note = cDNA of KCNH2 gene SNP c.2774G>A (p.Gly925Glu)
atgccggtgcggaggggccacgtcgcgccgcagaacaccttcctggacaccatcatccgcaagtttgagggccagagccgtaagttcatcatcgccaacgctcgggtggagaactgcgccgtcatctactgcaacgacggcttctgcgagctgtgcggctactcgcgggccgaggtgatgcagcgaccctgcacctgcgacttcctgcacgggccgcgcacgcagcgccgcgctgccgcgcagatcgcgcaggcactgctgggcgccgaggagcgcaaagtggaaatcgccttctaccggaaagatgggagctgcttcctatgtctggtggatgtggtgcccgtgaagaacgaggatggggctgtcatcatgttcatcctcaatttcgaggtggtgatggagaaggacatggtggggtccccggctcatgacaccaaccaccggggcccccccaccagctggctggccccaggccgcgccaagaccttccgcctgaagctgcccgcgctgctggcgctgacggcccgggagtcgtcggtgcggtcgggcggcgcgggcggcgcgggcgccccgggggccgtggtggtggacgtggacctgacgcccgcggcacccagcagcgagtcgctggccctggacgaagtgacagccatggacaaccacgtggcagggctcgggcccgcggaggagcggcgtgcgctggtgggtcccggctctccgccccgcagcgcgcccggccagctcccatcgccccgggcgcacagcctcaaccccgacgcctcgggctccagctgcagcctggcccggacgcgctcccgagaaagctgcgccagcgtgcgccgcgcctcgtcggccgacgacatcgaggccatgcgcgccggggtgctgcccccgccaccgcgccacgccagcaccggggccatgcacccactgcgcagcggcttgctcaactccacctcggactccgacctcgtgcgctaccgcaccattagcaagattccccaaatcaccctcaactttgtggacctcaagggcgaccccttcttggcttcgcccaccagtgaccgtgagatcatagcacctaagataaaggagcgaacccacaatgtcactgagaaggtcacccaggtcctgtccctgggcgccgacgtgctgcctgagtacaagctgcaggcaccgcgcatccaccgctggaccatcctgcattacagccccttcaaggccgtgtgggactggctcatcctgctgctggtcatctacacggctgtcttcacaccctactcggctgccttcctgctgaaggagacggaagaaggcccgcctgctaccgagtgtggctacgcctgccagccgctggctgtggtggacctcatcgtggacatcatgttcattgtggacatcctcatcaacttccgcaccacctacgtcaatgccaacgaggaggtggtcagccaccccggccgcatcgccgtccactacttcaagggctggttcctcatcgacatggtggccgccatccccttcgacctgctcatcttcggctctggctctgaggagctgatcgggctgctgaagactgcgcggctgctgcggctggtgcgcgtggcgcggaagctggatcgctactcagagtacggcgcggccgtgctgttcttgctcatgtgcacctttgcgctcatcgcgcactggctagcctgcatctggtacgccatcggcaacatggagcagccacacatggactcacgcatcggctggctgcacaacctgggcgaccagataggcaaaccctacaacagcagcggcctgggcggcccctccatcaaggacaagtatgtgacggcgctctacttcaccttcagcagcctcaccagtgtgggcttcggcaacgtctctcccaacaccaactcagagaagatcttctccatctgcgtcatgctcattggctccctcatgtatgctagcatcttcggcaacgtgtcggccatcatccagcggctgtactcgggcacagcccgctaccacacacagatgctgcgggtgcgggagttcatccgcttccaccagatccccaatcccctgcgccagcgcctcgaggagtacttccagcacgcctggtcctacaccaacggcatcgacatgaacgcggtgctgaagggcttccctgagtgcctgcaggctgacatctgcctgcacctgaaccgctcactgctgcagcactgcaaacccttccgaggggccaccaagggctgccttcgggccctggccatgaagttcaagaccacacatgcaccgccaggggacacactggtgcatgctggggacctgctcaccgccctgtacttcatctcccggggctccatcgagatcctgcggggcgacgtcgtcgtggccatcctggggaagaatgacatctttggggagcctctgaacctgtatgcaaggcctggcaagtcgaacggggatgtgcgggccctcacctactgtgacctacacaagatccatcgggacgacctgctggaggtgctggacatgtaccctgagttctccgaccacttctggtccagcctggagatcaccttcaacctgcgagataccaacatgatcccgggctcccccggcagtacggagttagagggtggcttcagtcggcaacgcaagcgcaagttgtccttccgcaggcgcacggacaaggacacggagcagccaggggaggtgtcggccttggggccgggccgggcgggggcagggccgagtagccggggccggccgggggagccgtggggggagagcccgtccagtggcccctccagccctgagagcagtgaggatgagggcccaggccgcagctccagccccctccgcctggtgcccttctccagccccaggccccccggagagccgccgggtggggagcccctgatggaggactgcgagaagagcagcgacacttgcaaccccctgtcaggcgccttctcaggagtgtccaacattttcagcttctggggggacagtcggggccgccagtaccaggagctccctcgatgccccgcccccacccccagcctcctcaacatccccctctccagcccgggtcggcggccccggggcgacgtggagagcaggctggatgccctccagcgccagctcaacaggctggagacccggctgagtgcagacatggccactgtcctgcagctgctacagaggcagatgacgctggtcccgcccgcctacagtgctgtgaccaccccggggcctggccccacttccacatccccgctgttgcccgtcagccccctccccaccctcaccttggactcgctttctcaggtttcccagttcatggcgtgtgaggagctgcccccgggggccccagagcttccccaagaaggccccacacgacgcctctccctaccgggccagctgggggccctcacctcccagcccctgcacagacacggctcggacccgggcagttagtggggctgcccagtgtggacacgtggctcacccagggatcaaggcgctgctgggccgctccccttggaggccctgctcaggaggccctgaccgtggaaggggagaggaactcgaaagcacagctcctcccccagcccttgggaccatcttctcctgcagtcccctgggccccagtgagaggggcaggggcagggccggcagtaggtggggcctgtggtccccccactgccctgagggcattagctggtctaactgcccggaggcacccggccctgggccttaggcacctcaaggacttttctgctatttactgctcttattgttaaggataataattaaggatcatatgaataattaatgaagatgctgatgactatgaataataaataattatcctgaggaga

SEQ ID NO: 650 - DNA, 3884 bp, Homo sapiens
  source 1..3884: mol_type = genomic DNA
  misc_feature 1..3884: note = cDNA of KCNH2 gene SNP c.2774G>C (p.Gly925Ala)
atgccggtgcggaggggccacgtcgcgccgcagaacaccttcctggacaccatcatccgcaagtttgagggccagagccgtaagttcatcatcgccaacgctcgggtggagaactgcgccgtcatctactgcaacgacggcttctgcgagctgtgcggctactcgcgggccgaggtgatgcagcgaccctgcacctgcgacttcctgcacgggccgcgcacgcagcgccgcgctgccgcgcagatcgcgcaggcactgctgggcgccgaggagcgcaaagtggaaatcgccttctaccggaaagatgggagctgcttcctatgtctggtggatgtggtgcccgtgaagaacgaggatggggctgtcatcatgttcatcctcaatttcgaggtggtgatggagaaggacatggtggggtccccggctcatgacaccaaccaccggggcccccccaccagctggctggccccaggccgcgccaagaccttccgcctgaagctgcccgcgctgctggcgctgacggcccgggagtcgtcggtgcggtcgggcggcgcgggcggcgcgggcgccccgggggccgtggtggtggacgtggacctgacgcccgcggcacccagcagcgagtcgctggccctggacgaagtgacagccatggacaaccacgtggcagggctcgggcccgcggaggagcggcgtgcgctggtgggtcccggctctccgccccgcagcgcgcccggccagctcccatcgccccgggcgcacagcctcaaccccgacgcctcgggctccagctgcagcctggcccggacgcgctcccgagaaagctgcgccagcgtgcgccgcgcctcgtcggccgacgacatcgaggccatgcgcgccggggtgctgcccccgccaccgcgccacgccagcaccggggccatgcacccactgcgcagcggcttgctcaactccacctcggactccgacctcgtgcgctaccgcaccattagcaagattccccaaatcaccctcaactttgtggacctcaagggcgaccccttcttggcttcgcccaccagtgaccgtgagatcatagcacctaagataaaggagcgaacccacaatgtcactgagaaggtcacccaggtcctgtccctgggcgccgacgtgctgcctgagtacaagctgcaggcaccgcgcatccaccgctggaccatcctgcattacagccccttcaaggccgtgtgggactggctcatcctgctgctggtcatctacacggctgtcttcacaccctactcggctgccttcctgctgaaggagacggaagaaggcccgcctgctaccgagtgtggctacgcctgccagccgctggctgtggtggacctcatcgtggacatcatgttcattgtggacatcctcatcaacttccgcaccacctacgtcaatgccaacgaggaggtggtcagccaccccggccgcatcgccgtccactacttcaagggctggttcctcatcgacatggtggccgccatccccttcgacctgctcatcttcggctctggctctgaggagctgatcgggctgctgaagactgcgcggctgctgcggctggtgcgcgtggcgcggaagctggatcgctactcagagtacggcgcggccgtgctgttcttgctcatgtgcacctttgcgctcatcgcgcactggctagcctgcatctggtacgccatcggcaacatggagcagccacacatggactcacgcatcggctggctgcacaacctgggcgaccagataggcaaaccctacaacagcagcggcctgggcggcccctccatcaaggacaagtatgtgacggcgctctacttcaccttcagcagcctcaccagtgtgggcttcggcaacgtctctcccaacaccaactcagagaagatcttctccatctgcgtcatgctcattggctccctcatgtatgctagcatcttcggcaacgtgtcggccatcatccagcggctgtactcgggcacagcccgctaccacacacagatgctgcgggtgcgggagttcatccgcttccaccagatccccaatcccctgcgccagcgcctcgaggagtacttccagcacgcctggtcctacaccaacggcatcgacatgaacgcggtgctgaagggcttccctgagtgcctgcaggctgacatctgcctgcacctgaaccgctcactgctgcagcactgcaaacccttccgaggggccaccaagggctgccttcgggccctggccatgaagttcaagaccacacatgcaccgccaggggacacactggtgcatgctggggacctgctcaccgccctgtacttcatctcccggggctccatcgagatcctgcggggcgacgtcgtcgtggccatcctggggaagaatgacatctttggggagcctctgaacctgtatgcaaggcctggcaagtcgaacggggatgtgcgggccctcacctactgtgacctacacaagatccatcgggacgacctgctggaggtgctggacatgtaccctgagttctccgaccacttctggtccagcctggagatcaccttcaacctgcgagataccaacatgatcccgggctcccccggcagtacggagttagagggtggcttcagtcggcaacgcaagcgcaagttgtccttccgcaggcgcacggacaaggacacggagcagccaggggaggtgtcggccttggggccgggccgggcgggggcagggccgagtagccggggccggccgggggcgccgtggggggagagcccgtccagtggcccctccagccctgagagcagtgaggatgagggcccaggccgcagctccagccccctccgcctggtgcccttctccagccccaggccccccggagagccgccgggtggggagcccctgatggaggactgcgagaagagcagcgacacttgcaaccccctgtcaggcgccttctcaggagtgtccaacattttcagcttctggggggacagtcggggccgccagtaccaggagctccctcgatgccccgcccccacccccagcctcctcaacatccccctctccagcccgggtcggcggccccggggcgacgtggagagcaggctggatgccctccagcgccagctcaacaggctggagacccggctgagtgcagacatggccactgtcctgcagctgctacagaggcagatgacgctggtcccgcccgcctacagtgctgtgaccaccccggggcctggccccacttccacatccccgctgttgcccgtcagccccctccccaccctcaccttggactcgctttctcaggtttcccagttcatggcgtgtgaggagctgcccccgggggccccagagcttccccaagaaggccccacacgacgcctctccctaccgggccagctgggggccctcacctcccagcccctgcacagacacggctcggacccgggcagttagtggggctgcccagtgtggacacgtggctcacccagggatcaaggcgctgctgggccgctccccttggaggccctgctcaggaggccctgaccgtggaaggggagaggaactcgaaagcacagctcctcccccagcccttgggaccatcttctcctgcagtcccctgggccccagtgagaggggcaggggcagggccggcagtaggtggggcctgtggtccccccactgccctgagggcattagctggtctaactgcccggaggcacccggccctgggccttaggcacctcaaggacttttctgctatttactgctcttattgttaaggataataattaaggatcatatgaataattaatgaagatgctgatgactatgaataataaataattatcctgaggaga

SEQ ID NO: 651 - DNA, 3884 bp, Homo sapiens
  source 1..3884: mol_type = genomic DNA
  misc_feature 1..3884: note = cDNA of KCNH2 gene SNP c.2774G>T (p.Gly925Val)
atgccggtgcggaggggccacgtcgcgccgcagaacaccttcctggacaccatcatccgcaagtttgagggccagagccgtaagttcatcatcgccaacgctcgggtggagaactgcgccgtcatctactgcaacgacggcttctgcgagctgtgcggctactcgcgggccgaggtgatgcagcgaccctgcacctgcgacttcctgcacgggccgcgcacgcagcgccgcgctgccgcgcagatcgcgcaggcactgctgggcgccgaggagcgcaaagtggaaatcgccttctaccggaaagatgggagctgcttcctatgtctggtggatgtggtgcccgtgaagaacgaggatggggctgtcatcatgttcatcctcaatttcgaggtggtgatggagaaggacatggtggggtccccggctcatgacaccaaccaccggggcccccccaccagctggctggccccaggccgcgccaagaccttccgcctgaagctgcccgcgctgctggcgctgacggcccgggagtcgtcggtgcggtcgggcggcgcgggcggcgcgggcgccccgggggccgtggtggtggacgtggacctgacgcccgcggcacccagcagcgagtcgctggccctggacgaagtgacagccatggacaaccacgtggcagggctcgggcccgcggaggagcggcgtgcgctggtgggtcccggctctccgccccgcagcgcgcccggccagctcccatcgccccgggcgcacagcctcaaccccgacgcctcgggctccagctgcagcctggcccggacgcgctcccgagaaagctgcgccagcgtgcgccgcgcctcgtcggccgacgacatcgaggccatgcgcgccggggtgctgcccccgccaccgcgccacgccagcaccggggccatgcacccactgcgcagcggcttgctcaactccacctcggactccgacctcgtgcgctaccgcaccattagcaagattccccaaatcaccctcaactttgtggacctcaagggcgaccccttcttggcttcgcccaccagtgaccgtgagatcatagcacctaagataaaggagcgaacccacaatgtcactgagaaggtcacccaggtcctgtccctgggcgccgacgtgctgcctgagtacaagctgcaggcaccgcgcatccaccgctggaccatcctgcattacagccccttcaaggccgtgtgggactggctcatcctgctgctggtcatctacacggctgtcttcacaccctactcggctgccttcctgctgaaggagacggaagaaggcccgcctgctaccgagtgtggctacgcctgccagccgctggctgtggtggacctcatcgtggacatcatgttcattgtggacatcctcatcaacttccgcaccacctacgtcaatgccaacgaggaggtggtcagccaccccggccgcatcgccgtccactacttcaagggctggttcctcatcgacatggtggccgccatccccttcgacctgctcatcttcggctctggctctgaggagctgatcgggctgctgaagactgcgcggctgctgcggctggtgcgcgtggcgcggaagctggatcgctactcagagtacggcgcggccgtgctgttcttgctcatgtgcacctttgcgctcatcgcgcactggctagcctgcatctggtacgccatcggcaacatggagcagccacacatggactcacgcatcggctggctgcacaacctgggcgaccagataggcaaaccctacaacagcagcggcctgggcggcccctccatcaaggacaagtatgtgacggcgctctacttcaccttcagcagcctcaccagtgtgggcttcggcaacgtctctcccaacaccaactcagagaagatcttctccatctgcgtcatgctcattggctccctcatgtatgctagcatcttcggcaacgtgtcggccatcatccagcggctgtactcgggcacagcccgctaccacacacagatgctgcgggtgcgggagttcatccgcttccaccagatccccaatcccctgcgccagcgcctcgaggagtacttccagcacgcctggtcctacaccaacggcatcgacatgaacgcggtgctgaagggcttccctgagtgcctgcaggctgacatctgcctgcacctgaaccgctcactgctgcagcactgcaaacccttccgaggggccaccaagggctgccttcgggccctggccatgaagttcaagaccacacatgcaccgccaggggacacactggtgcatgctggggacctgctcaccgccctgtacttcatctcccggggctccatcgagatcctgcggggcgacgtcgtcgtggccatcctggggaagaatgacatctttggggagcctctgaacctgtatgcaaggcctggcaagtcgaacggggatgtgcgggccctcacctactgtgacctacacaagatccatcgggacgacctgctggaggtgctggacatgtaccctgagttctccgaccacttctggtccagcctggagatcaccttcaacctgcgagataccaacatgatcccgggctcccccggcagtacggagttagagggtggcttcagtcggcaacgcaagcgcaagttgtccttccgcaggcgcacggacaaggacacggagcagccaggggaggtgtcggccttggggccgggccgggcgggggcagggccgagtagccggggccggccgggggtgccgtggggggagagcccgtccagtggcccctccagccctgagagcagtgaggatgagggcccaggccgcagctccagccccctccgcctggtgcccttctccagccccaggccccccggagagccgccgggtggggagcccctgatggaggactgcgagaagagcagcgacacttgcaaccccctgtcaggcgccttctcaggagtgtccaacattttcagcttctggggggacagtcggggccgccagtaccaggagctccctcgatgccccgcccccacccccagcctcctcaacatccccctctccagcccgggtcggcggccccggggcgacgtggagagcaggctggatgccctccagcgccagctcaacaggctggagacccggctgagtgcagacatggccactgtcctgcagctgctacagaggcagatgacgctggtcccgcccgcctacagtgctgtgaccaccccggggcctggccccacttccacatccccgctgttgcccgtcagccccctccccaccctcaccttggactcgctttctcaggtttcccagttcatggcgtgtgaggagctgcccccgggggccccagagcttccccaagaaggccccacacgacgcctctccctaccgggccagctgggggccctcacctcccagcccctgcacagacacggctcggacccgggcagttagtggggctgcccagtgtggacacgtggctcacccagggatcaaggcgctgctgggccgctccccttggaggccctgctcaggaggccctgaccgtggaaggggagaggaactcgaaagcacagctcctcccccagcccttgggaccatcttctcctgcagtcccctgggccccagtgagaggggcaggggcagggccggcagtaggtggggcctgtggtccccccactgccctgagggcattagctggtctaactgcccggaggcacccggccctgggccttaggcacctcaaggacttttctgctatttactgctcttattgttaaggataataattaaggatcatatgaataattaatgaagatgctgatgactatgaataataaataattatcctgaggaga

SEQ ID NO: 652 - DNA, 3884 bp, Homo sapiens
  source 1..3884: mol_type = genomic DNA
  misc_feature 1..3884: note = cDNA of KCNH2 gene SNP c.2777C>T (p.Pro926Leu)
atgccggtgcggaggggccacgtcgcgccgcagaacaccttcctggacaccatcatccgcaagtttgagggccagagccgtaagttcatcatcgccaacgctcgggtggagaactgcgccgtcatctactgcaacgacggcttctgcgagctgtgcggctactcgcgggccgaggtgatgcagcgaccctgcacctgcgacttcctgcacgggccgcgcacgcagcgccgcgctgccgcgcagatcgcgcaggcactgctgggcgccgaggagcgcaaagtggaaatcgccttctaccggaaagatgggagctgcttcctatgtctggtggatgtggtgcccgtgaagaacgaggatggggctgtcatcatgttcatcctcaatttcgaggtggtgatggagaaggacatggtggggtccccggctcatgacaccaaccaccggggcccccccaccagctggctggccccaggccgcgccaagaccttccgcctgaagctgcccgcgctgctggcgctgacggcccgggagtcgtcggtgcggtcgggcggcgcgggcggcgcgggcgccccgggggccgtggtggtggacgtggacctgacgcccgcggcacccagcagcgagtcgctggccctggacgaagtgacagccatggacaaccacgtggcagggctcgggcccgcggaggagcggcgtgcgctggtgggtcccggctctccgccccgcagcgcgcccggccagctcccatcgccccgggcgcacagcctcaaccccgacgcctcgggctccagctgcagcctggcccggacgcgctcccgagaaagctgcgccagcgtgcgccgcgcctcgtcggccgacgacatcgaggccatgcgcgccggggtgctgcccccgccaccgcgccacgccagcaccggggccatgcacccactgcgcagcggcttgctcaactccacctcggactccgacctcgtgcgctaccgcaccattagcaagattccccaaatcaccctcaactttgtggacctcaagggcgaccccttcttggcttcgcccaccagtgaccgtgagatcatagcacctaagataaaggagcgaacccacaatgtcactgagaaggtcacccaggtcctgtccctgggcgccgacgtgctgcctgagtacaagctgcaggcaccgcgcatccaccgctggaccatcctgcattacagccccttcaaggccgtgtgggactggctcatcctgctgctggtcatctacacggctgtcttcacaccctactcggctgccttcctgctgaaggagacggaagaaggcccgcctgctaccgagtgtggctacgcctgccagccgctggctgtggtggacctcatcgtggacatcatgttcattgtggacatcctcatcaacttccgcaccacctacgtcaatgccaacgaggaggtggtcagccaccccggccgcatcgccgtccactacttcaagggctggttcctcatcgacatggtggccgccatccccttcgacctgctcatcttcggctctggctctgaggagctgatcgggctgctgaagactgcgcggctgctgcggctggtgcgcgtggcgcggaagctggatcgctactcagagtacggcgcggccgtgctgttcttgctcatgtgcacctttgcgctcatcgcgcactggctagcctgcatctggtacgccatcggcaacatggagcagccacacatggactcacgcatcggctggctgcacaacctgggcgaccagataggcaaaccctacaacagcagcggcctgggcggcccctccatcaaggacaagtatgtgacggcgctctacttcaccttcagcagcctcaccagtgtgggcttcggcaacgtctctcccaacaccaactcagagaagatcttctccatctgcgtcatgctcattggctccctcatgtatgctagcatcttcggcaacgtgtcggccatcatccagcggctgtactcgggcacagcccgctaccacacacagatgctgcgggtgcgggagttcatccgcttccaccagatccccaatcccctgcgccagcgcctcgaggagtacttccagcacgcctggtcctacaccaacggcatcgacatgaacgcggtgctgaagggcttccctgagtgcctgcaggctgacatctgcctgcacctgaaccgctcactgctgcagcactgcaaacccttccgaggggccaccaagggctgccttcgggccctggccatgaagttcaagaccacacatgcaccgccaggggacacactggtgcatgctggggacctgctcaccgccctgtacttcatctcccggggctccatcgagatcctgcggggcgacgtcgtcgtggccatcctggggaagaatgacatctttggggagcctctgaacctgtatgcaaggcctggcaagtcgaacggggatgtgcgggccctcacctactgtgacctacacaagatccatcgggacgacctgctggaggtgctggacatgtaccctgagttctccgaccacttctggtccagcctggagatcaccttcaacctgcgagataccaacatgatcccgggctcccccggcagtacggagttagagggtggcttcagtcggcaacgcaagcgcaagttgtccttccgcaggcgcacggacaaggacacggagcagccaggggaggtgtcggccttggggccgggccgggcgggggcagggccgagtagccggggccggccgggggggctgtggggggagagcccgtccagtggcccctccagccctgagagcagtgaggatgagggcccaggccgcagctccagccccctccgcctggtgcccttctccagccccaggccccccggagagccgccgggtggggagcccctgatggaggactgcgagaagagcagcgacacttgcaaccccctgtcaggcgccttctcaggagtgtccaacattttcagcttctggggggacagtcggggccgccagtaccaggagctccctcgatgccccgcccccacccccagcctcctcaacatccccctctccagcccgggtcggcggccccggggcgacgtggagagcaggctggatgccctccagcgccagctcaacaggctggagacccggctgagtgcagacatggccactgtcctgcagctgctacagaggcagatgacgctggtcccgcccgcctacagtgctgtgaccaccccggggcctggccccacttccacatccccgctgttgcccgtcagccccctccccaccctcaccttggactcgctttctcaggtttcccagttcatggcgtgtgaggagctgcccccgggggccccagagcttccccaagaaggccccacacgacgcctctccctaccgggccagctgggggccctcacctcccagcccctgcacagacacggctcggacccgggcagttagtggggctgcccagtgtggacacgtggctcacccagggatcaaggcgctgctgggccgctccccttggaggccctgctcaggaggccctgaccgtggaaggggagaggaactcgaaagcacagctcctcccccagcccttgggaccatcttctcctgcagtcccctgggccccagtgagaggggcaggggcagggccggcagtaggtggggcctgtggtccccccactgccctgagggcattagctggtctaactgcccggaggcacccggccctgggccttaggcacctcaaggacttttctgctatttactgctcttattgttaaggataataattaaggatcatatgaataattaatgaagatgctgatgactatgaataataaataattatcctgaggaga

SEQ ID NO: 653 - DNA, 3884 bp, Homo sapiens
  source 1..3884: mol_type = genomic DNA
  misc_feature 1..3884: note = cDNA of KCNH2 gene SNP c.2780G>A (p.Trp927Ter)
atgccggtgcggaggggccacgtcgcgccgcagaacaccttcctggacaccatcatccgcaagtttgagggccagagccgtaagttcatcatcgccaacgctcgggtggagaactgcgccgtcatctactgcaacgacggcttctgcgagctgtgcggctactcgcgggccgaggtgatgcagcgaccctgcacctgcgacttcctgcacgggccgcgcacgcagcgccgcgctgccgcgcagatcgcgcaggcactgctgggcgccgaggagcgcaaagtggaaatcgccttctaccggaaagatgggagctgcttcctatgtctggtggatgtggtgcccgtgaagaacgaggatggggctgtcatcatgttcatcctcaatttcgaggtggtgatggagaaggacatggtggggtccccggctcatgacaccaaccaccggggcccccccaccagctggctggccccaggccgcgccaagaccttccgcctgaagctgcccgcgctgctggcgctgacggcccgggagtcgtcggtgcggtcgggcggcgcgggcggcgcgggcgccccgggggccgtggtggtggacgtggacctgacgcccgcggcacccagcagcgagtcgctggccctggacgaagtgacagccatggacaaccacgtggcagggctcgggcccgcggaggagcggcgtgcgctggtgggtcccggctctccgccccgcagcgcgcccggccagctcccatcgccccgggcgcacagcctcaaccccgacgcctcgggctccagctgcagcctggcccggacgcgctcccgagaaagctgcgccagcgtgcgccgcgcctcgtcggccgacgacatcgaggccatgcgcgccggggtgctgcccccgccaccgcgccacgccagcaccggggccatgcacccactgcgcagcggcttgctcaactccacctcggactccgacctcgtgcgctaccgcaccattagcaagattccccaaatcaccctcaactttgtggacctcaagggcgaccccttcttggcttcgcccaccagtgaccgtgagatcatagcacctaagataaaggagcgaacccacaatgtcactgagaaggtcacccaggtcctgtccctgggcgccgacgtgctgcctgagtacaagctgcaggcaccgcgcatccaccgctggaccatcctgcattacagccccttcaaggccgtgtgggactggctcatcctgctgctggtcatctacacggctgtcttcacaccctactcggctgccttcctgctgaaggagacggaagaaggcccgcctgctaccgagtgtggctacgcctgccagccgctggctgtggtggacctcatcgtggacatcatgttcattgtggacatcctcatcaacttccgcaccacctacgtcaatgccaacgaggaggtggtcagccaccccggccgcatcgccgtccactacttcaagggctggttcctcatcgacatggtggccgccatccccttcgacctgctcatcttcggctctggctctgaggagctgatcgggctgctgaagactgcgcggctgctgcggctggtgcgcgtggcgcggaagctggatcgctactcagagtacggcgcggccgtgctgttcttgctcatgtgcacctttgcgctcatcgcgcactggctagcctgcatctggtacgccatcggcaacatggagcagccacacatggactcacgcatcggctggctgcacaacctgggcgaccagataggcaaaccctacaacagcagcggcctgggcggcccctccatcaaggacaagtatgtgacggcgctctacttcaccttcagcagcctcaccagtgtgggcttcggcaacgtctctcccaacaccaactcagagaagatcttctccatctgcgtcatgctcattggctccctcatgtatgctagcatcttcggcaacgtgtcggccatcatccagcggctgtactcgggcacagcccgctaccacacacagatgctgcgggtgcgggagttcatccgcttccaccagatccccaatcccctgcgccagcgcctcgaggagtacttccagcacgcctggtcctacaccaacggcatcgacatgaacgcggtgctgaagggcttccctgagtgcctgcaggctgacatctgcctgcacctgaaccgctcactgctgcagcactgcaaacccttccgaggggccaccaagggctgccttcgggccctggccatgaagttcaagaccacacatgcaccgccaggggacacactggtgcatgctggggacctgctcaccgccctgtacttcatctcccggggctccatcgagatcctgcggggcgacgtcgtcgtggccatcctggggaagaatgacatctttggggagcctctgaacctgtatgcaaggcctggcaagtcgaacggggatgtgcgggccctcacctactgtgacctacacaagatccatcgggacgacctgctggaggtgctggacatgtaccctgagttctccgaccacttctggtccagcctggagatcaccttcaacctgcgagataccaacatgatcccgggctcccccggcagtacggagttagagggtggcttcagtcggcaacgcaagcgcaagttgtccttccgcaggcgcacggacaaggacacggagcagccaggggaggtgtcggccttggggccgggccgggcgggggcagggccgagtagccggggccggccgggggggccgtagggggagagcccgtccagtggcccctccagccctgagagcagtgaggatgagggcccaggccgcagctccagccccctccgcctggtgcccttctccagccccaggccccccggagagccgccgggtggggagcccctgatggaggactgcgagaagagcagcgacacttgcaaccccctgtcaggcgccttctcaggagtgtccaacattttcagcttctggggggacagtcggggccgccagtaccaggagctccctcgatgccccgcccccacccccagcctcctcaacatccccctctccagcccgggtcggcggccccggggcgacgtggagagcaggctggatgccctccagcgccagctcaacaggctggagacccggctgagtgcagacatggccactgtcctgcagctgctacagaggcagatgacgctggtcccgcccgcctacagtgctgtgaccaccccggggcctggccccacttccacatccccgctgttgcccgtcagccccctccccaccctcaccttggactcgctttctcaggtttcccagttcatggcgtgtgaggagctgcccccgggggccccagagcttccccaagaaggccccacacgacgcctctccctaccgggccagctgggggccctcacctcccagcccctgcacagacacggctcggacccgggcagttagtggggctgcccagtgtggacacgtggctcacccagggatcaaggcgctgctgggccgctccccttggaggccctgctcaggaggccctgaccgtggaaggggagaggaactcgaaagcacagctcctcccccagcccttgggaccatcttctcctgcagtcccctgggccccagtgagaggggcaggggcagggccggcagtaggtggggcctgtggtccccccactgccctgagggcattagctggtctaactgcccggaggcacccggccctgggccttaggcacctcaaggacttttctgctatttactgctcttattgttaaggataataattaaggatcatatgaataattaatgaagatgctgatgactatgaataataaataattatcctgaggaga

SEQ ID NO: 654 - DNA, 3884 bp, Homo sapiens
  source 1..3884: mol_type = genomic DNA
  misc_feature 1..3884: note = cDNA of KCNH2 gene SNP c.2780G>T (p.Trp927Leu)
atgccggtgcggaggggccacgtcgcgccgcagaacaccttcctggacaccatcatccgcaagtttgagggccagagccgtaagttcatcatcgccaacgctcgggtggagaactgcgccgtcatctactgcaacgacggcttctgcgagctgtgcggctactcgcgggccgaggtgatgcagcgaccctgcacctgcgacttcctgcacgggccgcgcacgcagcgccgcgctgccgcgcagatcgcgcaggcactgctgggcgccgaggagcgcaaagtggaaatcgccttctaccggaaagatgggagctgcttcctatgtctggtggatgtggtgcccgtgaagaacgaggatggggctgtcatcatgttcatcctcaatttcgaggtggtgatggagaaggacatggtggggtccccggctcatgacaccaaccaccggggcccccccaccagctggctggccccaggccgcgccaagaccttccgcctgaagctgcccgcgctgctggcgctgacggcccgggagtcgtcggtgcggtcgggcggcgcgggcggcgcgggcgccccgggggccgtggtggtggacgtggacctgacgcccgcggcacccagcagcgagtcgctggccctggacgaagtgacagccatggacaaccacgtggcagggctcgggcccgcggaggagcggcgtgcgctggtgggtcccggctctccgccccgcagcgcgcccggccagctcccatcgccccgggcgcacagcctcaaccccgacgcctcgggctccagctgcagcctggcccggacgcgctcccgagaaagctgcgccagcgtgcgccgcgcctcgtcggccgacgacatcgaggccatgcgcgccggggtgctgcccccgccaccgcgccacgccagcaccggggccatgcacccactgcgcagcggcttgctcaactccacctcggactccgacctcgtgcgctaccgcaccattagcaagattccccaaatcaccctcaactttgtggacctcaagggcgaccccttcttggcttcgcccaccagtgaccgtgagatcatagcacctaagataaaggagcgaacccacaatgtcactgagaaggtcacccaggtcctgtccctgggcgccgacgtgctgcctgagtacaagctgcaggcaccgcgcatccaccgctggaccatcctgcattacagccccttcaaggccgtgtgggactggctcatcctgctgctggtcatctacacggctgtcttcacaccctactcggctgccttcctgctgaaggagacggaagaaggcccgcctgctaccgagtgtggctacgcctgccagccgctggctgtggtggacctcatcgtggacatcatgttcattgtggacatcctcatcaacttccgcaccacctacgtcaatgccaacgaggaggtggtcagccaccccggccgcatcgccgtccactacttcaagggctggttcctcatcgacatggtggccgccatccccttcgacctgctcatcttcggctctggctctgaggagctgatcgggctgctgaagactgcgcggctgctgcggctggtgcgcgtggcgcggaagctggatcgctactcagagtacggcgcggccgtgctgttcttgctcatgtgcacctttgcgctcatcgcgcactggctagcctgcatctggtacgccatcggcaacatggagcagccacacatggactcacgcatcggctggctgcacaacctgggcgaccagataggcaaaccctacaacagcagcggcctgggcggcccctccatcaaggacaagtatgtgacggcgctctacttcaccttcagcagcctcaccagtgtgggcttcggcaacgtctctcccaacaccaactcagagaagatcttctccatctgcgtcatgctcattggctccctcatgtatgctagcatcttcggcaacgtgtcggccatcatccagcggctgtactcgggcacagcccgctaccacacacagatgctgcgggtgcgggagttcatccgcttccaccagatccccaatcccctgcgccagcgcctcgaggagtacttccagcacgcctggtcctacaccaacggcatcgacatgaacgcggtgctgaagggcttccctgagtgcctgcaggctgacatctgcctgcacctgaaccgctcactgctgcagcactgcaaacccttccgaggggccaccaagggctgccttcgggccctggccatgaagttcaagaccacacatgcaccgccaggggacacactggtgcatgctggggacctgctcaccgccctgtacttcatctcccggggctccatcgagatcctgcggggcgacgtcgtcgtggccatcctggggaagaatgacatctttggggagcctctgaacctgtatgcaaggcctggcaagtcgaacggggatgtgcgggccctcacctactgtgacctacacaagatccatcgggacgacctgctggaggtgctggacatgtaccctgagttctccgaccacttctggtccagcctggagatcaccttcaacctgcgagataccaacatgatcccgggctcccccggcagtacggagttagagggtggcttcagtcggcaacgcaagcgcaagttgtccttccgcaggcgcacggacaaggacacggagcagccaggggaggtgtcggccttggggccgggccgggcgggggcagggccgagtagccggggccggccgggggggccgttgggggagagcccgtccagtggcccctccagccctgagagcagtgaggatgagggcccaggccgcagctccagccccctccgcctggtgcccttctccagccccaggccccccggagagccgccgggtggggagcccctgatggaggactgcgagaagagcagcgacacttgcaaccccctgtcaggcgccttctcaggagtgtccaacattttcagcttctggggggacagtcggggccgccagtaccaggagctccctcgatgccccgcccccacccccagcctcctcaacatccccctctccagcccgggtcggcggccccggggcgacgtggagagcaggctggatgccctccagcgccagctcaacaggctggagacccggctgagtgcagacatggccactgtcctgcagctgctacagaggcagatgacgctggtcccgcccgcctacagtgctgtgaccaccccggggcctggccccacttccacatccccgctgttgcccgtcagccccctccccaccctcaccttggactcgctttctcaggtttcccagttcatggcgtgtgaggagctgcccccgggggccccagagcttccccaagaaggccccacacgacgcctctccctaccgggccagctgggggccctcacctcccagcccctgcacagacacggctcggacccgggcagttagtggggctgcccagtgtggacacgtggctcacccagggatcaaggcgctgctgggccgctccccttggaggccctgctcaggaggccctgaccgtggaaggggagaggaactcgaaagcacagctcctcccccagcccttgggaccatcttctcctgcagtcccctgggccccagtgagaggggcaggggcagggccggcagtaggtggggcctgtggtccccccactgccctgagggcattagctggtctaactgcccggaggcacccggccctgggccttaggcacctcaaggacttttctgctatttactgctcttattgttaaggataataattaaggatcatatgaataattaatgaagatgctgatgactatgaataataaataattatcctgaggaga

SEQ ID NO: 655 - DNA, 3884 bp, Homo sapiens
  source 1..3884: mol_type = genomic DNA
  misc_feature 1..3884: note = cDNA of KCNH2 gene SNP c.2781G>T (p.Trp927Cys)
atgccggtgcggaggggccacgtcgcgccgcagaacaccttcctggacaccatcatccgcaagtttgagggccagagccgtaagttcatcatcgccaacgctcgggtggagaactgcgccgtcatctactgcaacgacggcttctgcgagctgtgcggctactcgcgggccgaggtgatgcagcgaccctgcacctgcgacttcctgcacgggccgcgcacgcagcgccgcgctgccgcgcagatcgcgcaggcactgctgggcgccgaggagcgcaaagtggaaatcgccttctaccggaaagatgggagctgcttcctatgtctggtggatgtggtgcccgtgaagaacgaggatggggctgtcatcatgttcatcctcaatttcgaggtggtgatggagaaggacatggtggggtccccggctcatgacaccaaccaccggggcccccccaccagctggctggccccaggccgcgccaagaccttccgcctgaagctgcccgcgctgctggcgctgacggcccgggagtcgtcggtgcggtcgggcggcgcgggcggcgcgggcgccccgggggccgtggtggtggacgtggacctgacgcccgcggcacccagcagcgagtcgctggccctggacgaagtgacagccatggacaaccacgtggcagggctcgggcccgcggaggagcggcgtgcgctggtgggtcccggctctccgccccgcagcgcgcccggccagctcccatcgccccgggcgcacagcctcaaccccgacgcctcgggctccagctgcagcctggcccggacgcgctcccgagaaagctgcgccagcgtgcgccgcgcctcgtcggccgacgacatcgaggccatgcgcgccggggtgctgcccccgccaccgcgccacgccagcaccggggccatgcacccactgcgcagcggcttgctcaactccacctcggactccgacctcgtgcgctaccgcaccattagcaagattccccaaatcaccctcaactttgtggacctcaagggcgaccccttcttggcttcgcccaccagtgaccgtgagatcatagcacctaagataaaggagcgaacccacaatgtcactgagaaggtcacccaggtcctgtccctgggcgccgacgtgctgcctgagtacaagctgcaggcaccgcgcatccaccgctggaccatcctgcattacagccccttcaaggccgtgtgggactggctcatcctgctgctggtcatctacacggctgtcttcacaccctactcggctgccttcctgctgaaggagacggaagaaggcccgcctgctaccgagtgtggctacgcctgccagccgctggctgtggtggacctcatcgtggacatcatgttcattgtggacatcctcatcaacttccgcaccacctacgtcaatgccaacgaggaggtggtcagccaccccggccgcatcgccgtccactacttcaagggctggttcctcatcgacatggtggccgccatccccttcgacctgctcatcttcggctctggctctgaggagctgatcgggctgctgaagactgcgcggctgctgcggctggtgcgcgtggcgcggaagctggatcgctactcagagtacggcgcggccgtgctgttcttgctcatgtgcacctttgcgctcatcgcgcactggctagcctgcatctggtacgccatcggcaacatggagcagccacacatggactcacgcatcggctggctgcacaacctgggcgaccagataggcaaaccctacaacagcagcggcctgggcggcccctccatcaaggacaagtatgtgacggcgctctacttcaccttcagcagcctcaccagtgtgggcttcggcaacgtctctcccaacaccaactcagagaagatcttctccatctgcgtcatgctcattggctccctcatgtatgctagcatcttcggcaacgtgtcggccatcatccagcggctgtactcgggcacagcccgctaccacacacagatgctgcgggtgcgggagttcatccgcttccaccagatccccaatcccctgcgccagcgcctcgaggagtacttccagcacgcctggtcctacaccaacggcatcgacatgaacgcggtgctgaagggcttccctgagtgcctgcaggctgacatctgcctgcacctgaaccgctcactgctgcagcactgcaaacccttccgaggggccaccaagggctgccttcgggccctggccatgaagttcaagaccacacatgcaccgccaggggacacactggtgcatgctggggacctgctcaccgccctgtacttcatctcccggggctccatcgagatcctgcggggcgacgtcgtcgtggccatcctggggaagaatgacatctttggggagcctctgaacctgtatgcaaggcctggcaagtcgaacggggatgtgcgggccctcacctactgtgacctacacaagatccatcgggacgacctgctggaggtgctggacatgtaccctgagttctccgaccacttctggtccagcctggagatcaccttcaacctgcgagataccaacatgatcccgggctcccccggcagtacggagttagagggtggcttcagtcggcaacgcaagcgcaagttgtccttccgcaggcgcacggacaaggacacggagcagccaggggaggtgtcggccttggggccgggccgggcgggggcagggccgagtagccggggccggccgggggggccgtgtggggagagcccgtccagtggcccctccagccctgagagcagtgaggatgagggcccaggccgcagctccagccccctccgcctggtgcccttctccagccccaggccccccggagagccgccgggtggggagcccctgatggaggactgcgagaagagcagcgacacttgcaaccccctgtcaggcgccttctcaggagtgtccaacattttcagcttctggggggacagtcggggccgccagtaccaggagctccctcgatgccccgcccccacccccagcctcctcaacatccccctctccagcccgggtcggcggccccggggcgacgtggagagcaggctggatgccctccagcgccagctcaacaggctggagacccggctgagtgcagacatggccactgtcctgcagctgctacagaggcagatgacgctggtcccgcccgcctacagtgctgtgaccaccccggggcctggccccacttccacatccccgctgttgcccgtcagccccctccccaccctcaccttggactcgctttctcaggtttcccagttcatggcgtgtgaggagctgcccccgggggccccagagcttccccaagaaggccccacacgacgcctctccctaccgggccagctgggggccctcacctcccagcccctgcacagacacggctcggacccgggcagttagtggggctgcccagtgtggacacgtggctcacccagggatcaaggcgctgctgggccgctccccttggaggccctgctcaggaggccctgaccgtggaaggggagaggaactcgaaagcacagctcctcccccagcccttgggaccatcttctcctgcagtcccctgggccccagtgagaggggcaggggcagggccggcagtaggtggggcctgtggtccccccactgccctgagggcattagctggtctaactgcccggaggcacccggccctgggccttaggcacctcaaggacttttctgctatttactgctcttattgttaaggataataattaaggatcatatgaataattaatgaagatgctgatgactatgaataataaataattatcctgaggaga

SEQ ID NO: 656 - DNA, 3884 bp, Homo sapiens
  source 1..3884: mol_type = genomic DNA
  misc_feature 1..3884: note = cDNA of KCNH2 gene SNP c.2783G>A (p.Gly928Glu)
atgccggtgcggaggggccacgtcgcgccgcagaacaccttcctggacaccatcatccgcaagtttgagggccagagccgtaagttcatcatcgccaacgctcgggtggagaactgcgccgtcatctactgcaacgacggcttctgcgagctgtgcggctactcgcgggccgaggtgatgcagcgaccctgcacctgcgacttcctgcacgggccgcgcacgcagcgccgcgctgccgcgcagatcgcgcaggcactgctgggcgccgaggagcgcaaagtggaaatcgccttctaccggaaagatgggagctgcttcctatgtctggtggatgtggtgcccgtgaagaacgaggatggggctgtcatcatgttcatcctcaatttcgaggtggtgatggagaaggacatggtggggtccccggctcatgacaccaaccaccggggcccccccaccagctggctggccccaggccgcgccaagaccttccgcctgaagctgcccgcgctgctggcgctgacggcccgggagtcgtcggtgcggtcgggcggcgcgggcggcgcgggcgccccgggggccgtggtggtggacgtggacctgacgcccgcggcacccagcagcgagtcgctggccctggacgaagtgacagccatggacaaccacgtggcagggctcgggcccgcggaggagcggcgtgcgctggtgggtcccggctctccgccccgcagcgcgcccggccagctcccatcgccccgggcgcacagcctcaaccccgacgcctcgggctccagctgcagcctggcccggacgcgctcccgagaaagctgcgccagcgtgcgccgcgcctcgtcggccgacgacatcgaggccatgcgcgccggggtgctgcccccgccaccgcgccacgccagcaccggggccatgcacccactgcgcagcggcttgctcaactccacctcggactccgacctcgtgcgctaccgcaccattagcaagattccccaaatcaccctcaactttgtggacctcaagggcgaccccttcttggcttcgcccaccagtgaccgtgagatcatagcacctaagataaaggagcgaacccacaatgtcactgagaaggtcacccaggtcctgtccctgggcgccgacgtgctgcctgagtacaagctgcaggcaccgcgcatccaccgctggaccatcctgcattacagccccttcaaggccgtgtgggactggctcatcctgctgctggtcatctacacggctgtcttcacaccctactcggctgccttcctgctgaaggagacggaagaaggcccgcctgctaccgagtgtggctacgcctgccagccgctggctgtggtggacctcatcgtggacatcatgttcattgtggacatcctcatcaacttccgcaccacctacgtcaatgccaacgaggaggtggtcagccaccccggccgcatcgccgtccactacttcaagggctggttcctcatcgacatggtggccgccatccccttcgacctgctcatcttcggctctggctctgaggagctgatcgggctgctgaagactgcgcggctgctgcggctggtgcgcgtggcgcggaagctggatcgctactcagagtacggcgcggccgtgctgttcttgctcatgtgcacctttgcgctcatcgcgcactggctagcctgcatctggtacgccatcggcaacatggagcagccacacatggactcacgcatcggctggctgcacaacctgggcgaccagataggcaaaccctacaacagcagcggcctgggcggcccctccatcaaggacaagtatgtgacggcgctctacttcaccttcagcagcctcaccagtgtgggcttcggcaacgtctctcccaacaccaactcagagaagatcttctccatctgcgtcatgctcattggctccctcatgtatgctagcatcttcggcaacgtgtcggccatcatccagcggctgtactcgggcacagcccgctaccacacacagatgctgcgggtgcgggagttcatccgcttccaccagatccccaatcccctgcgccagcgcctcgaggagtacttccagcacgcctggtcctacaccaacggcatcgacatgaacgcggtgctgaagggcttccctgagtgcctgcaggctgacatctgcctgcacctgaaccgctcactgctgcagcactgcaaacccttccgaggggccaccaagggctgccttcgggccctggccatgaagttcaagaccacacatgcaccgccaggggacacactggtgcatgctggggacctgctcaccgccctgtacttcatctcccggggctccatcgagatcctgcggggcgacgtcgtcgtggccatcctggggaagaatgacatctttggggagcctctgaacctgtatgcaaggcctggcaagtcgaacggggatgtgcgggccctcacctactgtgacctacacaagatccatcgggacgacctgctggaggtgctggacatgtaccctgagttctccgaccacttctggtccagcctggagatcaccttcaacctgcgagataccaacatgatcccgggctcccccggcagtacggagttagagggtggcttcagtcggcaacgcaagcgcaagttgtccttccgcaggcgcacggacaaggacacggagcagccaggggaggtgtcggccttggggccgggccgggcgggggcagggccgagtagccggggccggccgggggggccgtgggaggagagcccgtccagtggcccctccagccctgagagcagtgaggatgagggcccaggccgcagctccagccccctccgcctggtgcccttctccagccccaggccccccggagagccgccgggtggggagcccctgatggaggactgcgagaagagcagcgacacttgcaaccccctgtcaggcgccttctcaggagtgtccaacattttcagcttctggggggacagtcggggccgccagtaccaggagctccctcgatgccccgcccccacccccagcctcctcaacatccccctctccagcccgggtcggcggccccggggcgacgtggagagcaggctggatgccctccagcgccagctcaacaggctggagacccggctgagtgcagacatggccactgtcctgcagctgctacagaggcagatgacgctggtcccgcccgcctacagtgctgtgaccaccccggggcctggccccacttccacatccccgctgttgcccgtcagccccctccccaccctcaccttggactcgctttctcaggtttcccagttcatggcgtgtgaggagctgcccccgggggccccagagcttccccaagaaggccccacacgacgcctctccctaccgggccagctgggggccctcacctcccagcccctgcacagacacggctcggacccgggcagttagtggggctgcccagtgtggacacgtggctcacccagggatcaaggcgctgctgggccgctccccttggaggccctgctcaggaggccctgaccgtggaaggggagaggaactcgaaagcacagctcctcccccagcccttgggaccatcttctcctgcagtcccctgggccccagtgagaggggcaggggcagggccggcagtaggtggggcctgtggtccccccactgccctgagggcattagctggtctaactgcccggaggcacccggccctgggccttaggcacctcaaggacttttctgctatttactgctcttattgttaaggataataattaaggatcatatgaataattaatgaagatgctgatgactatgaataataaataattatcctgaggaga

SEQ ID NO: 657 - DNA, 3884 bp, Homo sapiens
  source 1..3884: mol_type = genomic DNA
  misc_feature 1..3884: note = cDNA of KCNH2 gene SNP c.2785G>C (p.Glu929Gln)
atgccggtgcggaggggccacgtcgcgccgcagaacaccttcctggacaccatcatccgcaagtttgagggccagagccgtaagttcatcatcgccaacgctcgggtggagaactgcgccgtcatctactgcaacgacggcttctgcgagctgtgcggctactcgcgggccgaggtgatgcagcgaccctgcacctgcgacttcctgcacgggccgcgcacgcagcgccgcgctgccgcgcagatcgcgcaggcactgctgggcgccgaggagcgcaaagtggaaatcgccttctaccggaaagatgggagctgcttcctatgtctggtggatgtggtgcccgtgaagaacgaggatggggctgtcatcatgttcatcctcaatttcgaggtggtgatggagaaggacatggtggggtccccggctcatgacaccaaccaccggggcccccccaccagctggctggccccaggccgcgccaagaccttccgcctgaagctgcccgcgctgctggcgctgacggcccgggagtcgtcggtgcggtcgggcggcgcgggcggcgcgggcgccccgggggccgtggtggtggacgtggacctgacgcccgcggcacccagcagcgagtcgctggccctggacgaagtgacagccatggacaaccacgtggcagggctcgggcccgcggaggagcggcgtgcgctggtgggtcccggctctccgccccgcagcgcgcccggccagctcccatcgccccgggcgcacagcctcaaccccgacgcctcgggctccagctgcagcctggcccggacgcgctcccgagaaagctgcgccagcgtgcgccgcgcctcgtcggccgacgacatcgaggccatgcgcgccggggtgctgcccccgccaccgcgccacgccagcaccggggccatgcacccactgcgcagcggcttgctcaactccacctcggactccgacctcgtgcgctaccgcaccattagcaagattccccaaatcaccctcaactttgtggacctcaagggcgaccccttcttggcttcgcccaccagtgaccgtgagatcatagcacctaagataaaggagcgaacccacaatgtcactgagaaggtcacccaggtcctgtccctgggcgccgacgtgctgcctgagtacaagctgcaggcaccgcgcatccaccgctggaccatcctgcattacagccccttcaaggccgtgtgggactggctcatcctgctgctggtcatctacacggctgtcttcacaccctactcggctgccttcctgctgaaggagacggaagaaggcccgcctgctaccgagtgtggctacgcctgccagccgctggctgtggtggacctcatcgtggacatcatgttcattgtggacatcctcatcaacttccgcaccacctacgtcaatgccaacgaggaggtggtcagccaccccggccgcatcgccgtccactacttcaagggctggttcctcatcgacatggtggccgccatccccttcgacctgctcatcttcggctctggctctgaggagctgatcgggctgctgaagactgcgcggctgctgcggctggtgcgcgtggcgcggaagctggatcgctactcagagtacggcgcggccgtgctgttcttgctcatgtgcacctttgcgctcatcgcgcactggctagcctgcatctggtacgccatcggcaacatggagcagccacacatggactcacgcatcggctggctgcacaacctgggcgaccagataggcaaaccctacaacagcagcggcctgggcggcccctccatcaaggacaagtatgtgacggcgctctacttcaccttcagcagcctcaccagtgtgggcttcggcaacgtctctcccaacaccaactcagagaagatcttctccatctgcgtcatgctcattggctccctcatgtatgctagcatcttcggcaacgtgtcggccatcatccagcggctgtactcgggcacagcccgctaccacacacagatgctgcgggtgcgggagttcatccgcttccaccagatccccaatcccctgcgccagcgcctcgaggagtacttccagcacgcctggtcctacaccaacggcatcgacatgaacgcggtgctgaagggcttccctgagtgcctgcaggctgacatctgcctgcacctgaaccgctcactgctgcagcactgcaaacccttccgaggggccaccaagggctgccttcgggccctggccatgaagttcaagaccacacatgcaccgccaggggacacactggtgcatgctggggacctgctcaccgccctgtacttcatctcccggggctccatcgagatcctgcggggcgacgtcgtcgtggccatcctggggaagaatgacatctttggggagcctctgaacctgtatgcaaggcctggcaagtcgaacggggatgtgcgggccctcacctactgtgacctacacaagatccatcgggacgacctgctggaggtgctggacatgtaccctgagttctccgaccacttctggtccagcctggagatcaccttcaacctgcgagataccaacatgatcccgggctcccccggcagtacggagttagagggtggcttcagtcggcaacgcaagcgcaagttgtccttccgcaggcgcacggacaaggacacggagcagccaggggaggtgtcggccttggggccgggccgggcgggggcagggccgagtagccggggccggccgggggggccgtgggggcagagcccgtccagtggcccctccagccctgagagcagtgaggatgagggcccaggccgcagctccagccccctccgcctggtgcccttctccagccccaggccccccggagagccgccgggtggggagcccctgatggaggactgcgagaagagcagcgacacttgcaaccccctgtcaggcgccttctcaggagtgtccaacattttcagcttctggggggacagtcggggccgccagtaccaggagctccctcgatgccccgcccccacccccagcctcctcaacatccccctctccagcccgggtcggcggccccggggcgacgtggagagcaggctggatgccctccagcgccagctcaacaggctggagacccggctgagtgcagacatggccactgtcctgcagctgctacagaggcagatgacgctggtcccgcccgcctacagtgctgtgaccaccccggggcctggccccacttccacatccccgctgttgcccgtcagccccctccccaccctcaccttggactcgctttctcaggtttcccagttcatggcgtgtgaggagctgcccccgggggccccagagcttccccaagaaggccccacacgacgcctctccctaccgggccagctgggggccctcacctcccagcccctgcacagacacggctcggacccgggcagttagtggggctgcccagtgtggacacgtggctcacccagggatcaaggcgctgctgggccgctccccttggaggccctgctcaggaggccctgaccgtggaaggggagaggaactcgaaagcacagctcctcccccagcccttgggaccatcttctcctgcagtcccctgggccccagtgagaggggcaggggcagggccggcagtaggtggggcctgtggtccccccactgccctgagggcattagctggtctaactgcccggaggcacccggccctgggccttaggcacctcaaggacttttctgctatttactgctcttattgttaaggataataattaaggatcatatgaataattaatgaagatgctgatgactatgaataataaataattatcctgaggaga

SEQ ID NO: 658 - DNA, 3884 bp, Homo sapiens
  source 1..3884: mol_type = genomic DNA
  misc_feature 1..3884: note = cDNA of KCNH2 gene SNP c.2788A>C (p.Ser930Arg)
atgccggtgcggaggggccacgtcgcgccgcagaacaccttcctggacaccatcatccgcaagtttgagggccagagccgtaagttcatcatcgccaacgctcgggtggagaactgcgccgtcatctactgcaacgacggcttctgcgagctgtgcggctactcgcgggccgaggtgatgcagcgaccctgcacctgcgacttcctgcacgggccgcgcacgcagcgccgcgctgccgcgcagatcgcgcaggcactgctgggcgccgaggagcgcaaagtggaaatcgccttctaccggaaagatgggagctgcttcctatgtctggtggatgtggtgcccgtgaagaacgaggatggggctgtcatcatgttcatcctcaatttcgaggtggtgatggagaaggacatggtggggtccccggctcatgacaccaaccaccggggcccccccaccagctggctggccccaggccgcgccaagaccttccgcctgaagctgcccgcgctgctggcgctgacggcccgggagtcgtcggtgcggtcgggcggcgcgggcggcgcgggcgccccgggggccgtggtggtggacgtggacctgacgcccgcggcacccagcagcgagtcgctggccctggacgaagtgacagccatggacaaccacgtggcagggctcgggcccgcggaggagcggcgtgcgctggtgggtcccggctctccgccccgcagcgcgcccggccagctcccatcgccccgggcgcacagcctcaaccccgacgcctcgggctccagctgcagcctggcccggacgcgctcccgagaaagctgcgccagcgtgcgccgcgcctcgtcggccgacgacatcgaggccatgcgcgccggggtgctgcccccgccaccgcgccacgccagcaccggggccatgcacccactgcgcagcggcttgctcaactccacctcggactccgacctcgtgcgctaccgcaccattagcaagattccccaaatcaccctcaactttgtggacctcaagggcgaccccttcttggcttcgcccaccagtgaccgtgagatcatagcacctaagataaaggagcgaacccacaatgtcactgagaaggtcacccaggtcctgtccctgggcgccgacgtgctgcctgagtacaagctgcaggcaccgcgcatccaccgctggaccatcctgcattacagccccttcaaggccgtgtgggactggctcatcctgctgctggtcatctacacggctgtcttcacaccctactcggctgccttcctgctgaaggagacggaagaaggcccgcctgctaccgagtgtggctacgcctgccagccgctggctgtggtggacctcatcgtggacatcatgttcattgtggacatcctcatcaacttccgcaccacctacgtcaatgccaacgaggaggtggtcagccaccccggccgcatcgccgtccactacttcaagggctggttcctcatcgacatggtggccgccatccccttcgacctgctcatcttcggctctggctctgaggagctgatcgggctgctgaagactgcgcggctgctgcggctggtgcgcgtggcgcggaagctggatcgctactcagagtacggcgcggccgtgctgttcttgctcatgtgcacctttgcgctcatcgcgcactggctagcctgcatctggtacgccatcggcaacatggagcagccacacatggactcacgcatcggctggctgcacaacctgggcgaccagataggcaaaccctacaacagcagcggcctgggcggcccctccatcaaggacaagtatgtgacggcgctctacttcaccttcagcagcctcaccagtgtgggcttcggcaacgtctctcccaacaccaactcagagaagatcttctccatctgcgtcatgctcattggctccctcatgtatgctagcatcttcggcaacgtgtcggccatcatccagcggctgtactcgggcacagcccgctaccacacacagatgctgcgggtgcgggagttcatccgcttccaccagatccccaatcccctgcgccagcgcctcgaggagtacttccagcacgcctggtcctacaccaacggcatcgacatgaacgcggtgctgaagggcttccctgagtgcctgcaggctgacatctgcctgcacctgaaccgctcactgctgcagcactgcaaacccttccgaggggccaccaagggctgccttcgggccctggccatgaagttcaagaccacacatgcaccgccaggggacacactggtgcatgctggggacctgctcaccgccctgtacttcatctcccggggctccatcgagatcctgcggggcgacgtcgtcgtggccatcctggggaagaatgacatctttggggagcctctgaacctgtatgcaaggcctggcaagtcgaacggggatgtgcgggccctcacctactgtgacctacacaagatccatcgggacgacctgctggaggtgctggacatgtaccctgagttctccgaccacttctggtccagcctggagatcaccttcaacctgcgagataccaacatgatcccgggctcccccggcagtacggagttagagggtggcttcagtcggcaacgcaagcgcaagttgtccttccgcaggcgcacggacaaggacacggagcagccaggggaggtgtcggccttggggccgggccgggcgggggcagggccgagtagccggggccggccgggggggccgtggggggagcgcccgtccagtggcccctccagccctgagagcagtgaggatgagggcccaggccgcagctccagccccctccgcctggtgcccttctccagccccaggccccccggagagccgccgggtggggagcccctgatggaggactgcgagaagagcagcgacacttgcaaccccctgtcaggcgccttctcaggagtgtccaacattttcagcttctggggggacagtcggggccgccagtaccaggagctccctcgatgccccgcccccacccccagcctcctcaacatccccctctccagcccgggtcggcggccccggggcgacgtggagagcaggctggatgccctccagcgccagctcaacaggctggagacccggctgagtgcagacatggccactgtcctgcagctgctacagaggcagatgacgctggtcccgcccgcctacagtgctgtgaccaccccggggcctggccccacttccacatccccgctgttgcccgtcagccccctccccaccctcaccttggactcgctttctcaggtttcccagttcatggcgtgtgaggagctgcccccgggggccccagagcttccccaagaaggccccacacgacgcctctccctaccgggccagctgggggccctcacctcccagcccctgcacagacacggctcggacccgggcagttagtggggctgcccagtgtggacacgtggctcacccagggatcaaggcgctgctgggccgctccccttggaggccctgctcaggaggccctgaccgtggaaggggagaggaactcgaaagcacagctcctcccccagcccttgggaccatcttctcctgcagtcccctgggccccagtgagaggggcaggggcagggccggcagtaggtggggcctgtggtccccccactgccctgagggcattagctggtctaactgcccggaggcacccggccctgggccttaggcacctcaaggacttttctgctatttactgctcttattgttaaggataataattaaggatcatatgaataattaatgaagatgctgatgactatgaataataaataattatcctgaggaga

SEQ ID NO: 659 - DNA, 3884 bp, Homo sapiens
  source 1..3884: mol_type = genomic DNA
  misc_feature 1..3884: note = cDNA of KCNH2 gene SNP c.2788A>G (p.Ser930Gly)
atgccggtgcggaggggccacgtcgcgccgcagaacaccttcctggacaccatcatccgcaagtttgagggccagagccgtaagttcatcatcgccaacgctcgggtggagaactgcgccgtcatctactgcaacgacggcttctgcgagctgtgcggctactcgcgggccgaggtgatgcagcgaccctgcacctgcgacttcctgcacgggccgcgcacgcagcgccgcgctgccgcgcagatcgcgcaggcactgctgggcgccgaggagcgcaaagtggaaatcgccttctaccggaaagatgggagctgcttcctatgtctggtggatgtggtgcccgtgaagaacgaggatggggctgtcatcatgttcatcctcaatttcgaggtggtgatggagaaggacatggtggggtccccggctcatgacaccaaccaccggggcccccccaccagctggctggccccaggccgcgccaagaccttccgcctgaagctgcccgcgctgctggcgctgacggcccgggagtcgtcggtgcggtcgggcggcgcgggcggcgcgggcgccccgggggccgtggtggtggacgtggacctgacgcccgcggcacccagcagcgagtcgctggccctggacgaagtgacagccatggacaaccacgtggcagggctcgggcccgcggaggagcggcgtgcgctggtgggtcccggctctccgccccgcagcgcgcccggccagctcccatcgccccgggcgcacagcctcaaccccgacgcctcgggctccagctgcagcctggcccggacgcgctcccgagaaagctgcgccagcgtgcgccgcgcctcgtcggccgacgacatcgaggccatgcgcgccggggtgctgcccccgccaccgcgccacgccagcaccggggccatgcacccactgcgcagcggcttgctcaactccacctcggactccgacctcgtgcgctaccgcaccattagcaagattccccaaatcaccctcaactttgtggacctcaagggcgaccccttcttggcttcgcccaccagtgaccgtgagatcatagcacctaagataaaggagcgaacccacaatgtcactgagaaggtcacccaggtcctgtccctgggcgccgacgtgctgcctgagtacaagctgcaggcaccgcgcatccaccgctggaccatcctgcattacagccccttcaaggccgtgtgggactggctcatcctgctgctggtcatctacacggctgtcttcacaccctactcggctgccttcctgctgaaggagacggaagaaggcccgcctgctaccgagtgtggctacgcctgccagccgctggctgtggtggacctcatcgtggacatcatgttcattgtggacatcctcatcaacttccgcaccacctacgtcaatgccaacgaggaggtggtcagccaccccggccgcatcgccgtccactacttcaagggctggttcctcatcgacatggtggccgccatccccttcgacctgctcatcttcggctctggctctgaggagctgatcgggctgctgaagactgcgcggctgctgcggctggtgcgcgtggcgcggaagctggatcgctactcagagtacggcgcggccgtgctgttcttgctcatgtgcacctttgcgctcatcgcgcactggctagcctgcatctggtacgccatcggcaacatggagcagccacacatggactcacgcatcggctggctgcacaacctgggcgaccagataggcaaaccctacaacagcagcggcctgggcggcccctccatcaaggacaagtatgtgacggcgctctacttcaccttcagcagcctcaccagtgtgggcttcggcaacgtctctcccaacaccaactcagagaagatcttctccatctgcgtcatgctcattggctccctcatgtatgctagcatcttcggcaacgtgtcggccatcatccagcggctgtactcgggcacagcccgctaccacacacagatgctgcgggtgcgggagttcatccgcttccaccagatccccaatcccctgcgccagcgcctcgaggagtacttccagcacgcctggtcctacaccaacggcatcgacatgaacgcggtgctgaagggcttccctgagtgcctgcaggctgacatctgcctgcacctgaaccgctcactgctgcagcactgcaaacccttccgaggggccaccaagggctgccttcgggccctggccatgaagttcaagaccacacatgcaccgccaggggacacactggtgcatgctggggacctgctcaccgccctgtacttcatctcccggggctccatcgagatcctgcggggcgacgtcgtcgtggccatcctggggaagaatgacatctttggggagcctctgaacctgtatgcaaggcctggcaagtcgaacggggatgtgcgggccctcacctactgtgacctacacaagatccatcgggacgacctgctggaggtgctggacatgtaccctgagttctccgaccacttctggtccagcctggagatcaccttcaacctgcgagataccaacatgatcccgggctcccccggcagtacggagttagagggtggcttcagtcggcaacgcaagcgcaagttgtccttccgcaggcgcacggacaaggacacggagcagccaggggaggtgtcggccttggggccgggccgggcgggggcagggccgagtagccggggccggccgggggggccgtggggggagggcccgtccagtggcccctccagccctgagagcagtgaggatgagggcccaggccgcagctccagccccctccgcctggtgcccttctccagccccaggccccccggagagccgccgggtggggagcccctgatggaggactgcgagaagagcagcgacacttgcaaccccctgtcaggcgccttctcaggagtgtccaacattttcagcttctggggggacagtcggggccgccagtaccaggagctccctcgatgccccgcccccacccccagcctcctcaacatccccctctccagcccgggtcggcggccccggggcgacgtggagagcaggctggatgccctccagcgccagctcaacaggctggagacccggctgagtgcagacatggccactgtcctgcagctgctacagaggcagatgacgctggtcccgcccgcctacagtgctgtgaccaccccggggcctggccccacttccacatccccgctgttgcccgtcagccccctccccaccctcaccttggactcgctttctcaggtttcccagttcatggcgtgtgaggagctgcccccgggggccccagagcttccccaagaaggccccacacgacgcctctccctaccgggccagctgggggccctcacctcccagcccctgcacagacacggctcggacccgggcagttagtggggctgcccagtgtggacacgtggctcacccagggatcaaggcgctgctgggccgctccccttggaggccctgctcaggaggccctgaccgtggaaggggagaggaactcgaaagcacagctcctcccccagcccttgggaccatcttctcctgcagtcccctgggccccagtgagaggggcaggggcagggccggcagtaggtggggcctgtggtccccccactgccctgagggcattagctggtctaactgcccggaggcacccggccctgggccttaggcacctcaaggacttttctgctatttactgctcttattgttaaggataataattaaggatcatatgaataattaatgaagatgctgatgactatgaataataaataattatcctgaggaga

SEQ ID NO: 660 - DNA, 3884 bp, Homo sapiens
  source 1..3884: mol_type = genomic DNA
  misc_feature 1..3884: note = cDNA of KCNH2 gene SNP c.278A>G (p.Lys93Arg)
atgccggtgcggaggggccacgtcgcgccgcagaacaccttcctggacaccatcatccgcaagtttgagggccagagccgtaagttcatcatcgccaacgctcgggtggagaactgcgccgtcatctactgcaacgacggcttctgcgagctgtgcggctactcgcgggccgaggtgatgcagcgaccctgcacctgcgacttcctgcacgggccgcgcacgcagcgccgcgctgccgcgcagatcgcgcaggcactgctgggcgccgaggagcgcagagtggaaatcgccttctaccggaaagatgggagctgcttcctatgtctggtggatgtggtgcccgtgaagaacgaggatggggctgtcatcatgttcatcctcaatttcgaggtggtgatggagaaggacatggtggggtccccggctcatgacaccaaccaccggggcccccccaccagctggctggccccaggccgcgccaagaccttccgcctgaagctgcccgcgctgctggcgctgacggcccgggagtcgtcggtgcggtcgggcggcgcgggcggcgcgggcgccccgggggccgtggtggtggacgtggacctgacgcccgcggcacccagcagcgagtcgctggccctggacgaagtgacagccatggacaaccacgtggcagggctcgggcccgcggaggagcggcgtgcgctggtgggtcccggctctccgccccgcagcgcgcccggccagctcccatcgccccgggcgcacagcctcaaccccgacgcctcgggctccagctgcagcctggcccggacgcgctcccgagaaagctgcgccagcgtgcgccgcgcctcgtcggccgacgacatcgaggccatgcgcgccggggtgctgcccccgccaccgcgccacgccagcaccggggccatgcacccactgcgcagcggcttgctcaactccacctcggactccgacctcgtgcgctaccgcaccattagcaagattccccaaatcaccctcaactttgtggacctcaagggcgaccccttcttggcttcgcccaccagtgaccgtgagatcatagcacctaagataaaggagcgaacccacaatgtcactgagaaggtcacccaggtcctgtccctgggcgccgacgtgctgcctgagtacaagctgcaggcaccgcgcatccaccgctggaccatcctgcattacagccccttcaaggccgtgtgggactggctcatcctgctgctggtcatctacacggctgtcttcacaccctactcggctgccttcctgctgaaggagacggaagaaggcccgcctgctaccgagtgtggctacgcctgccagccgctggctgtggtggacctcatcgtggacatcatgttcattgtggacatcctcatcaacttccgcaccacctacgtcaatgccaacgaggaggtggtcagccaccccggccgcatcgccgtccactacttcaagggctggttcctcatcgacatggtggccgccatccccttcgacctgctcatcttcggctctggctctgaggagctgatcgggctgctgaagactgcgcggctgctgcggctggtgcgcgtggcgcggaagctggatcgctactcagagtacggcgcggccgtgctgttcttgctcatgtgcacctttgcgctcatcgcgcactggctagcctgcatctggtacgccatcggcaacatggagcagccacacatggactcacgcatcggctggctgcacaacctgggcgaccagataggcaaaccctacaacagcagcggcctgggcggcccctccatcaaggacaagtatgtgacggcgctctacttcaccttcagcagcctcaccagtgtgggcttcggcaacgtctctcccaacaccaactcagagaagatcttctccatctgcgtcatgctcattggctccctcatgtatgctagcatcttcggcaacgtgtcggccatcatccagcggctgtactcgggcacagcccgctaccacacacagatgctgcgggtgcgggagttcatccgcttccaccagatccccaatcccctgcgccagcgcctcgaggagtacttccagcacgcctggtcctacaccaacggcatcgacatgaacgcggtgctgaagggcttccctgagtgcctgcaggctgacatctgcctgcacctgaaccgctcactgctgcagcactgcaaacccttccgaggggccaccaagggctgccttcgggccctggccatgaagttcaagaccacacatgcaccgccaggggacacactggtgcatgctggggacctgctcaccgccctgtacttcatctcccggggctccatcgagatcctgcggggcgacgtcgtcgtggccatcctggggaagaatgacatctttggggagcctctgaacctgtatgcaaggcctggcaagtcgaacggggatgtgcgggccctcacctactgtgacctacacaagatccatcgggacgacctgctggaggtgctggacatgtaccctgagttctccgaccacttctggtccagcctggagatcaccttcaacctgcgagataccaacatgatcccgggctcccccggcagtacggagttagagggtggcttcagtcggcaacgcaagcgcaagttgtccttccgcaggcgcacggacaaggacacggagcagccaggggaggtgtcggccttggggccgggccgggcgggggcagggccgagtagccggggccggccgggggggccgtggggggagagcccgtccagtggcccctccagccctgagagcagtgaggatgagggcccaggccgcagctccagccccctccgcctggtgcccttctccagccccaggccccccggagagccgccgggtggggagcccctgatggaggactgcgagaagagcagcgacacttgcaaccccctgtcaggcgccttctcaggagtgtccaacattttcagcttctggggggacagtcggggccgccagtaccaggagctccctcgatgccccgcccccacccccagcctcctcaacatccccctctccagcccgggtcggcggccccggggcgacgtggagagcaggctggatgccctccagcgccagctcaacaggctggagacccggctgagtgcagacatggccactgtcctgcagctgctacagaggcagatgacgctggtcccgcccgcctacagtgctgtgaccaccccggggcctggccccacttccacatccccgctgttgcccgtcagccccctccccaccctcaccttggactcgctttctcaggtttcccagttcatggcgtgtgaggagctgcccccgggggccccagagcttccccaagaaggccccacacgacgcctctccctaccgggccagctgggggccctcacctcccagcccctgcacagacacggctcggacccgggcagttagtggggctgcccagtgtggacacgtggctcacccagggatcaaggcgctgctgggccgctccccttggaggccctgctcaggaggccctgaccgtggaaggggagaggaactcgaaagcacagctcctcccccagcccttgggaccatcttctcctgcagtcccctgggccccagtgagaggggcaggggcagggccggcagtaggtggggcctgtggtccccccactgccctgagggcattagctggtctaactgcccggaggcacccggccctgggccttaggcacctcaaggacttttctgctatttactgctcttattgttaaggataataattaaggatcatatgaataattaatgaagatgctgatgactatgaataataaataattatcctgaggaga

SEQ ID NO: 661 - DNA, 3884 bp, Homo sapiens
  source 1..3884: mol_type = genomic DNA
  misc_feature 1..3884: note = cDNA of KCNH2 gene SNP c.2792C>G (p.Pro931Arg)
atgccggtgcggaggggccacgtcgcgccgcagaacaccttcctggacaccatcatccgcaagtttgagggccagagccgtaagttcatcatcgccaacgctcgggtggagaactgcgccgtcatctactgcaacgacggcttctgcgagctgtgcggctactcgcgggccgaggtgatgcagcgaccctgcacctgcgacttcctgcacgggccgcgcacgcagcgccgcgctgccgcgcagatcgcgcaggcactgctgggcgccgaggagcgcaaagtggaaatcgccttctaccggaaagatgggagctgcttcctatgtctggtggatgtggtgcccgtgaagaacgaggatggggctgtcatcatgttcatcctcaatttcgaggtggtgatggagaaggacatggtggggtccccggctcatgacaccaaccaccggggcccccccaccagctggctggccccaggccgcgccaagaccttccgcctgaagctgcccgcgctgctggcgctgacggcccgggagtcgtcggtgcggtcgggcggcgcgggcggcgcgggcgccccgggggccgtggtggtggacgtggacctgacgcccgcggcacccagcagcgagtcgctggccctggacgaagtgacagccatggacaaccacgtggcagggctcgggcccgcggaggagcggcgtgcgctggtgggtcccggctctccgccccgcagcgcgcccggccagctcccatcgccccgggcgcacagcctcaaccccgacgcctcgggctccagctgcagcctggcccggacgcgctcccgagaaagctgcgccagcgtgcgccgcgcctcgtcggccgacgacatcgaggccatgcgcgccggggtgctgcccccgccaccgcgccacgccagcaccggggccatgcacccactgcgcagcggcttgctcaactccacctcggactccgacctcgtgcgctaccgcaccattagcaagattccccaaatcaccctcaactttgtggacctcaagggcgaccccttcttggcttcgcccaccagtgaccgtgagatcatagcacctaagataaaggagcgaacccacaatgtcactgagaaggtcacccaggtcctgtccctgggcgccgacgtgctgcctgagtacaagctgcaggcaccgcgcatccaccgctggaccatcctgcattacagccccttcaaggccgtgtgggactggctcatcctgctgctggtcatctacacggctgtcttcacaccctactcggctgccttcctgctgaaggagacggaagaaggcccgcctgctaccgagtgtggctacgcctgccagccgctggctgtggtggacctcatcgtggacatcatgttcattgtggacatcctcatcaacttccgcaccacctacgtcaatgccaacgaggaggtggtcagccaccccggccgcatcgccgtccactacttcaagggctggttcctcatcgacatggtggccgccatccccttcgacctgctcatcttcggctctggctctgaggagctgatcgggctgctgaagactgcgcggctgctgcggctggtgcgcgtggcgcggaagctggatcgctactcagagtacggcgcggccgtgctgttcttgctcatgtgcacctttgcgctcatcgcgcactggctagcctgcatctggtacgccatcggcaacatggagcagccacacatggactcacgcatcggctggctgcacaacctgggcgaccagataggcaaaccctacaacagcagcggcctgggcggcccctccatcaaggacaagtatgtgacggcgctctacttcaccttcagcagcctcaccagtgtgggcttcggcaacgtctctcccaacaccaactcagagaagatcttctccatctgcgtcatgctcattggctccctcatgtatgctagcatcttcggcaacgtgtcggccatcatccagcggctgtactcgggcacagcccgctaccacacacagatgctgcgggtgcgggagttcatccgcttccaccagatccccaatcccctgcgccagcgcctcgaggagtacttccagcacgcctggtcctacaccaacggcatcgacatgaacgcggtgctgaagggcttccctgagtgcctgcaggctgacatctgcctgcacctgaaccgctcactgctgcagcactgcaaacccttccgaggggccaccaagggctgccttcgggccctggccatgaagttcaagaccacacatgcaccgccaggggacacactggtgcatgctggggacctgctcaccgccctgtacttcatctcccggggctccatcgagatcctgcggggcgacgtcgtcgtggccatcctggggaagaatgacatctttggggagcctctgaacctgtatgcaaggcctggcaagtcgaacggggatgtgcgggccctcacctactgtgacctacacaagatccatcgggacgacctgctggaggtgctggacatgtaccctgagttctccgaccacttctggtccagcctggagatcaccttcaacctgcgagataccaacatgatcccgggctcccccggcagtacggagttagagggtggcttcagtcggcaacgcaagcgcaagttgtccttccgcaggcgcacggacaaggacacggagcagccaggggaggtgtcggccttggggccgggccgggcgggggcagggccgagtagccggggccggccgggggggccgtggggggagagccggtccagtggcccctccagccctgagagcagtgaggatgagggcccaggccgcagctccagccccctccgcctggtgcccttctccagccccaggccccccggagagccgccgggtggggagcccctgatggaggactgcgagaagagcagcgacacttgcaaccccctgtcaggcgccttctcaggagtgtccaacattttcagcttctggggggacagtcggggccgccagtaccaggagctccctcgatgccccgcccccacccccagcctcctcaacatccccctctccagcccgggtcggcggccccggggcgacgtggagagcaggctggatgccctccagcgccagctcaacaggctggagacccggctgagtgcagacatggccactgtcctgcagctgctacagaggcagatgacgctggtcccgcccgcctacagtgctgtgaccaccccggggcctggccccacttccacatccccgctgttgcccgtcagccccctccccaccctcaccttggactcgctttctcaggtttcccagttcatggcgtgtgaggagctgcccccgggggccccagagcttccccaagaaggccccacacgacgcctctccctaccgggccagctgggggccctcacctcccagcccctgcacagacacggctcggacccgggcagttagtggggctgcccagtgtggacacgtggctcacccagggatcaaggcgctgctgggccgctccccttggaggccctgctcaggaggccctgaccgtggaaggggagaggaactcgaaagcacagctcctcccccagcccttgggaccatcttctcctgcagtcccctgggccccagtgagaggggcaggggcagggccggcagtaggtggggcctgtggtccccccactgccctgagggcattagctggtctaactgcccggaggcacccggccctgggccttaggcacctcaaggacttttctgctatttactgctcttattgttaaggataataattaaggatcatatgaataattaatgaagatgctgatgactatgaataataaataattatcctgaggaga

SEQ ID NO: 662 - DNA, 3884 bp, Homo sapiens
  source 1..3884: mol_type = genomic DNA
  misc_feature 1..3884: note = cDNA of KCNH2 gene SNP c.2792C>T (p.Pro931Leu)
atgccggtgcggaggggccacgtcgcgccgcagaacaccttcctggacaccatcatccgcaagtttgagggccagagccgtaagttcatcatcgccaacgctcgggtggagaactgcgccgtcatctactgcaacgacggcttctgcgagctgtgcggctactcgcgggccgaggtgatgcagcgaccctgcacctgcgacttcctgcacgggccgcgcacgcagcgccgcgctgccgcgcagatcgcgcaggcactgctgggcgccgaggagcgcaaagtggaaatcgccttctaccggaaagatgggagctgcttcctatgtctggtggatgtggtgcccgtgaagaacgaggatggggctgtcatcatgttcatcctcaatttcgaggtggtgatggagaaggacatggtggggtccccggctcatgacaccaaccaccggggcccccccaccagctggctggccccaggccgcgccaagaccttccgcctgaagctgcccgcgctgctggcgctgacggcccgggagtcgtcggtgcggtcgggcggcgcgggcggcgcgggcgccccgggggccgtggtggtggacgtggacctgacgcccgcggcacccagcagcgagtcgctggccctggacgaagtgacagccatggacaaccacgtggcagggctcgggcccgcggaggagcggcgtgcgctggtgggtcccggctctccgccccgcagcgcgcccggccagctcccatcgccccgggcgcacagcctcaaccccgacgcctcgggctccagctgcagcctggcccggacgcgctcccgagaaagctgcgccagcgtgcgccgcgcctcgtcggccgacgacatcgaggccatgcgcgccggggtgctgcccccgccaccgcgccacgccagcaccggggccatgcacccactgcgcagcggcttgctcaactccacctcggactccgacctcgtgcgctaccgcaccattagcaagattccccaaatcaccctcaactttgtggacctcaagggcgaccccttcttggcttcgcccaccagtgaccgtgagatcatagcacctaagataaaggagcgaacccacaatgtcactgagaaggtcacccaggtcctgtccctgggcgccgacgtgctgcctgagtacaagctgcaggcaccgcgcatccaccgctggaccatcctgcattacagccccttcaaggccgtgtgggactggctcatcctgctgctggtcatctacacggctgtcttcacaccctactcggctgccttcctgctgaaggagacggaagaaggcccgcctgctaccgagtgtggctacgcctgccagccgctggctgtggtggacctcatcgtggacatcatgttcattgtggacatcctcatcaacttccgcaccacctacgtcaatgccaacgaggaggtggtcagccaccccggccgcatcgccgtccactacttcaagggctggttcctcatcgacatggtggccgccatccccttcgacctgctcatcttcggctctggctctgaggagctgatcgggctgctgaagactgcgcggctgctgcggctggtgcgcgtggcgcggaagctggatcgctactcagagtacggcgcggccgtgctgttcttgctcatgtgcacctttgcgctcatcgcgcactggctagcctgcatctggtacgccatcggcaacatggagcagccacacatggactcacgcatcggctggctgcacaacctgggcgaccagataggcaaaccctacaacagcagcggcctgggcggcccctccatcaaggacaagtatgtgacggcgctctacttcaccttcagcagcctcaccagtgtgggcttcggcaacgtctctcccaacaccaactcagagaagatcttctccatctgcgtcatgctcattggctccctcatgtatgctagcatcttcggcaacgtgtcggccatcatccagcggctgtactcgggcacagcccgctaccacacacagatgctgcgggtgcgggagttcatccgcttccaccagatccccaatcccctgcgccagcgcctcgaggagtacttccagcacgcctggtcctacaccaacggcatcgacatgaacgcggtgctgaagggcttccctgagtgcctgcaggctgacatctgcctgcacctgaaccgctcactgctgcagcactgcaaacccttccgaggggccaccaagggctgccttcgggccctggccatgaagttcaagaccacacatgcaccgccaggggacacactggtgcatgctggggacctgctcaccgccctgtacttcatctcccggggctccatcgagatcctgcggggcgacgtcgtcgtggccatcctggggaagaatgacatctttggggagcctctgaacctgtatgcaaggcctggcaagtcgaacggggatgtgcgggccctcacctactgtgacctacacaagatccatcgggacgacctgctggaggtgctggacatgtaccctgagttctccgaccacttctggtccagcctggagatcaccttcaacctgcgagataccaacatgatcccgggctcccccggcagtacggagttagagggtggcttcagtcggcaacgcaagcgcaagttgtccttccgcaggcgcacggacaaggacacggagcagccaggggaggtgtcggccttggggccgggccgggcgggggcagggccgagtagccggggccggccgggggggccgtggggggagagcctgtccagtggcccctccagccctgagagcagtgaggatgagggcccaggccgcagctccagccccctccgcctggtgcccttctccagccccaggccccccggagagccgccgggtggggagcccctgatggaggactgcgagaagagcagcgacacttgcaaccccctgtcaggcgccttctcaggagtgtccaacattttcagcttctggggggacagtcggggccgccagtaccaggagctccctcgatgccccgcccccacccccagcctcctcaacatccccctctccagcccgggtcggcggccccggggcgacgtggagagcaggctggatgccctccagcgccagctcaacaggctggagacccggctgagtgcagacatggccactgtcctgcagctgctacagaggcagatgacgctggtcccgcccgcctacagtgctgtgaccaccccggggcctggccccacttccacatccccgctgttgcccgtcagccccctccccaccctcaccttggactcgctttctcaggtttcccagttcatggcgtgtgaggagctgcccccgggggccccagagcttccccaagaaggccccacacgacgcctctccctaccgggccagctgggggccctcacctcccagcccctgcacagacacggctcggacccgggcagttagtggggctgcccagtgtggacacgtggctcacccagggatcaaggcgctgctgggccgctccccttggaggccctgctcaggaggccctgaccgtggaaggggagaggaactcgaaagcacagctcctcccccagcccttgggaccatcttctcctgcagtcccctgggccccagtgagaggggcaggggcagggccggcagtaggtggggcctgtggtccccccactgccctgagggcattagctggtctaactgcccggaggcacccggccctgggccttaggcacctcaaggacttttctgctatttactgctcttattgttaaggataataattaaggatcatatgaataattaatgaagatgctgatgactatgaataataaataattatcctgaggaga

SEQ ID NO: 663 - DNA, 3884 bp, Homo sapiens
  source 1..3884: mol_type = genomic DNA
  misc_feature 1..3884: note = cDNA of KCNH2 gene SNP c.2794T>C (p.Ser932Pro)
atgccggtgcggaggggccacgtcgcgccgcagaacaccttcctggacaccatcatccgcaagtttgagggccagagccgtaagttcatcatcgccaacgctcgggtggagaactgcgccgtcatctactgcaacgacggcttctgcgagctgtgcggctactcgcgggccgaggtgatgcagcgaccctgcacctgcgacttcctgcacgggccgcgcacgcagcgccgcgctgccgcgcagatcgcgcaggcactgctgggcgccgaggagcgcaaagtggaaatcgccttctaccggaaagatgggagctgcttcctatgtctggtggatgtggtgcccgtgaagaacgaggatggggctgtcatcatgttcatcctcaatttcgaggtggtgatggagaaggacatggtggggtccccggctcatgacaccaaccaccggggcccccccaccagctggctggccccaggccgcgccaagaccttccgcctgaagctgcccgcgctgctggcgctgacggcccgggagtcgtcggtgcggtcgggcggcgcgggcggcgcgggcgccccgggggccgtggtggtggacgtggacctgacgcccgcggcacccagcagcgagtcgctggccctggacgaagtgacagccatggacaaccacgtggcagggctcgggcccgcggaggagcggcgtgcgctggtgggtcccggctctccgccccgcagcgcgcccggccagctcccatcgccccgggcgcacagcctcaaccccgacgcctcgggctccagctgcagcctggcccggacgcgctcccgagaaagctgcgccagcgtgcgccgcgcctcgtcggccgacgacatcgaggccatgcgcgccggggtgctgcccccgccaccgcgccacgccagcaccggggccatgcacccactgcgcagcggcttgctcaactccacctcggactccgacctcgtgcgctaccgcaccattagcaagattccccaaatcaccctcaactttgtggacctcaagggcgaccccttcttggcttcgcccaccagtgaccgtgagatcatagcacctaagataaaggagcgaacccacaatgtcactgagaaggtcacccaggtcctgtccctgggcgccgacgtgctgcctgagtacaagctgcaggcaccgcgcatccaccgctggaccatcctgcattacagccccttcaaggccgtgtgggactggctcatcctgctgctggtcatctacacggctgtcttcacaccctactcggctgccttcctgctgaaggagacggaagaaggcccgcctgctaccgagtgtggctacgcctgccagccgctggctgtggtggacctcatcgtggacatcatgttcattgtggacatcctcatcaacttccgcaccacctacgtcaatgccaacgaggaggtggtcagccaccccggccgcatcgccgtccactacttcaagggctggttcctcatcgacatggtggccgccatccccttcgacctgctcatcttcggctctggctctgaggagctgatcgggctgctgaagactgcgcggctgctgcggctggtgcgcgtggcgcggaagctggatcgctactcagagtacggcgcggccgtgctgttcttgctcatgtgcacctttgcgctcatcgcgcactggctagcctgcatctggtacgccatcggcaacatggagcagccacacatggactcacgcatcggctggctgcacaacctgggcgaccagataggcaaaccctacaacagcagcggcctgggcggcccctccatcaaggacaagtatgtgacggcgctctacttcaccttcagcagcctcaccagtgtgggcttcggcaacgtctctcccaacaccaactcagagaagatcttctccatctgcgtcatgctcattggctccctcatgtatgctagcatcttcggcaacgtgtcggccatcatccagcggctgtactcgggcacagcccgctaccacacacagatgctgcgggtgcgggagttcatccgcttccaccagatccccaatcccctgcgccagcgcctcgaggagtacttccagcacgcctggtcctacaccaacggcatcgacatgaacgcggtgctgaagggcttccctgagtgcctgcaggctgacatctgcctgcacctgaaccgctcactgctgcagcactgcaaacccttccgaggggccaccaagggctgccttcgggccctggccatgaagttcaagaccacacatgcaccgccaggggacacactggtgcatgctggggacctgctcaccgccctgtacttcatctcccggggctccatcgagatcctgcggggcgacgtcgtcgtggccatcctggggaagaatgacatctttggggagcctctgaacctgtatgcaaggcctggcaagtcgaacggggatgtgcgggccctcacctactgtgacctacacaagatccatcgggacgacctgctggaggtgctggacatgtaccctgagttctccgaccacttctggtccagcctggagatcaccttcaacctgcgagataccaacatgatcccgggctcccccggcagtacggagttagagggtggcttcagtcggcaacgcaagcgcaagttgtccttccgcaggcgcacggacaaggacacggagcagccaggggaggtgtcggccttggggccgggccgggcgggggcagggccgagtagccggggccggccgggggggccgtggggggagagcccgcccagtggcccctccagccctgagagcagtgaggatgagggcccaggccgcagctccagccccctccgcctggtgcccttctccagccccaggccccccggagagccgccgggtggggagcccctgatggaggactgcgagaagagcagcgacacttgcaaccccctgtcaggcgccttctcaggagtgtccaacattttcagcttctggggggacagtcggggccgccagtaccaggagctccctcgatgccccgcccccacccccagcctcctcaacatccccctctccagcccgggtcggcggccccggggcgacgtggagagcaggctggatgccctccagcgccagctcaacaggctggagacccggctgagtgcagacatggccactgtcctgcagctgctacagaggcagatgacgctggtcccgcccgcctacagtgctgtgaccaccccggggcctggccccacttccacatccccgctgttgcccgtcagccccctccccaccctcaccttggactcgctttctcaggtttcccagttcatggcgtgtgaggagctgcccccgggggccccagagcttccccaagaaggccccacacgacgcctctccctaccgggccagctgggggccctcacctcccagcccctgcacagacacggctcggacccgggcagttagtggggctgcccagtgtggacacgtggctcacccagggatcaaggcgctgctgggccgctccccttggaggccctgctcaggaggccctgaccgtggaaggggagaggaactcgaaagcacagctcctcccccagcccttgggaccatcttctcctgcagtcccctgggccccagtgagaggggcaggggcagggccggcagtaggtggggcctgtggtccccccactgccctgagggcattagctggtctaactgcccggaggcacccggccctgggccttaggcacctcaaggacttttctgctatttactgctcttattgttaaggataataattaaggatcatatgaataattaatgaagatgctgatgactatgaataataaataattatcctgaggaga

SEQ ID NO: 664 - DNA, 3884 bp, Homo sapiens
  source 1..3884: mol_type = genomic DNA
  misc_feature 1..3884: note = cDNA of KCNH2 gene SNP c.2795C>T (p.Ser932Phe)
atgccggtgcggaggggccacgtcgcgccgcagaacaccttcctggacaccatcatccgcaagtttgagggccagagccgtaagttcatcatcgccaacgctcgggtggagaactgcgccgtcatctactgcaacgacggcttctgcgagctgtgcggctactcgcgggccgaggtgatgcagcgaccctgcacctgcgacttcctgcacgggccgcgcacgcagcgccgcgctgccgcgcagatcgcgcaggcactgctgggcgccgaggagcgcaaagtggaaatcgccttctaccggaaagatgggagctgcttcctatgtctggtggatgtggtgcccgtgaagaacgaggatggggctgtcatcatgttcatcctcaatttcgaggtggtgatggagaaggacatggtggggtccccggctcatgacaccaaccaccggggcccccccaccagctggctggccccaggccgcgccaagaccttccgcctgaagctgcccgcgctgctggcgctgacggcccgggagtcgtcggtgcggtcgggcggcgcgggcggcgcgggcgccccgggggccgtggtggtggacgtggacctgacgcccgcggcacccagcagcgagtcgctggccctggacgaagtgacagccatggacaaccacgtggcagggctcgggcccgcggaggagcggcgtgcgctggtgggtcccggctctccgccccgcagcgcgcccggccagctcccatcgccccgggcgcacagcctcaaccccgacgcctcgggctccagctgcagcctggcccggacgcgctcccgagaaagctgcgccagcgtgcgccgcgcctcgtcggccgacgacatcgaggccatgcgcgccggggtgctgcccccgccaccgcgccacgccagcaccggggccatgcacccactgcgcagcggcttgctcaactccacctcggactccgacctcgtgcgctaccgcaccattagcaagattccccaaatcaccctcaactttgtggacctcaagggcgaccccttcttggcttcgcccaccagtgaccgtgagatcatagcacctaagataaaggagcgaacccacaatgtcactgagaaggtcacccaggtcctgtccctgggcgccgacgtgctgcctgagtacaagctgcaggcaccgcgcatccaccgctggaccatcctgcattacagccccttcaaggccgtgtgggactggctcatcctgctgctggtcatctacacggctgtcttcacaccctactcggctgccttcctgctgaaggagacggaagaaggcccgcctgctaccgagtgtggctacgcctgccagccgctggctgtggtggacctcatcgtggacatcatgttcattgtggacatcctcatcaacttccgcaccacctacgtcaatgccaacgaggaggtggtcagccaccccggccgcatcgccgtccactacttcaagggctggttcctcatcgacatggtggccgccatccccttcgacctgctcatcttcggctctggctctgaggagctgatcgggctgctgaagactgcgcggctgctgcggctggtgcgcgtggcgcggaagctggatcgctactcagagtacggcgcggccgtgctgttcttgctcatgtgcacctttgcgctcatcgcgcactggctagcctgcatctggtacgccatcggcaacatggagcagccacacatggactcacgcatcggctggctgcacaacctgggcgaccagataggcaaaccctacaacagcagcggcctgggcggcccctccatcaaggacaagtatgtgacggcgctctacttcaccttcagcagcctcaccagtgtgggcttcggcaacgtctctcccaacaccaactcagagaagatcttctccatctgcgtcatgctcattggctccctcatgtatgctagcatcttcggcaacgtgtcggccatcatccagcggctgtactcgggcacagcccgctaccacacacagatgctgcgggtgcgggagttcatccgcttccaccagatccccaatcccctgcgccagcgcctcgaggagtacttccagcacgcctggtcctacaccaacggcatcgacatgaacgcggtgctgaagggcttccctgagtgcctgcaggctgacatctgcctgcacctgaaccgctcactgctgcagcactgcaaacccttccgaggggccaccaagggctgccttcgggccctggccatgaagttcaagaccacacatgcaccgccaggggacacactggtgcatgctggggacctgctcaccgccctgtacttcatctcccggggctccatcgagatcctgcggggcgacgtcgtcgtggccatcctggggaagaatgacatctttggggagcctctgaacctgtatgcaaggcctggcaagtcgaacggggatgtgcgggccctcacctactgtgacctacacaagatccatcgggacgacctgctggaggtgctggacatgtaccctgagttctccgaccacttctggtccagcctggagatcaccttcaacctgcgagataccaacatgatcccgggctcccccggcagtacggagttagagggtggcttcagtcggcaacgcaagcgcaagttgtccttccgcaggcgcacggacaaggacacggagcagccaggggaggtgtcggccttggggccgggccgggcgggggcagggccgagtagccggggccggccgggggggccgtggggggagagcccgttcagtggcccctccagccctgagagcagtgaggatgagggcccaggccgcagctccagccccctccgcctggtgcccttctccagccccaggccccccggagagccgccgggtggggagcccctgatggaggactgcgagaagagcagcgacacttgcaaccccctgtcaggcgccttctcaggagtgtccaacattttcagcttctggggggacagtcggggccgccagtaccaggagctccctcgatgccccgcccccacccccagcctcctcaacatccccctctccagcccgggtcggcggccccggggcgacgtggagagcaggctggatgccctccagcgccagctcaacaggctggagacccggctgagtgcagacatggccactgtcctgcagctgctacagaggcagatgacgctggtcccgcccgcctacagtgctgtgaccaccccggggcctggccccacttccacatccccgctgttgcccgtcagccccctccccaccctcaccttggactcgctttctcaggtttcccagttcatggcgtgtgaggagctgcccccgggggccccagagcttccccaagaaggccccacacgacgcctctccctaccgggccagctgggggccctcacctcccagcccctgcacagacacggctcggacccgggcagttagtggggctgcccagtgtggacacgtggctcacccagggatcaaggcgctgctgggccgctccccttggaggccctgctcaggaggccctgaccgtggaaggggagaggaactcgaaagcacagctcctcccccagcccttgggaccatcttctcctgcagtcccctgggccccagtgagaggggcaggggcagggccggcagtaggtggggcctgtggtccccccactgccctgagggcattagctggtctaactgcccggaggcacccggccctgggccttaggcacctcaaggacttttctgctatttactgctcttattgttaaggataataattaaggatcatatgaataattaatgaagatgctgatgactatgaataataaataattatcctgaggaga

SEQ ID NO: 665 - DNA, 3884 bp, Homo sapiens
  source 1..3884: mol_type = genomic DNA
  misc_feature 1..3884: note = cDNA of KCNH2 gene SNP c.2803C>G (p.Pro935Ala)
atgccggtgcggaggggccacgtcgcgccgcagaacaccttcctggacaccatcatccgcaagtttgagggccagagccgtaagttcatcatcgccaacgctcgggtggagaactgcgccgtcatctactgcaacgacggcttctgcgagctgtgcggctactcgcgggccgaggtgatgcagcgaccctgcacctgcgacttcctgcacgggccgcgcacgcagcgccgcgctgccgcgcagatcgcgcaggcactgctgggcgccgaggagcgcaaagtggaaatcgccttctaccggaaagatgggagctgcttcctatgtctggtggatgtggtgcccgtgaagaacgaggatggggctgtcatcatgttcatcctcaatttcgaggtggtgatggagaaggacatggtggggtccccggctcatgacaccaaccaccggggcccccccaccagctggctggccccaggccgcgccaagaccttccgcctgaagctgcccgcgctgctggcgctgacggcccgggagtcgtcggtgcggtcgggcggcgcgggcggcgcgggcgccccgggggccgtggtggtggacgtggacctgacgcccgcggcacccagcagcgagtcgctggccctggacgaagtgacagccatggacaaccacgtggcagggctcgggcccgcggaggagcggcgtgcgctggtgggtcccggctctccgccccgcagcgcgcccggccagctcccatcgccccgggcgcacagcctcaaccccgacgcctcgggctccagctgcagcctggcccggacgcgctcccgagaaagctgcgccagcgtgcgccgcgcctcgtcggccgacgacatcgaggccatgcgcgccggggtgctgcccccgccaccgcgccacgccagcaccggggccatgcacccactgcgcagcggcttgctcaactccacctcggactccgacctcgtgcgctaccgcaccattagcaagattccccaaatcaccctcaactttgtggacctcaagggcgaccccttcttggcttcgcccaccagtgaccgtgagatcatagcacctaagataaaggagcgaacccacaatgtcactgagaaggtcacccaggtcctgtccctgggcgccgacgtgctgcctgagtacaagctgcaggcaccgcgcatccaccgctggaccatcctgcattacagccccttcaaggccgtgtgggactggctcatcctgctgctggtcatctacacggctgtcttcacaccctactcggctgccttcctgctgaaggagacggaagaaggcccgcctgctaccgagtgtggctacgcctgccagccgctggctgtggtggacctcatcgtggacatcatgttcattgtggacatcctcatcaacttccgcaccacctacgtcaatgccaacgaggaggtggtcagccaccccggccgcatcgccgtccactacttcaagggctggttcctcatcgacatggtggccgccatccccttcgacctgctcatcttcggctctggctctgaggagctgatcgggctgctgaagactgcgcggctgctgcggctggtgcgcgtggcgcggaagctggatcgctactcagagtacggcgcggccgtgctgttcttgctcatgtgcacctttgcgctcatcgcgcactggctagcctgcatctggtacgccatcggcaacatggagcagccacacatggactcacgcatcggctggctgcacaacctgggcgaccagataggcaaaccctacaacagcagcggcctgggcggcccctccatcaaggacaagtatgtgacggcgctctacttcaccttcagcagcctcaccagtgtgggcttcggcaacgtctctcccaacaccaactcagagaagatcttctccatctgcgtcatgctcattggctccctcatgtatgctagcatcttcggcaacgtgtcggccatcatccagcggctgtactcgggcacagcccgctaccacacacagatgctgcgggtgcgggagttcatccgcttccaccagatccccaatcccctgcgccagcgcctcgaggagtacttccagcacgcctggtcctacaccaacggcatcgacatgaacgcggtgctgaagggcttccctgagtgcctgcaggctgacatctgcctgcacctgaaccgctcactgctgcagcactgcaaacccttccgaggggccaccaagggctgccttcgggccctggccatgaagttcaagaccacacatgcaccgccaggggacacactggtgcatgctggggacctgctcaccgccctgtacttcatctcccggggctccatcgagatcctgcggggcgacgtcgtcgtggccatcctggggaagaatgacatctttggggagcctctgaacctgtatgcaaggcctggcaagtcgaacggggatgtgcgggccctcacctactgtgacctacacaagatccatcgggacgacctgctggaggtgctggacatgtaccctgagttctccgaccacttctggtccagcctggagatcaccttcaacctgcgagataccaacatgatcccgggctcccccggcagtacggagttagagggtggcttcagtcggcaacgcaagcgcaagttgtccttccgcaggcgcacggacaaggacacggagcagccaggggaggtgtcggccttggggccgggccgggcgggggcagggccgagtagccggggccggccgggggggccgtggggggagagcccgtccagtggcgcctccagccctgagagcagtgaggatgagggcccaggccgcagctccagccccctccgcctggtgcccttctccagccccaggccccccggagagccgccgggtggggagcccctgatggaggactgcgagaagagcagcgacacttgcaaccccctgtcaggcgccttctcaggagtgtccaacattttcagcttctggggggacagtcggggccgccagtaccaggagctccctcgatgccccgcccccacccccagcctcctcaacatccccctctccagcccgggtcggcggccccggggcgacgtggagagcaggctggatgccctccagcgccagctcaacaggctggagacccggctgagtgcagacatggccactgtcctgcagctgctacagaggcagatgacgctggtcccgcccgcctacagtgctgtgaccaccccggggcctggccccacttccacatccccgctgttgcccgtcagccccctccccaccctcaccttggactcgctttctcaggtttcccagttcatggcgtgtgaggagctgcccccgggggccccagagcttccccaagaaggccccacacgacgcctctccctaccgggccagctgggggccctcacctcccagcccctgcacagacacggctcggacccgggcagttagtggggctgcccagtgtggacacgtggctcacccagggatcaaggcgctgctgggccgctccccttggaggccctgctcaggaggccctgaccgtggaaggggagaggaactcgaaagcacagctcctcccccagcccttgggaccatcttctcctgcagtcccctgggccccagtgagaggggcaggggcagggccggcagtaggtggggcctgtggtccccccactgccctgagggcattagctggtctaactgcccggaggcacccggccctgggccttaggcacctcaaggacttttctgctatttactgctcttattgttaaggataataattaaggatcatatgaataattaatgaagatgctgatgactatgaataataaataattatcctgaggaga

SEQ ID NO: 666 - DNA, 3884 bp, Homo sapiens
  source 1..3884: mol_type = genomic DNA
  misc_feature 1..3884: note = cDNA of KCNH2 gene SNP c.280G>A (p.Val94Met)
atgccggtgcggaggggccacgtcgcgccgcagaacaccttcctggacaccatcatccgcaagtttgagggccagagccgtaagttcatcatcgccaacgctcgggtggagaactgcgccgtcatctactgcaacgacggcttctgcgagctgtgcggctactcgcgggccgaggtgatgcagcgaccctgcacctgcgacttcctgcacgggccgcgcacgcagcgccgcgctgccgcgcagatcgcgcaggcactgctgggcgccgaggagcgcaaaatggaaatcgccttctaccggaaagatgggagctgcttcctatgtctggtggatgtggtgcccgtgaagaacgaggatggggctgtcatcatgttcatcctcaatttcgaggtggtgatggagaaggacatggtggggtccccggctcatgacaccaaccaccggggcccccccaccagctggctggccccaggccgcgccaagaccttccgcctgaagctgcccgcgctgctggcgctgacggcccgggagtcgtcggtgcggtcgggcggcgcgggcggcgcgggcgccccgggggccgtggtggtggacgtggacctgacgcccgcggcacccagcagcgagtcgctggccctggacgaagtgacagccatggacaaccacgtggcagggctcgggcccgcggaggagcggcgtgcgctggtgggtcccggctctccgccccgcagcgcgcccggccagctcccatcgccccgggcgcacagcctcaaccccgacgcctcgggctccagctgcagcctggcccggacgcgctcccgagaaagctgcgccagcgtgcgccgcgcctcgtcggccgacgacatcgaggccatgcgcgccggggtgctgcccccgccaccgcgccacgccagcaccggggccatgcacccactgcgcagcggcttgctcaactccacctcggactccgacctcgtgcgctaccgcaccattagcaagattccccaaatcaccctcaactttgtggacctcaagggcgaccccttcttggcttcgcccaccagtgaccgtgagatcatagcacctaagataaaggagcgaacccacaatgtcactgagaaggtcacccaggtcctgtccctgggcgccgacgtgctgcctgagtacaagctgcaggcaccgcgcatccaccgctggaccatcctgcattacagccccttcaaggccgtgtgggactggctcatcctgctgctggtcatctacacggctgtcttcacaccctactcggctgccttcctgctgaaggagacggaagaaggcccgcctgctaccgagtgtggctacgcctgccagccgctggctgtggtggacctcatcgtggacatcatgttcattgtggacatcctcatcaacttccgcaccacctacgtcaatgccaacgaggaggtggtcagccaccccggccgcatcgccgtccactacttcaagggctggttcctcatcgacatggtggccgccatccccttcgacctgctcatcttcggctctggctctgaggagctgatcgggctgctgaagactgcgcggctgctgcggctggtgcgcgtggcgcggaagctggatcgctactcagagtacggcgcggccgtgctgttcttgctcatgtgcacctttgcgctcatcgcgcactggctagcctgcatctggtacgccatcggcaacatggagcagccacacatggactcacgcatcggctggctgcacaacctgggcgaccagataggcaaaccctacaacagcagcggcctgggcggcccctccatcaaggacaagtatgtgacggcgctctacttcaccttcagcagcctcaccagtgtgggcttcggcaacgtctctcccaacaccaactcagagaagatcttctccatctgcgtcatgctcattggctccctcatgtatgctagcatcttcggcaacgtgtcggccatcatccagcggctgtactcgggcacagcccgctaccacacacagatgctgcgggtgcgggagttcatccgcttccaccagatccccaatcccctgcgccagcgcctcgaggagtacttccagcacgcctggtcctacaccaacggcatcgacatgaacgcggtgctgaagggcttccctgagtgcctgcaggctgacatctgcctgcacctgaaccgctcactgctgcagcactgcaaacccttccgaggggccaccaagggctgccttcgggccctggccatgaagttcaagaccacacatgcaccgccaggggacacactggtgcatgctggggacctgctcaccgccctgtacttcatctcccggggctccatcgagatcctgcggggcgacgtcgtcgtggccatcctggggaagaatgacatctttggggagcctctgaacctgtatgcaaggcctggcaagtcgaacggggatgtgcgggccctcacctactgtgacctacacaagatccatcgggacgacctgctggaggtgctggacatgtaccctgagttctccgaccacttctggtccagcctggagatcaccttcaacctgcgagataccaacatgatcccgggctcccccggcagtacggagttagagggtggcttcagtcggcaacgcaagcgcaagttgtccttccgcaggcgcacggacaaggacacggagcagccaggggaggtgtcggccttggggccgggccgggcgggggcagggccgagtagccggggccggccgggggggccgtggggggagagcccgtccagtggcccctccagccctgagagcagtgaggatgagggcccaggccgcagctccagccccctccgcctggtgcccttctccagccccaggccccccggagagccgccgggtggggagcccctgatggaggactgcgagaagagcagcgacacttgcaaccccctgtcaggcgccttctcaggagtgtccaacattttcagcttctggggggacagtcggggccgccagtaccaggagctccctcgatgccccgcccccacccccagcctcctcaacatccccctctccagcccgggtcggcggccccggggcgacgtggagagcaggctggatgccctccagcgccagctcaacaggctggagacccggctgagtgcagacatggccactgtcctgcagctgctacagaggcagatgacgctggtcccgcccgcctacagtgctgtgaccaccccggggcctggccccacttccacatccccgctgttgcccgtcagccccctccccaccctcaccttggactcgctttctcaggtttcccagttcatggcgtgtgaggagctgcccccgggggccccagagcttccccaagaaggccccacacgacgcctctccctaccgggccagctgggggccctcacctcccagcccctgcacagacacggctcggacccgggcagttagtggggctgcccagtgtggacacgtggctcacccagggatcaaggcgctgctgggccgctccccttggaggccctgctcaggaggccctgaccgtggaaggggagaggaactcgaaagcacagctcctcccccagcccttgggaccatcttctcctgcagtcccctgggccccagtgagaggggcaggggcagggccggcagtaggtggggcctgtggtccccccactgccctgagggcattagctggtctaactgcccggaggcacccggccctgggccttaggcacctcaaggacttttctgctatttactgctcttattgttaaggataataattaaggatcatatgaataattaatgaagatgctgatgactatgaataataaataattatcctgaggaga

SEQ ID NO: 667 - DNA, 3884 bp, Homo sapiens
  source 1..3884: mol_type = genomic DNA
  misc_feature 1..3884: note = cDNA of KCNH2 gene SNP c.280G>C (p.Val94Leu)
atgccggtgcggaggggccacgtcgcgccgcagaacaccttcctggacaccatcatccgcaagtttgagggccagagccgtaagttcatcatcgccaacgctcgggtggagaactgcgccgtcatctactgcaacgacggcttctgcgagctgtgcggctactcgcgggccgaggtgatgcagcgaccctgcacctgcgacttcctgcacgggccgcgcacgcagcgccgcgctgccgcgcagatcgcgcaggcactgctgggcgccgaggagcgcaaactggaaatcgccttctaccggaaagatgggagctgcttcctatgtctggtggatgtggtgcccgtgaagaacgaggatggggctgtcatcatgttcatcctcaatttcgaggtggtgatggagaaggacatggtggggtccccggctcatgacaccaaccaccggggcccccccaccagctggctggccccaggccgcgccaagaccttccgcctgaagctgcccgcgctgctggcgctgacggcccgggagtcgtcggtgcggtcgggcggcgcgggcggcgcgggcgccccgggggccgtggtggtggacgtggacctgacgcccgcggcacccagcagcgagtcgctggccctggacgaagtgacagccatggacaaccacgtggcagggctcgggcccgcggaggagcggcgtgcgctggtgggtcccggctctccgccccgcagcgcgcccggccagctcccatcgccccgggcgcacagcctcaaccccgacgcctcgggctccagctgcagcctggcccggacgcgctcccgagaaagctgcgccagcgtgcgccgcgcctcgtcggccgacgacatcgaggccatgcgcgccggggtgctgcccccgccaccgcgccacgccagcaccggggccatgcacccactgcgcagcggcttgctcaactccacctcggactccgacctcgtgcgctaccgcaccattagcaagattccccaaatcaccctcaactttgtggacctcaagggcgaccccttcttggcttcgcccaccagtgaccgtgagatcatagcacctaagataaaggagcgaacccacaatgtcactgagaaggtcacccaggtcctgtccctgggcgccgacgtgctgcctgagtacaagctgcaggcaccgcgcatccaccgctggaccatcctgcattacagccccttcaaggccgtgtgggactggctcatcctgctgctggtcatctacacggctgtcttcacaccctactcggctgccttcctgctgaaggagacggaagaaggcccgcctgctaccgagtgtggctacgcctgccagccgctggctgtggtggacctcatcgtggacatcatgttcattgtggacatcctcatcaacttccgcaccacctacgtcaatgccaacgaggaggtggtcagccaccccggccgcatcgccgtccactacttcaagggctggttcctcatcgacatggtggccgccatccccttcgacctgctcatcttcggctctggctctgaggagctgatcgggctgctgaagactgcgcggctgctgcggctggtgcgcgtggcgcggaagctggatcgctactcagagtacggcgcggccgtgctgttcttgctcatgtgcacctttgcgctcatcgcgcactggctagcctgcatctggtacgccatcggcaacatggagcagccacacatggactcacgcatcggctggctgcacaacctgggcgaccagataggcaaaccctacaacagcagcggcctgggcggcccctccatcaaggacaagtatgtgacggcgctctacttcaccttcagcagcctcaccagtgtgggcttcggcaacgtctctcccaacaccaactcagagaagatcttctccatctgcgtcatgctcattggctccctcatgtatgctagcatcttcggcaacgtgtcggccatcatccagcggctgtactcgggcacagcccgctaccacacacagatgctgcgggtgcgggagttcatccgcttccaccagatccccaatcccctgcgccagcgcctcgaggagtacttccagcacgcctggtcctacaccaacggcatcgacatgaacgcggtgctgaagggcttccctgagtgcctgcaggctgacatctgcctgcacctgaaccgctcactgctgcagcactgcaaacccttccgaggggccaccaagggctgccttcgggccctggccatgaagttcaagaccacacatgcaccgccaggggacacactggtgcatgctggggacctgctcaccgccctgtacttcatctcccggggctccatcgagatcctgcggggcgacgtcgtcgtggccatcctggggaagaatgacatctttggggagcctctgaacctgtatgcaaggcctggcaagtcgaacggggatgtgcgggccctcacctactgtgacctacacaagatccatcgggacgacctgctggaggtgctggacatgtaccctgagttctccgaccacttctggtccagcctggagatcaccttcaacctgcgagataccaacatgatcccgggctcccccggcagtacggagttagagggtggcttcagtcggcaacgcaagcgcaagttgtccttccgcaggcgcacggacaaggacacggagcagccaggggaggtgtcggccttggggccgggccgggcgggggcagggccgagtagccggggccggccgggggggccgtggggggagagcccgtccagtggcccctccagccctgagagcagtgaggatgagggcccaggccgcagctccagccccctccgcctggtgcccttctccagccccaggccccccggagagccgccgggtggggagcccctgatggaggactgcgagaagagcagcgacacttgcaaccccctgtcaggcgccttctcaggagtgtccaacattttcagcttctggggggacagtcggggccgccagtaccaggagctccctcgatgccccgcccccacccccagcctcctcaacatccccctctccagcccgggtcggcggccccggggcgacgtggagagcaggctggatgccctccagcgccagctcaacaggctggagacccggctgagtgcagacatggccactgtcctgcagctgctacagaggcagatgacgctggtcccgcccgcctacagtgctgtgaccaccccggggcctggccccacttccacatccccgctgttgcccgtcagccccctccccaccctcaccttggactcgctttctcaggtttcccagttcatggcgtgtgaggagctgcccccgggggccccagagcttccccaagaaggccccacacgacgcctctccctaccgggccagctgggggccctcacctcccagcccctgcacagacacggctcggacccgggcagttagtggggctgcccagtgtggacacgtggctcacccagggatcaaggcgctgctgggccgctccccttggaggccctgctcaggaggccctgaccgtggaaggggagaggaactcgaaagcacagctcctcccccagcccttgggaccatcttctcctgcagtcccctgggccccagtgagaggggcaggggcagggccggcagtaggtggggcctgtggtccccccactgccctgagggcattagctggtctaactgcccggaggcacccggccctgggccttaggcacctcaaggacttttctgctatttactgctcttattgttaaggataataattaaggatcatatgaataattaatgaagatgctgatgactatgaataataaataattatcctgaggaga

SEQ ID NO: 668 - DNA, 3884 bp, Homo sapiens
  source 1..3884: mol_type = genomic DNA
  misc_feature 1..3884: note = cDNA of KCNH2 gene SNP c.2810G>A (p.Ser937Asn)
atgccggtgcggaggggccacgtcgcgccgcagaacaccttcctggacaccatcatccgcaagtttgagggccagagccgtaagttcatcatcgccaacgctcgggtggagaactgcgccgtcatctactgcaacgacggcttctgcgagctgtgcggctactcgcgggccgaggtgatgcagcgaccctgcacctgcgacttcctgcacgggccgcgcacgcagcgccgcgctgccgcgcagatcgcgcaggcactgctgggcgccgaggagcgcaaagtggaaatcgccttctaccggaaagatgggagctgcttcctatgtctggtggatgtggtgcccgtgaagaacgaggatggggctgtcatcatgttcatcctcaatttcgaggtggtgatggagaaggacatggtggggtccccggctcatgacaccaaccaccggggcccccccaccagctggctggccccaggccgcgccaagaccttccgcctgaagctgcccgcgctgctggcgctgacggcccgggagtcgtcggtgcggtcgggcggcgcgggcggcgcgggcgccccgggggccgtggtggtggacgtggacctgacgcccgcggcacccagcagcgagtcgctggccctggacgaagtgacagccatggacaaccacgtggcagggctcgggcccgcggaggagcggcgtgcgctggtgggtcccggctctccgccccgcagcgcgcccggccagctcccatcgccccgggcgcacagcctcaaccccgacgcctcgggctccagctgcagcctggcccggacgcgctcccgagaaagctgcgccagcgtgcgccgcgcctcgtcggccgacgacatcgaggccatgcgcgccggggtgctgcccccgccaccgcgccacgccagcaccggggccatgcacccactgcgcagcggcttgctcaactccacctcggactccgacctcgtgcgctaccgcaccattagcaagattccccaaatcaccctcaactttgtggacctcaagggcgaccccttcttggcttcgcccaccagtgaccgtgagatcatagcacctaagataaaggagcgaacccacaatgtcactgagaaggtcacccaggtcctgtccctgggcgccgacgtgctgcctgagtacaagctgcaggcaccgcgcatccaccgctggaccatcctgcattacagccccttcaaggccgtgtgggactggctcatcctgctgctggtcatctacacggctgtcttcacaccctactcggctgccttcctgctgaaggagacggaagaaggcccgcctgctaccgagtgtggctacgcctgccagccgctggctgtggtggacctcatcgtggacatcatgttcattgtggacatcctcatcaacttccgcaccacctacgtcaatgccaacgaggaggtggtcagccaccccggccgcatcgccgtccactacttcaagggctggttcctcatcgacatggtggccgccatccccttcgacctgctcatcttcggctctggctctgaggagctgatcgggctgctgaagactgcgcggctgctgcggctggtgcgcgtggcgcggaagctggatcgctactcagagtacggcgcggccgtgctgttcttgctcatgtgcacctttgcgctcatcgcgcactggctagcctgcatctggtacgccatcggcaacatggagcagccacacatggactcacgcatcggctggctgcacaacctgggcgaccagataggcaaaccctacaacagcagcggcctgggcggcccctccatcaaggacaagtatgtgacggcgctctacttcaccttcagcagcctcaccagtgtgggcttcggcaacgtctctcccaacaccaactcagagaagatcttctccatctgcgtcatgctcattggctccctcatgtatgctagcatcttcggcaacgtgtcggccatcatccagcggctgtactcgggcacagcccgctaccacacacagatgctgcgggtgcgggagttcatccgcttccaccagatccccaatcccctgcgccagcgcctcgaggagtacttccagcacgcctggtcctacaccaacggcatcgacatgaacgcggtgctgaagggcttccctgagtgcctgcaggctgacatctgcctgcacctgaaccgctcactgctgcagcactgcaaacccttccgaggggccaccaagggctgccttcgggccctggccatgaagttcaagaccacacatgcaccgccaggggacacactggtgcatgctggggacctgctcaccgccctgtacttcatctcccggggctccatcgagatcctgcggggcgacgtcgtcgtggccatcctggggaagaatgacatctttggggagcctctgaacctgtatgcaaggcctggcaagtcgaacggggatgtgcgggccctcacctactgtgacctacacaagatccatcgggacgacctgctggaggtgctggacatgtaccctgagttctccgaccacttctggtccagcctggagatcaccttcaacctgcgagataccaacatgatcccgggctcccccggcagtacggagttagagggtggcttcagtcggcaacgcaagcgcaagttgtccttccgcaggcgcacggacaaggacacggagcagccaggggaggtgtcggccttggggccgggccgggcgggggcagggccgagtagccggggccggccgggggggccgtggggggagagcccgtccagtggcccctccaaccctgagagcagtgaggatgagggcccaggccgcagctccagccccctccgcctggtgcccttctccagccccaggccccccggagagccgccgggtggggagcccctgatggaggactgcgagaagagcagcgacacttgcaaccccctgtcaggcgccttctcaggagtgtccaacattttcagcttctggggggacagtcggggccgccagtaccaggagctccctcgatgccccgcccccacccccagcctcctcaacatccccctctccagcccgggtcggcggccccggggcgacgtggagagcaggctggatgccctccagcgccagctcaacaggctggagacccggctgagtgcagacatggccactgtcctgcagctgctacagaggcagatgacgctggtcccgcccgcctacagtgctgtgaccaccccggggcctggccccacttccacatccccgctgttgcccgtcagccccctccccaccctcaccttggactcgctttctcaggtttcccagttcatggcgtgtgaggagctgcccccgggggccccagagcttccccaagaaggccccacacgacgcctctccctaccgggccagctgggggccctcacctcccagcccctgcacagacacggctcggacccgggcagttagtggggctgcccagtgtggacacgtggctcacccagggatcaaggcgctgctgggccgctccccttggaggccctgctcaggaggccctgaccgtggaaggggagaggaactcgaaagcacagctcctcccccagcccttgggaccatcttctcctgcagtcccctgggccccagtgagaggggcaggggcagggccggcagtaggtggggcctgtggtccccccactgccctgagggcattagctggtctaactgcccggaggcacccggccctgggccttaggcacctcaaggacttttctgctatttactgctcttattgttaaggataataattaaggatcatatgaataattaatgaagatgctgatgactatgaataataaataattatcctgaggaga

SEQ ID NO: 669 - DNA, 3884 bp, Homo sapiens
  source 1..3884: mol_type = genomic DNA
  misc_feature 1..3884: note = cDNA of KCNH2 gene SNP c.2819G>T (p.Ser940Ile)
atgccggtgcggaggggccacgtcgcgccgcagaacaccttcctggacaccatcatccgcaagtttgagggccagagccgtaagttcatcatcgccaacgctcgggtggagaactgcgccgtcatctactgcaacgacggcttctgcgagctgtgcggctactcgcgggccgaggtgatgcagcgaccctgcacctgcgacttcctgcacgggccgcgcacgcagcgccgcgctgccgcgcagatcgcgcaggcactgctgggcgccgaggagcgcaaagtggaaatcgccttctaccggaaagatgggagctgcttcctatgtctggtggatgtggtgcccgtgaagaacgaggatggggctgtcatcatgttcatcctcaatttcgaggtggtgatggagaaggacatggtggggtccccggctcatgacaccaaccaccggggcccccccaccagctggctggccccaggccgcgccaagaccttccgcctgaagctgcccgcgctgctggcgctgacggcccgggagtcgtcggtgcggtcgggcggcgcgggcggcgcgggcgccccgggggccgtggtggtggacgtggacctgacgcccgcggcacccagcagcgagtcgctggccctggacgaagtgacagccatggacaaccacgtggcagggctcgggcccgcggaggagcggcgtgcgctggtgggtcccggctctccgccccgcagcgcgcccggccagctcccatcgccccgggcgcacagcctcaaccccgacgcctcgggctccagctgcagcctggcccggacgcgctcccgagaaagctgcgccagcgtgcgccgcgcctcgtcggccgacgacatcgaggccatgcgcgccggggtgctgcccccgccaccgcgccacgccagcaccggggccatgcacccactgcgcagcggcttgctcaactccacctcggactccgacctcgtgcgctaccgcaccattagcaagattccccaaatcaccctcaactttgtggacctcaagggcgaccccttcttggcttcgcccaccagtgaccgtgagatcatagcacctaagataaaggagcgaacccacaatgtcactgagaaggtcacccaggtcctgtccctgggcgccgacgtgctgcctgagtacaagctgcaggcaccgcgcatccaccgctggaccatcctgcattacagccccttcaaggccgtgtgggactggctcatcctgctgctggtcatctacacggctgtcttcacaccctactcggctgccttcctgctgaaggagacggaagaaggcccgcctgctaccgagtgtggctacgcctgccagccgctggctgtggtggacctcatcgtggacatcatgttcattgtggacatcctcatcaacttccgcaccacctacgtcaatgccaacgaggaggtggtcagccaccccggccgcatcgccgtccactacttcaagggctggttcctcatcgacatggtggccgccatccccttcgacctgctcatcttcggctctggctctgaggagctgatcgggctgctgaagactgcgcggctgctgcggctggtgcgcgtggcgcggaagctggatcgctactcagagtacggcgcggccgtgctgttcttgctcatgtgcacctttgcgctcatcgcgcactggctagcctgcatctggtacgccatcggcaacatggagcagccacacatggactcacgcatcggctggctgcacaacctgggcgaccagataggcaaaccctacaacagcagcggcctgggcggcccctccatcaaggacaagtatgtgacggcgctctacttcaccttcagcagcctcaccagtgtgggcttcggcaacgtctctcccaacaccaactcagagaagatcttctccatctgcgtcatgctcattggctccctcatgtatgctagcatcttcggcaacgtgtcggccatcatccagcggctgtactcgggcacagcccgctaccacacacagatgctgcgggtgcgggagttcatccgcttccaccagatccccaatcccctgcgccagcgcctcgaggagtacttccagcacgcctggtcctacaccaacggcatcgacatgaacgcggtgctgaagggcttccctgagtgcctgcaggctgacatctgcctgcacctgaaccgctcactgctgcagcactgcaaacccttccgaggggccaccaagggctgccttcgggccctggccatgaagttcaagaccacacatgcaccgccaggggacacactggtgcatgctggggacctgctcaccgccctgtacttcatctcccggggctccatcgagatcctgcggggcgacgtcgtcgtggccatcctggggaagaatgacatctttggggagcctctgaacctgtatgcaaggcctggcaagtcgaacggggatgtgcgggccctcacctactgtgacctacacaagatccatcgggacgacctgctggaggtgctggacatgtaccctgagttctccgaccacttctggtccagcctggagatcaccttcaacctgcgagataccaacatgatcccgggctcccccggcagtacggagttagagggtggcttcagtcggcaacgcaagcgcaagttgtccttccgcaggcgcacggacaaggacacggagcagccaggggaggtgtcggccttggggccgggccgggcgggggcagggccgagtagccggggccggccgggggggccgtggggggagagcccgtccagtggcccctccagccctgagatcagtgaggatgagggcccaggccgcagctccagccccctccgcctggtgcccttctccagccccaggccccccggagagccgccgggtggggagcccctgatggaggactgcgagaagagcagcgacacttgcaaccccctgtcaggcgccttctcaggagtgtccaacattttcagcttctggggggacagtcggggccgccagtaccaggagctccctcgatgccccgcccccacccccagcctcctcaacatccccctctccagcccgggtcggcggccccggggcgacgtggagagcaggctggatgccctccagcgccagctcaacaggctggagacccggctgagtgcagacatggccactgtcctgcagctgctacagaggcagatgacgctggtcccgcccgcctacagtgctgtgaccaccccggggcctggccccacttccacatccccgctgttgcccgtcagccccctccccaccctcaccttggactcgctttctcaggtttcccagttcatggcgtgtgaggagctgcccccgggggccccagagcttccccaagaaggccccacacgacgcctctccctaccgggccagctgggggccctcacctcccagcccctgcacagacacggctcggacccgggcagttagtggggctgcccagtgtggacacgtggctcacccagggatcaaggcgctgctgggccgctccccttggaggccctgctcaggaggccctgaccgtggaaggggagaggaactcgaaagcacagctcctcccccagcccttgggaccatcttctcctgcagtcccctgggccccagtgagaggggcaggggcagggccggcagtaggtggggcctgtggtccccccactgccctgagggcattagctggtctaactgcccggaggcacccggccctgggccttaggcacctcaaggacttttctgctatttactgctcttattgttaaggataataattaaggatcatatgaataattaatgaagatgctgatgactatgaataataaataattatcctgaggaga

SEQ ID NO: 670 - DNA, 3884 bp, Homo sapiens
  source 1..3884: mol_type = genomic DNA
  misc_feature 1..3884: note = cDNA of KCNH2 gene SNP c.281T>G (p.Val94Gly)
atgccggtgcggaggggccacgtcgcgccgcagaacaccttcctggacaccatcatccgcaagtttgagggccagagccgtaagttcatcatcgccaacgctcgggtggagaactgcgccgtcatctactgcaacgacggcttctgcgagctgtgcggctactcgcgggccgaggtgatgcagcgaccctgcacctgcgacttcctgcacgggccgcgcacgcagcgccgcgctgccgcgcagatcgcgcaggcactgctgggcgccgaggagcgcaaaggggaaatcgccttctaccggaaagatgggagctgcttcctatgtctggtggatgtggtgcccgtgaagaacgaggatggggctgtcatcatgttcatcctcaatttcgaggtggtgatggagaaggacatggtggggtccccggctcatgacaccaaccaccggggcccccccaccagctggctggccccaggccgcgccaagaccttccgcctgaagctgcccgcgctgctggcgctgacggcccgggagtcgtcggtgcggtcgggcggcgcgggcggcgcgggcgccccgggggccgtggtggtggacgtggacctgacgcccgcggcacccagcagcgagtcgctggccctggacgaagtgacagccatggacaaccacgtggcagggctcgggcccgcggaggagcggcgtgcgctggtgggtcccggctctccgccccgcagcgcgcccggccagctcccatcgccccgggcgcacagcctcaaccccgacgcctcgggctccagctgcagcctggcccggacgcgctcccgagaaagctgcgccagcgtgcgccgcgcctcgtcggccgacgacatcgaggccatgcgcgccggggtgctgcccccgccaccgcgccacgccagcaccggggccatgcacccactgcgcagcggcttgctcaactccacctcggactccgacctcgtgcgctaccgcaccattagcaagattccccaaatcaccctcaactttgtggacctcaagggcgaccccttcttggcttcgcccaccagtgaccgtgagatcatagcacctaagataaaggagcgaacccacaatgtcactgagaaggtcacccaggtcctgtccctgggcgccgacgtgctgcctgagtacaagctgcaggcaccgcgcatccaccgctggaccatcctgcattacagccccttcaaggccgtgtgggactggctcatcctgctgctggtcatctacacggctgtcttcacaccctactcggctgccttcctgctgaaggagacggaagaaggcccgcctgctaccgagtgtggctacgcctgccagccgctggctgtggtggacctcatcgtggacatcatgttcattgtggacatcctcatcaacttccgcaccacctacgtcaatgccaacgaggaggtggtcagccaccccggccgcatcgccgtccactacttcaagggctggttcctcatcgacatggtggccgccatccccttcgacctgctcatcttcggctctggctctgaggagctgatcgggctgctgaagactgcgcggctgctgcggctggtgcgcgtggcgcggaagctggatcgctactcagagtacggcgcggccgtgctgttcttgctcatgtgcacctttgcgctcatcgcgcactggctagcctgcatctggtacgccatcggcaacatggagcagccacacatggactcacgcatcggctggctgcacaacctgggcgaccagataggcaaaccctacaacagcagcggcctgggcggcccctccatcaaggacaagtatgtgacggcgctctacttcaccttcagcagcctcaccagtgtgggcttcggcaacgtctctcccaacaccaactcagagaagatcttctccatctgcgtcatgctcattggctccctcatgtatgctagcatcttcggcaacgtgtcggccatcatccagcggctgtactcgggcacagcccgctaccacacacagatgctgcgggtgcgggagttcatccgcttccaccagatccccaatcccctgcgccagcgcctcgaggagtacttccagcacgcctggtcctacaccaacggcatcgacatgaacgcggtgctgaagggcttccctgagtgcctgcaggctgacatctgcctgcacctgaaccgctcactgctgcagcactgcaaacccttccgaggggccaccaagggctgccttcgggccctggccatgaagttcaagaccacacatgcaccgccaggggacacactggtgcatgctggggacctgctcaccgccctgtacttcatctcccggggctccatcgagatcctgcggggcgacgtcgtcgtggccatcctggggaagaatgacatctttggggagcctctgaacctgtatgcaaggcctggcaagtcgaacggggatgtgcgggccctcacctactgtgacctacacaagatccatcgggacgacctgctggaggtgctggacatgtaccctgagttctccgaccacttctggtccagcctggagatcaccttcaacctgcgagataccaacatgatcccgggctcccccggcagtacggagttagagggtggcttcagtcggcaacgcaagcgcaagttgtccttccgcaggcgcacggacaaggacacggagcagccaggggaggtgtcggccttggggccgggccgggcgggggcagggccgagtagccggggccggccgggggggccgtggggggagagcccgtccagtggcccctccagccctgagagcagtgaggatgagggcccaggccgcagctccagccccctccgcctggtgcccttctccagccccaggccccccggagagccgccgggtggggagcccctgatggaggactgcgagaagagcagcgacacttgcaaccccctgtcaggcgccttctcaggagtgtccaacattttcagcttctggggggacagtcggggccgccagtaccaggagctccctcgatgccccgcccccacccccagcctcctcaacatccccctctccagcccgggtcggcggccccggggcgacgtggagagcaggctggatgccctccagcgccagctcaacaggctggagacccggctgagtgcagacatggccactgtcctgcagctgctacagaggcagatgacgctggtcccgcccgcctacagtgctgtgaccaccccggggcctggccccacttccacatccccgctgttgcccgtcagccccctccccaccctcaccttggactcgctttctcaggtttcccagttcatggcgtgtgaggagctgcccccgggggccccagagcttccccaagaaggccccacacgacgcctctccctaccgggccagctgggggccctcacctcccagcccctgcacagacacggctcggacccgggcagttagtggggctgcccagtgtggacacgtggctcacccagggatcaaggcgctgctgggccgctccccttggaggccctgctcaggaggccctgaccgtggaaggggagaggaactcgaaagcacagctcctcccccagcccttgggaccatcttctcctgcagtcccctgggccccagtgagaggggcaggggcagggccggcagtaggtggggcctgtggtccccccactgccctgagggcattagctggtctaactgcccggaggcacccggccctgggccttaggcacctcaaggacttttctgctatttactgctcttattgttaaggataataattaaggatcatatgaataattaatgaagatgctgatgactatgaataataaataattatcctgaggaga

(The sequence listing continues in the following parts.)
